United States Patent Application Publication US 2011/0183924 A1 - sequence listing, part 32

SEQ ID NO: 73394 - DNA, 1055 bp, Homo sapiens
  misc_feature (11)..(11): n is a, c, g, or t
tctgacgcccntttgcaaacacagccttgggcacacttgctacagcccacggggcagcagttacagacagctgaccatggaagcgaatgggttgggcctccagcgtagcatactgacacctacccccacccccacctgatcgccagacctcagggttttccggagctgaagaatgacacattcctgcgagcagcctggggagaggaaacagactacactcccgtttggtgcatgcgccaggcaggccgttacttaccagagtttagggaaacccgggctgcccaggactttttcagcacgtgtcgctctcctgaggcctgctgtgaactgactctgcaggtgaggggtccacaaaagagggaaagatttatgccttcagtctgccacctagcaacctgtctcctgtttcctacagccactgcgtcgcttccctctggatgctgccatcattttctccgacatccttgttgtaccccaggtacccactcaaacctgatcctagaatataatccaaggacgccttgaaaatccttctatcagtccagtcaaggtttacaataagcacttatcctaactggatcgagggaaaaactaaggttgaaagaaatggagtttggcagagttttattctccttttccttcctcctggaatgagctgaacagaacctttcctcctggattccattttgggaacccagatgttttctccccctccaggcactgggcatggaggtgaccatggtacctggcaaaggacccagcttcccagagccattaagagaagagcaggaccccagtgccctgttggtcccccaggaggagatcgggcagttggtgaagcagatgctggatgactttggaccacatcgctacattgccaacctgggccatgggctttatcctgacatggacccagaacatgtgggcgcctttgtggatgctgtgcataaacactcacgtctgcttcgacagaactgagtgtatacctttaccctcaagtaccactaacacagatgattgatcgtttccaggacaataaaagtttcggagttgaa

SEQ ID NO: 73395 - DNA, 544 bp, Homo sapiens
  misc_feature (11)..(11): n is a, c, g, or t
tctgacgcccntttgcaaacacagccttgggcacacttgctacagcccacggggcagcagttacagacagctgaccatggaagcgaatgggttggggtgagttctccagagcacgcggtgtggctagccgggcttctaatttgagtcttccaactcaggactctatccctctactcccctttccccaccctggagacctcccaacctgaactccgttagctgggatcctgaatcctaaaaccatggatttttgagatgttcatcccagggccttaattcaagggatgcctcaggatttccaaccaggatctctattctgggaccatcaactctgatccctctttatcccccagcctgggtatttctcagcccctgaaccagcccagtgacattcccgtttctgaggctcactagttcgaagacccccaaactatccttagtgggccttcattccctccccccagtccctctggttgcttcgagcttggaagagtagagactaagtggagggaagaggccccagggcgggcccttctggagtttg

SEQ ID NO: 73396 - DNA, 1141 bp, Homo sapiens
  misc_feature (11)..(11): n is a, c, g, or t
tctgacgcccntttgcaaacacagccttgggcacacttgctacagcccacggggcagcagttacagacagctgaccatggaagcgaatgggttgggacctcagggttttccggagctgaagaatgacacattcctgcgagcagcctggggagaggaaacagactacactcccgtttggtgcatgcgccaggcaggccgttacttaccagagtttagggaaacccgggctgcccaggactttttcagcacgtgtcgctctcctgaggcctgctgtgaactgactctgcagacctgtctcctgtttcctacagccactgcgtcgcttccctctggatgctgccatcattttctccgacatccttgttgtaccccaggcactgggcatggaggtgaccatggtacctggcaaaggacccagcttcccagagccattaagagaagagcaggacctagaacgcctacgggatccagaagtggtagcctctgagctaggctatgtgttccaagccatcacccttacccgacaacgactggctggacgtgtgccgctgattggctttgctggtgccccatggaccctgatgacatacatggttgagggtggtggctcaagcaccatggctcaggccaagcgctggctctatcagagacctcaggctagtcaccagctgcttcgcatcctcactgatgctctggtcccatatctggtaggacaagtggtggctggtgcccagatcatctttgctaaggatgggcattttgccctggaggagctggcccaagctggctatgaggtggttgggcttgactggacagtggccccaaagaaagcccgggagtgtgtggggaagacggtgacattgcagggcaacctggacccctgtgccttgtatgcatctgaggaggagatcgggcagttggtgaagcagatgctggatgactttggaccacatcgctacattgccaacctgggccatgggctttatcctgacatggacccagaacatgtgggcgcctttgtggatgctgtgcataaacactcacgtctgcttcgacagaactgagtgtatacctttaccctcaagtaccactaacacagatgattgatcgtttccaggacaataaaagtttcggagttgaa

SEQ ID NO: 73397 - DNA, 1228 bp, Homo sapiens
  misc_feature (11)..(11): n is a, c, g, or t
tctgacgcccntttgcaaacacagccttgggcacacttgctacagcccacggggcagcagttacagacagctgaccatggaagcgaatgggttgggacctcagggttttccggagctgaagaatgacacattcctgcgagcagcctggggagaggaaacagactacactcccgtttggtgcatgcgccaggcaggccgttacttaccagagtttagggaaacccgggctgcccaggactttttcagcacgtgtcgctctcctgaggcctgctgtgaactgactctgcaggtgaggggtccacaaaagagggaaagatttatgccttcagtctgccacctagcaacctgtctcctgtttcctacagccactgcgtcgcttccctctggatgctgccatcattttctccgacatccttgttgtaccccaggtacccactcaaacctgatcctagaatataatccaaggacgccttgaaaatccttctatcagtccagtcaaggtttacaataagcacttatcctaactggatcgagggaaaaactaaggttgaaagaaatggagtttggcagagttttattctccttttccttcctcctggaatgagctgaacagaacctttcctcctggattccattttgggaacccagatgttttctccccctccaggcactgggcatggaggtgaccatggtacctggcaaaggacccagcttcccagagccattaagagaagagcaggacctagaacgcctacgggatccagaagtggtagcctctgagctaggctatgtgttccaagccatcacccttacccgacaacgactggctggacgtgtgccgctgattggctttgctggtgccccaccaagctggctatgaggtggttgggcttgactggacagtggccccaaagaaagcccgggagtgtgtggggaagacggtgacattgcagggcaacctggacccctgtgccttgtatgcatctgaggaggagatcgggcagttggtgaagcagatgctggatgactttggaccacatcgctacattgccaacctgggccatgggctttatcctgacatggacccagaacatgtgggcgcctttgtggatgctgtgcataaacactcacgtctgcttcgacagaactgagtgtatacctttaccctcaagtaccactaacacagatgattgatcgtttccaggacaataaaagtttcggagttgaa

SEQ ID NO: 73398 - DNA, 838 bp, Homo sapiens
  misc_feature (11)..(11): n is a, c, g, or t
tctgacgcccntttgcaaacacagccttgggcacacttgctacagcccacggggcagcagttacagacagctgaccatggaagcgaatgggttgggacctcagggttttccggagctgaagaatgacacattcctgcgagcagcctggggagaggaaacagactacactcccgtttggtgcatgcgccaggcaggccgttacttaccagagtttagggaaacccgggctgcccaggactttttcagcacgtgtcgctctcctgaggcctgctgtgaactgactctgcagccactgcgtcgcttccctctggatgctgccatcattttctccgacatccttgttgtaccccaggcactgggcatggaggtgaccatggtacctggcaaaggacccagcttcccagagccattaagagaagagcaggacctagaacgcctacgggatccagaagtggtagcctctgagctaggctatgtgttccaagccatcacccttacccgacaacgactggctggacgtgtgccgctgattggctttgctggtgccccaggtgacattgcagggcaacctggacccctgtgccttgtatgcatctgaggaggagatcgggcagttggtgaagcagatgctggatgactttggaccacatcgctacattgccaacctgggccatgggctttatcctgacatggacccagaacatgtgggcgcctttgtggatgctgtgcataaacactcacgtctgcttcgacagaactgagtgtatacctttaccctcaagtaccactaacacagatgattgatcgtttccaggacaataaaagtttcggagttgaa

SEQ ID NO: 73399 - DNA, 596 bp, Homo sapiens
  misc_feature (11)..(11): n is a, c, g, or t
tctgacgcccntttgcaaacacagccttgggcacacttgctacagcccacggggcagcagttacagacagctgaccatggaagcgaatgggttgggacctcagggttttccggagctgaagaatgacacattcctgcgagcagcctggggagaggaaacagactacactcccgtttggtgcatgcgccaggcaggccgttacttaccagagtttagggaaacccgggctgcccaggactttttcagcacgtgtcgctctcctgaggcctgctgtgaactgactctgcagccactgcgtcgcttccctctggatgctgccatcattttctccgacatccttgttgtaccccaggcactgggcatggaggtgaccatggtacctggcaaaggacccagcttcccagagccattaagagaagagcaggacctagaacgcctacgggatccagaagtggtagcctctgagctaggctatgtgttccaagccatcacccttacccgacaacgactggctggacgtgtgccgctgattggctttgctggtgccccatgacctgatgacatacatgtgaggtgtgctcagacatgctagcaag

SEQ ID NO: 73400 - DNA, 397 bp, Homo sapiens
  misc_feature (11)..(11): n is a, c, g, or t
tctgacgcccntttgcaaacacagccttgggcacacttgctacagcccacggggcagcagttacagacagctgaccatggaagcgaatgggttgggacctcagggttttccggagctgaagaatgacacattcctgcgagcagcctggggagaggaaacagactacactcccgtttggtgcatgcgccaggcaggccgttacttaccaggtgccccagtaatgtgggacaggtgggctttatcctgacatggacccagaacatgtgggcgcctttgtggatgctgtgcataaacactcacgtctgcttcgacagaactgagtgtatacctttaccctcaagtaccactaacacagatgattgatcgtttccaggacaataaaagtttcggagttgaa

SEQ ID NO: 73401 - DNA, 342 bp, Homo sapiens
aggctggagtgcagtggcgcaatcttggctcgctgcaagctctgcctcccaggttcacaccattctcctgcctcagcctcccaagtggctgggactacaggcacccaccacgcctggctaattttttttgtatttttagtagagacggggtttcaccatgttagccaggatggtctcaatctcctgaccttgtgatccgcccgcctcggcctcccaaagtgctgggattacaggcgtgagccactgcgcccggccttcacctgttagtttttcaagaggtgttcgtcatgtccactgtgatagttattttgtgtgtcaacctgactgggccacggggtgcct

SEQ ID NO: 73402 - DNA, 579 bp, Homo sapiens
caaaaaatatcgattccacgaataatccccaaaacaatgcatgaaagttccagttgtttcacacacctgtccagctctttctgattatagtcatccagcagacagtgtgcatttacctgatgtgtaatgatttcgagtacttttcgatgtgcttattggctatttggattttttttttttttgagggcacctgttgaaaccctgtctgtactaaaaaaattagccaggcgtggtggcctgtgcctataatctcagctactcaggaggctggggcaggagaatcacttgaacccaggaggtggagttgcaggtagccaagattgtgccagtgcactccagcctgggcaacagaatgagactccgtgtcaaaaaaaaaaaaaaaaaaagattgctgcttaatctttaatgagcataaagatcaacttgagatctgacacctgtttaagaattatttgcctggaccaagataatgaatctactctcctatgtttccttctagattctttattgtttttttatgtaggtctgtgatctactttgaataattttttgtagcgtgtgaggtaggatcaaggtgtg

SEQ ID NO: 73403 - DNA, 405 bp, Homo sapiens
gactgttggactcattgatcaatatttgctcaaaactgaatgttatagctggacgtgatggtgcatacctgtggtcccagctactcagggagctgaggctggaggatcacttgagcccaggagtttgaggctgcagtgaactatgatcatgccactgcactccagcctgggcaacagaatgagactccgtgtcaaaaaaaaaaaaaaaaaaagattgctgcttaatctttaatgagcataaagatcaacttgagatctgacacctgtttaagaattatttgcctggaccaagataatgaatctactctcctatgtttccttctagattctttattgtttttttatgtaggtctgtgatctactttgaataattttttgtagcgtgtgaggtaggatcaaggtgtg

SEQ ID NO: 73404 - DNA, 285 bp, Homo sapiens
ttttgtgaagttttgctgcaaaggggaacatagaaaaggtgcaggtcctggtataggaaatagggtcgagtaatttctttgttttgaagatgagagaaatagctgcatgttatgtgacgatgagaagagtccagtagaaaggaaaatattgctgatgttgcagagaggataggctggctggagtgacaccctggagcagtaagagatgatgggatccagcagtccagtgcaggattctttgggtggacctagcagttgttcatccacagtcacagggaggcaata

SEQ ID NO: 73405 - DNA, 550 bp, Homo sapiens
gtaatatctgggacagaagagggaatcctttccatgggataaaagagaaacggatggctgggtgtggtggctcacacttgtaattccaacactttgggaggctgagatgggaggcctgcttgagcccaggagttcgagaccagcctgggcaacacagggagaccccgccccccagtctctccaaaagaatttaaaaattagccaggaatggtggtgcacgcctgtggttccagctacttgggaaactgaggtgggaggatcacttgagcctgggaggttgaggctgcagttagccatgatcacaccactgcactccagcctgggcacaaaggaagaccctgtctcaaaaaaatttaaaaaattaaaaatagaaaagagaaagagattgaaaaaaaaaaaaacaagcctccagccttgaaaaatttcaggtcttgggtggatgtcaagaagagaaggtcaactggttcatcctcctgcttctacagggccctaccctaaaaacattccacaccaataccaaaccataaccaaatggtcatgcaaagtaatt

SEQ ID NO: 73406 - DNA, 644 bp, Homo sapiens
tctgccaagcagagcaaagccccacctccctctcgctttgactccctgtggggaaatgtgtcggtttgtatgcagtatagatagagcacatatgcctggtttttcttcctttggggaggaaaaaaatgttactacctaaaaagaaaactggctgggtgtggtggctcacacttgtaattccaacactttgggaggctgagatgggaggcctgcttgagcccaggagttcgagaccagcctgggcaacacagggagaccccgccccccagtctctccaaaagaatttaaaaattagccaggaatggtggtgcacgcctgtggttccagctacttgggaaactgaggtgggaggatcacttgagcctgggaggttgaggctgcagttagccatgatcacaccactgcactccagcctgggcacaaaggaagaccctgtctcaaaaaaatttaaaaaattaaaaatagaaaagagaaagagattgaaaaaaaaaaaaacaagcctccagccttgaaaaatttcaggtcttgggtggatgtcaagaagagaaggtcaactggttcatcctcctgcttctacagggccctaccctaaaaacattccacaccaataccaaaccataaccaaatggtcatgcaaagtaatt

SEQ ID NO: 73407 - DNA, 613 bp, Homo sapiens
aagaactgagggagtgacagcagcattaagaagagcccactgcattcctgaagtctgtaccgtggcagaaagaaggatgaacactggaaatgaacctgagcttgagacaggccagcatgaacaatagaaagcctgcatgattctggcatctcatttccgtgggtcggcttccctaggatgttcctgcttttctcagatgcttcccttcttcaataagatgtccaagattttcacagtggctctcttttgacttgacaagatgttggtactgaagaaaccgaagtctcagttcttcacatgtagtgagtcaggatgcatagtgtttacgagcaggggagacttctttgagccttagttttttgtctataaagggtaaatactatctccctaataatgtctaccagaaatcaaatttaataattcatgacagatactttgcaccttagctgctcctccttgtattgctgtttatctactctaccacatttcttgtattcttagttggtttgtaatattgttaaataccaagaccatgtcttaaatctcctgtagctctagtgtctagttctaagcactgtagatactgggactcagtaaatctctttttatgaat

SEQ ID NO: 73408 - DNA, 504 bp, Homo sapiens
tggcaaagagcttgttggaaaggattcaagctgcagaccatctcaagccaaactccaactgtatttttaatgaatcagttgaagcaactcgatggaaaggacgggtcttgctccatcatccaggctggagtgaagtggcgcaatcatagctctctgcatcgttgacctcctgggcctaagtgatcctaccaccttgatctccttgccttaagtgatcctaccaccttaaccttctgagtagctgggactacaggcatgtgctgctacacccagctaatttttttttaactttcccctgagtcactggaattataggcgtgcaccaccgtgcccggcagtcagtgagtacttactgagtactgaccacaggcctttccctcatggaacattcatgactgaggacacacacaacccttaaatggacacctgaaaatgacataaggtccaccaaaaaatggaagggctgctctattaaactacttaaaaaataacttgtatgtattc

SEQ ID NO: 73409 - DNA, 789 bp, Homo sapiens
aaaaaaaaagtgaaagttcttactggtgtcttaaatatcaagtaaaacaggttcaaatcaataattaacaatctttggttcctgcctatagcaaaaaggtaaaatggaaagcagttatacaaatagtatgttaactcataagaaaactagccaaagacagatttattatcatctgctttttttgttgttgttttctcgagacggagtctagctctgtctcccaggctggtgtgcagtggtgtgatctcgactaactacaacctccacctcctgggttcaaatgattcttttgctgcagccatctgagtacctgggattacagacgggcaccaccacacctggctaatttttgcatttctagtggatatagagtttcaccatgttggccatactggtcttgaagtcctaacctcaggtgatccacctgcctcagcctgccaaattgctgggagccacgggcctggccaatcatctgctttttataggtgataatactgaggcagggagtagttgtaaaatggagtctcagatcatagctataccaagcagggaatctggtttcctgtcctggcagtctgactccaagatcccctcttagaaaccatcatactgtaaaaactgaaaggaaataaaaatccaagattggagactgattttaacatctattcatctaaaccattaagtaatcaaaaatgaattaaatagaggaaaatacaactgactattcatacacagagaagtgtagactcttcaatggaaaacatgttttttaagtgcccaaggaatagt

SEQ ID NO: 73410 - DNA, 315 bp, Homo sapiens
ctctatagtatctccagtatggccatgtttggcaatgggaaaatttaccattatgagttgaaataacaaaaaaaatgaacattgtggctaaatactttaagtcacactggagagggaaatgaattagcaattcacaagtcaggatccaattttaagttcaaagttccagttgagccaacctgaaaccagcttgtaggcaaagcaaaactaaacctcaagcatataagtgtggacaacaagcacatttttattttgttatggatactaattgtttcaatccaggcaaaacaccaaatatctttaaaaggtaattgg

SEQ ID NO: 73411 - DNA, 434 bp, Homo sapiens
attaaatccacattaagtaagctggttaaaatgaatatttatactctactttgaaacttgtcaagtgaaataatgagaatacatatttatttttaaatgttagccagaatagttgaggctactgtcatttttggatagtttttcaaactgaagaaattgagaattggaactacttcttcaaaagaatttaaattcattgataaaagaaaaatagcataagtttttatttggattggcaccatatatgatggcagggtttataaattaaatcttgcttgtgggtggccatcaaactgaagagaaagcagtgtcatctgaagccacagccaccaccatttcctgccttctagccactctgttattctcctggtcctgctaaattcataactaagatggcaagtggtgatttgctcattttctttcatttggttgta

SEQ ID NO: 73412 - DNA, 405 bp, Homo sapiens
ctgggattacaggcgtgggccaccacacccagccagttgtgtcttaaaatgacccacattagggctgcagacaaaggctagggaagggagaaaagatacagccagagaagaaaggcaaggacatcattcagaatccctgaagcagccagggaagggagcttaaactaggaaggcattacctacagcctcagaagcaaagcagtagatagggtaaggagaattgggatgaggaaagactctaaatttggtgattatgggtaggttggtgaccgcaagagaagaattccagaagctaagagggtgcaggaagatggactgtgcaggactgaatgtgtgagtagtaatgaaaggaaacaatgaacataaaccaaactttggggaggtttggtgctaaacagcaaaagc

SEQ ID NO: 73413 - DNA, 295 bp, Homo sapiens
cttcataaatgttttgtagcttttgtacagtcttgcacatcttttatccaatttatcccggagtgtttcatattgtgatgcttttgtaaaatgatttagtttttaaaatttcagtatctgttcattgctattatatagaaatgtaattgatttttgtgtcttggtcttacattctataaccttcctaaattcttttattagttttagtaactttttaatagatttcatcaggttttccctgtaggttatcttattgtcagcaaataaagaaatttttacttgtttctttctgact

SEQ ID NO: 73414 - DNA, 328 bp, Homo sapiens
attttaaaatgctagttgagggaagctgtatcaagtgaggacaaatttgtatctggaacttaaaacagggcaaaagctgaaatagagagaagtccatgacactaatgaccttaatatcatagatacagattaaatagtaaattatgatttttctcatctaaatttccttgaaaactactgaggatacattgactaccatcacaaacaagatgctcaataagaaatataagatccctgctcaaaattttgcagaagtgacccatttatgacaatatttcagtcttaatgaatcctgagcatgtaattttcttaaaatagaattttataa

SEQ ID NO: 73415 - DNA, 251 bp, Homo sapiens
gtttttggtccattcattctctctgagctccattgagactgccagctgctctctggactggcttctaatgttcacttcatacatgtcacctcttcatccagctacctcctaattgttccaatctttttttctttctttttggaggtaagctcttctggtacttctttttttatcgttctcacacttcttcagaaactcttctcatggtatacatgttcctggtacacaccactcaagggcagattctgaca

SEQ ID NO: 73416 - DNA, 619 bp, Homo sapiens
gcctctgttcttttttttctactgttctccttccatgccaatgacaccacttacatttcccctagaactgcagattttttttaaatactgggtttcctaaagcagttcttattttatatattctaatttatgtacatgaatgtgtcacatagacctgtcattagagatggtttagaaaataagcttacactatacgtgcctcaatccacttcaaaactacatattgggcccaaagaggaaaagggacttctcagaagaaaagcagtttctgaaaagctggagaacctgactcaattaatacagctgctggttgcccaccactttaacctctgacacctgatagagaagcttcatgaaagcagcaatgattattaagagagcaaagcaaccacagggaaaagggaaaatcttcaagcaaagacttgaagatagagacatggtagggggagatataaggatgctatattcatagcaaagtaccacagactgggtgccttgaagaacagaaatgtattgtctcacagttctggagactagaaatccaagatgtcagcagggttgtttccttctgagggcgtttagggaaagatctatcccagggctctttccttggctttgt

SEQ ID NO: 73417 - DNA, 2482 bp, Homo sapiens
gtgggctgcctggggggctgatgccaccattccaggagcctcggtgaagagaggatatccatctgtgtagccgcttctctatacgggattccagctccatggcagcccgtctgctcctcctgggcatccttctcctgctgctgcccctgcccgtccctgccccgtgccacacagccgcacgctcagagtgcaagcgcagccacaagttcgtgcctggtgcatggctggccggggagggtgtggacgtgaccagcctccgccgctcgggctccttcccagtggacacacaaaggttcctgcggcccgacggcacctgcaccctctgtgaaaatgccctacaggagggcaccctccagcgcctgcctctggcgctcaccaactggcgggcccagggctctggctgccagcgccatgtaaccagggccaaagtcagctccactgaagctgtggcccgggatgcggctcgtagcatccgcaacgactggaaggtcgggctggacgtgactcctaagcccaccagcaatgtgcatgtgtctgtggccggctcacactcacaggcagccaactttgcagcccagaagacccaccaggaccagtacagcttcagcactgacacggtggagtgccgcttctacagtttccatgtggtacacactcccccgctgcaccctgacttcaagagggccctcggggacctgccccaccacttcaacgcctccacccagcccgcctacctcaggcttatctccaactacggcacccacttcatccgggctgtggagctgggtggccgcatatcggccctcactgccctgcgcacctgcgagctggccctggaagggctcacggacaacgaggtggaggactgcctgactgtcgaggcccaggtcaacataggcatccacggcagcatctctgccgaagccaaggcctgtgaggagaagaagaagaagcacaagatgacggcctccttccaccaaacctaccgggagcgccactcggaagtggttggcggccatcacacctccattaacgacctgctgttcgggatccaggccgggcccgagcagtactcagcctgggtaaactcgctgcccggcagccctggcctggtggactacaccctggaacccctgcacgtgctgctggacagccaggacccgcggcgggaggcactgaggagggccctgagtcagtacctgacggacagggctcgctggagggactgcagccggccgtgcccaccagggcggcagaagagcccccgagacccatgccagtgtgtgtgccatggctcagcggtcaccacccaggactgctgccctcggcagaggggcctggcccagctggaggtgaccttcatccaagcatggggcctgtggggggactggttcactgccacggatgcctatgtgaagctcttctttggtggccaggagctgaggacgagcaccgtgtgggacaataacaaccccatctggtcagtgcggctggattttggggatgtgctcctggccacaggggggcccctgaggttgcaggtctgggatcaggactctggcagggacgatgacctccttggcacctgtgatcaggctcccaagtctggttcccatgaggtgagatgcaacctgaatcatggccacctaaaattccgctatcatgccaggtgcttgccccacctgggaggaggcacctgcctggactatgtcccccaaatgcttctgggggagcctccaggaaaccggagtggggccgtgtggtgagaacagtgagcttggaaaggaccagtatgcttggactgaaggggttctcacagtgggagccagggctgtcttcgtattcccattagaccaagcttgtccaacccgaggcccgcatgcggcccaggatggctttgaatgcggcccaacgcaaattcgcaaactttcttaaaacattatgagtttctttttgctatttttttttttttttttagctcatcggctatcgttagtgctagtggattttacatgtggcccaacacaattcttcttccaacgtggcccagagaagccaaaagattggatacgcatcagacagatggaaaagggagattcagactgtttttcagggaggtggctgggtttacacgctaatcccgattcaccctgtccaaactgcctaagccctccgccattctcaagccctgcagtcacagctacacagatcacagcttcagccaggagctgggcagaaggccaagaggctgttcccaccaggctgctcagggctggtcttttaggacccttcccttgagccctctatggtgtggcaaagccttcattgccttaactggagccccatcagctccagctgctctgtcttctttgcccacaatgctttgcccctgagacaaatggaggcctgtcctgacctgtctcaccatgtacatagcttgataaagggccaataaatatgatgttatggtgaaaaaaaaaaa

SEQ ID NO: 73418 - DNA, 1320 bp, Homo sapiens
  misc_feature (1)..(1): n is a, c, g, or t
naactgcagccgaaccctggtccctcctccacaatgtggcttctcctcactctctccttcctgctggcatccacagcagcccaggatggtgacaagttgctggaaggtgacgagtgtgcaccccactcccagccatggcaagtggctctctacgagcgtggacgctttaactgtggcgcttccctcatctccccacactgggtgctgtctgcggcccactgccaaagccgcttcatgagagtgcgcctgggagagcacaacctgcgcaagcgcgatggcccagagcaactacggaccacgtctcgggtcattccacacccgcgctacgaagcgcgcagccaccgcaacgacatcatgttgctgcgcctagtccagcccgcacgcctgaacccccaggtgcgccccgcggtgctacccacgcgttgcccccacccgggggaggcctgtgtggtgtctggctggggcctggtgtcccacaacgagcctgggaccgctgggagcccccggtcacaagcttccccagtgagtctcccagatacgttgcattgtgccaacatcagcattatctcggacacatcttgtgacaagagctacccagggcgcctgacaaacaccatggtgtgtgcaggcgcggagggcagaggcgcagaatcctgtgagggtgactctgggggacccctggtctgtgggggcatcctgcagggcattgtgtcctggggtgacgtcccttgtgacaacaccaccaagcctggtgtctataccaaagtctgccactacttggagtggatcagggaaaccatgaagaggaactgactattctagcctatctcctgtgcccctgactgagcagaagcccccacagctggccagcagccccgcctgacatggaacagaacggagccatcccccaagaccctgtccaaggcccagatgttagccaaggacttgtcccacctgaggacaaagctggcgctcaaggtcacctgtttaatgccaagataacaaagcgctgatccaagttgctctgtaggaatttctgtgacttttttctggggtcaaagagaaaccccgagacactgtacactgttccttttcacccaccaccccgatccctaggtgaggagaagcggcttgaagcagggctccattcattcaacacacatgaccacccgtgtgatcttgaacaagaggcccaatctcacttcgccttggtttccttatctgtaaaatgagaccatcttattgctgacttcaaagggctgttgtgaggattaaatgagatgattcgtctgaactgattaaaatcgtgtctggcactga

SEQ ID NO: 73419 - DNA, 1276 bp, Homo sapiens
  misc_feature (1)..(1): n is a, c, g, or t
naactgcagccgaaccctggtccctcctccacaatgtggcttctcctcactctctccttcctgctggcatccacagcagcccaggatggtgacaagttgctggaaggtgacgagtgtgcaccccactcccagccatggcaagtggctctctacgagcgtggacgctttaactgtggcgcttccctcatctccccacactgggtgctgtctgcggcccactgccaaagccgcttcatgagagtgcgcctgggagagcacaacctgcgcaagcgcgatggcccagagcaactacggaccacgtctcgggtcattccacacccgcgctacgaagcgcgcagccaccgcaacgacatcatgttgctgcgcctagtccagcccgcacgcctgaacccccaggtgcgccccgcggtgctacccacgcgttgcccccacccgggggaggcctgtgtggtgtctggctggggcctggtcttccccagtgagtctcccagatacgttgcattgtgccaacatcagcattatctcggacacatcttgtgacaagagctacccagggcgcctgacaaacaccatggtgtgtgcaggcgcggagggcagaggcgcagaatcctgtgagggtgactctgggggacccctggtctgtgggggcatcctgcagggcattgtgtcctggggtgacgtcccttgtgacaacaccaccaagcctggtgtctataccaaagtctgccactacttggagtggatcagggaaaccatgaagaggaactgactattctagcctatctcctgtgcccctgactgagcagaagcccccacagctggccagcagccccgcctgacatggaacagaacggagccatcccccaagaccctgtccaaggcccagatgttagccaaggacttgtcccacctgaggacaaagctggcgctcaaggtcacctgtttaatgccaagataacaaagcgctgatccaagttgctctgtaggaatttctgtgacttttttctggggtcaaagagaaaccccgagacactgtacactgttccttttcacccaccaccccgatccctaggtgaggagaagcggcttgaagcagggctccattcattcaacacacatgaccacccgtgtgatcttgaacaagaggcccaatctcacttcgccttggtttccttatctgtaaaatgagaccatcttattgctgacttcaaagggctgttgtgaggattaaatgagatgattcgtctgaactgattaaaatcgtgtctggcactga

SEQ ID NO: 73420 - DNA, 2102 bp, Homo sapiens
  misc_feature (1)..(1): n is a, c, g, or t
  misc_feature (852)..(852): n is a, c, g, or t
  misc_feature (1159)..(1159): n is a, c, g, or t
naactgcagccgaaccctggtccctcctccacaatgtggcttctcctcactctctccttcctgctggcatccacagcagcccaggatggtgacaagttgctggaaggtgacgagtgtgcaccccactcccagccatggcaagtggctctctacgagcgtggacgctttaactgtggcgcttccctcatctccccacactgggtgctgtctgcggcccactgccaaagccgcttcatgagagtgcgcctgggagagcacaacctgcgcaagcgcgatggcccagagcaactacggaccacgtctcgggtcattccacacccgcgctacgaagcgcgcagccaccgcaacgacatcatgttgctgcgcctagtccagcccgcacgcctgaacccccaggtgcgccccgcggtgctacccacgcgttgcccccacccgggggaggcctgtgtggtgtctggctggggcctggtgtcccacaacgagcctgggaccgctgggagcccccggtcacaaggtgcgtgaaaggatggagctggatgcgaggcctcaaggaatcctatgctccagggctcttgggcggaggggacaagggccggaatttatggatctgctccaagtccactgtcttccccagtgagtctcccagatacgttgcattgtgccaacatcagcattatctcggacacatcttgtgacaagagctacccagggcgcctgacaaacaccatggtgtgtgcaggcgcggagggcagaggcgcagaatcctgtgaggtcagagcctagaggggccatcaggcggaagaagagggatggggacaggtgtgggagtccggatggggttggattttcttngctttgggccagagaagatgctagggttaggcttggagatggagtaggaagagaagttagaataggggtgaggttggagttggggttataggtggggattgcgttgtttgaggtggataatgtgatagttagtttgagatggcatgggttggggttgagaatgggaatggtttggtttgattctgggtgggaaatacgtcagggttgaattgggatgaggtagattttgtttggaatgcagaagacatgaagattgagattggattttgagatgggcatgggtttgatttgattttgaatggtgagnatgtgggctgagttggatttaacttagtacagttgcactggagttgcatgggggtgagattggatataggttgggtgagttgtattgagctgtgttgaattggggttggggttggggttgggttggctctgtttgggataaactgggctgtattgagttgagttgggttggggttccctgggatggggatggattgggtttggggtgagattgcaaatggtgattaggatgaggatgaatccaggaggtttcactcaacctgagaccccctcttttccccacaggtgactctgggggacccctggtctgtgggggcatcctgcagggcattgtgtcctggggtgacgtcccttgtgacaacaccaccaagcctggtgtctataccaaagtctgccactacttggagtggatcagggaaaccatgaagaggaactgactattctagcctatctcctgtgcccctgactgagcagaagcccccacagctggccagcagccccgcctgacatggaacagaacggagccatcccccaagaccctgtccaaggcccagatgttagccaaggacttgtcccacctgaggacaaagctggcgctcaaggtcacctgtttaatgccaagataacaaagcgctgatccaagttgctctgtaggaatttctgtgacttttttctggggtcaaagagaaaccccgagacactgtacactgttccttttcacccaccaccccgatccctaggtgaggagaagcggcttgaagcagggctccattcattcaacacacatgaccacccgtgtgatcttgaacaagaggcccaatctcacttcgccttggtttccttatctgtaaaatgagaccatcttattgctgacttcaaagggctgttgtgaggattaaatgagatgattcgtctgaactgattaaaatcgtgtctggcactga

SEQ ID NO: 73421 - DNA, 430 bp, Homo sapiens
tgagcacatgacttaaattcaagctactgcacagctttgagatctgagtatcacatggaagcatccaggtggcccctggcacacaggctggtggttcttttgtggagagggagagaagaggggctgctcatggggtagtgcaggtgctagaatatcctgttaacctgttcacactgcactgcaattcgggcttcggtaagctcatctaaagagtttccaggccaggcacggtggctcacgcctgtaattccagcactttgagaggccaaggaaggatcacgtgaccccaggagttcagagaccacagtgagctgtgatcgcaccactgcactctagcctgggtgacagagtgaggccctgtctccacaatatataaataaaaacattttgggtttctgttttggagacaataaattaaatctataaccta

SEQ ID NO: 73422 - DNA, 843 bp, Homo sapiens
ttcgcggtttgattctggggtggggcggcacgtggagcgcgccgctatttcctaggccagcgggcggttgtctgtggctccgcgactgggcgccccgtcacgtaggttacacacacaatcactccccagggacggcccggagtccgtccaggcagctgcgccctccccagacccgggcaccgcggaggctggagccgcaatggtgctgatggagggcgggagatggagctgaccaggggccggaggggctgagaagagcctgcccaagtctgggccaagcacgaagccctttcccacccgtcgggctcctgggttcccgccagccgatttccagccgtcagggtcacgccactcgctggaaaccctgaactctgtgccccccaagccctgggccccctgcgggaatgttcaaaaatgagtaccagggaggtgcatttgttgaaattttcagtgctcaaggaaaaaatcctggagcaaaatggaagatccttggtagtccatctgtgatttggaaagagtttgataaagaagttaaaagttttgtgtttgtcctggaaggcagcagccaaacaaacaaaattcagttaccaaaggagaataagcaaagccttggattgatccagaggtttcttgtacttcagatttacgtacccctgggacaagacttctccactgaattgctgtaagatatacagaacttctttgaatgttttgtgtgtattagacatttgatcaattgaagcagtaccaacaatcattaattgcaagtgacagtttttgcattaaagagcagtgacttacatcaagtcaacatcaagtaattaaactaatttaatcatattt

SEQ ID NO: 73423 - DNA, 1162 bp, Homo sapiens
ttcgcggtttgattctggggtggggcggcacgtggagcgcgccgctatttcctaggccagcgggcggttgtctgtggctccgcgactgggcgccccgtcacgtaggttacacacacaatcactccccagggacggcccggagtccgtccaggcagctgcgccctccccagacccgggcaccgcggaggctggagccgcaatggtgctgatggagggcgggagatggagctgaccaggggccggaggggctgagaagagcctgcccaagtctgggccaagcacgaagccctttcccacccgtcgggctcctgggttcccgccagccgatttccagccgtcagggtcacgccactcgctggaaaccctgaactctgtgccccccaagccctgggccccctgcgggaatgttcaaaaatgagtaccagggaggtgcatttgttgaaattttcagtgctcaaggaaaaaatcctggagcaaaatggaagatccttggtagtccatctgtgatttggaaagagtttgataaagaagttaaaagttttgtgtttgtcctggaaggcagcagccaaacaaacaaaattcagttaccaaaggagaataagcaaagccttggattgatccagaggtttcttgtacttcagatttacgtacccctgggacaagacttctccactgaattgctaattactgatttagggaacatcaaaagaagattatatttatcaacggtccataaggaactatcctccacccctcttcatgcaaaaattccactcttcatgatcaaacgtaaaatttggtgcaatctatgcattgacttagtagcattcaccagtgaaatattcaagggggcagttttccagtcattggatggaattgttgtctcagctaactgtagctacggaagatcttcaccttaaaatcaaagccacaagacactgctgataaggatggtatgttcaggttgctatcaagattttttaattctctgatgtatttttaaaattagccatacctttgggatagtatgagtgtgtggtagcagtttgatgttatgtctgctaaagtaaatttgtcaacagtcatgctgatttctttgttctagatcaaatgtttatttttactatagctgaatgtcacaaaaaaggtattaatcttcaaa

SEQ ID NO: 73424 - DNA, 141 bp, Homo sapiens
ggtcgcgagtcccagcagctggcactcttccaatgccctgggcgtgcccttacaggctgccagggcggacagccccaagcctgcttagccccttgcatcaggacttggatctgatgctgccatattgaaaagaaggcaaca

SEQ ID NO: 73425 - DNA, 1257 bp, Homo sapiens
ggttattggagggctgaggctgcgcctgccccaggccaggtcccgccgaaagcatcaagtcaggtaaacaggaggggctgcgccagtcttggtagggaggcagactccacatcatccgcctttggggcgagcaggctcacttgagatctgcctgggccagccggtggcaggtggagctgcatggctgattgcacactgccccaaggctcctggctccaaacccaaggagggagcccaagggcctgtcctgggctgcggtctgaagcaatgatgctttcctgggagcctgttgttgggtgggctgctgcctgccccagccccatgacagcctggatcttcaaaaagagatccctacctctgacctgccactcccaaggagggaaaggagtagccagctggtaccctccctgaagcccagcttcacaggacagcactgccttggggctgctgtaaggaagtggcagaggccgctgggcccagcagtttggctgcatgggccccagaaggcagcactccgacctgggggtcctggggctgggcctccccaagaactggtgcggcccaggagacaggcgagggcacaggatggggatgggagctgtcccagttctacagtcagaggggaagtggccctggtgcttctgccacgggtcccgcatgccagtgatgcccacgcacccccacaaatgctccttcccacctgtcaggggctggcatcagatggcacaggcgcatgtcgggtctgccctggatctgtctggctgcatctgggtccgccctggcaggggcccagcatcttcagccaggggctccaccagcagccctgccagccccagcaggggaggctacaggcagacacccacgggtgctcattgggccaggcactcaagtaacccacagccgcctctcgggcacaccacttgtcccctaagtgaccatggtggagacagcagctccagccccagtacccccagggtcatggacctaggctgagctgagcagtgtccttacagctctgggagggttggggagaggatgggacaggaccctgctgagtggccgcctggcctaccctcccagagactcacgaacaggaggatctgctgtggatgcgtctggggcctgggctcctctgactgtgcacctggggtatccaggcagcccgacacctctggtccaccttgtgctccaggcaggggcccagcagggtgaggccagttcccaggacccctggtcaagggcaccagcttccccatg

SEQ ID NO: 73426 - DNA, 671 bp, Homo sapiens
cgcttcaccgtgcccccgcccgcgaccatggctccgaggtggcgcggcacctgctctttcagtctcacatggcaacgaaaacaacttctatgtcttcacaaggatctgatgatgaacagagaaaaagagaaaacattcgttccttgactgtgtctggccatgttggttttgagaatttgcctgatcagctggtgaacagatccattcagcaaggtttctgctttaatattctgtgtgggggaaactggaattggaaaatcaacactgattgacacattgtttaatactaatttggaagactatgaatcctcacatttttgcccaaatgttaaacttaaagttcagacatatgaactccaggaaagtaatgttcgattgaaattgaccattgtgaatacagtgggatttggtgaccaaataaataaagaagagagctaccaaccgatagttgactacatagatgctcagtttgaggcctgtctccaagaataactgaagattaaacgttctctctttacctaccctgattctcgcatccgtgtgtgcctctacttcatttcactgacaggccactctctgaagacacttgatctcttaaccatgaagaaccttgacagcaaggtaaacattataccagtgattgccaaagcagatacggtttctaaaactga

SEQ ID NO: 73427 - DNA, 336 bp, Homo sapiens
gaactcctgaccttgtgatccacccaccttggcctctgaaagtgctgggattacaggcgtgagccactgcactgggccaacatgaagtcttttatcccttggaagatcagctatttcccagcacagcagatatgtttataaaatctagccatcatgcaagagctagactgagtggttggctccctagtggatagagagcgcagtggtgtgggatggtatggcatggtcatcagggataatgtgaaggagaattgtgggattctcctctcgtggtgacaacctcatgactaaatggtgggctgcagggagccgctccggtggggggattctagccta

SEQ ID NO: 73428 - DNA, 401 bp, Homo sapiens
agcaaggatccagtgcgttgtcataatcccatgaggattttcagatgacacaatcccctcaaatcagtcaccatgttgggtaatgacttcgttcttgctgatctcgtgtgtgtgtcattgtaaatatttgtgtgtccatgttccattttggctactggatggccaagccatgtaagaagatttaactcaagtatttattctttatgttattcagatttctttcaggcttgtgaactgcaccccaatgtttgagtttaaccacctgatccttacatctatccctccccggtgaagcacattccattgctaaaagaaaaagaaacacgaaattgcttcctgttgtctgtataactgttttgatagtttgagatatttgtctataaatgatatttctcagctca

SEQ ID NO: 73429 - DNA, 283 bp, Homo sapiens
atacctaatgcaagtgacgagttaatgggtgcagcacaccaacatggcacatgtgtatacatatgtaacaaacctgcacgttgtgcacatgtaccctagaacttaaagtataattaaaatatatttaaaaaaaaagaattgatgtatatagactgtcctcttataccaaaaaaagtttaaaacctcaaaagcaagtaatatttttacagaaccattgattttgctgctctaaacatgcaaagactgtgtatcctaaccaggctacttctgcaaaatggctaca

SEQ ID NO: 73430 - DNA, 461 bp, Homo sapiens
ttgtgccattgcactctgttgccaggctggagtgagactctgtctcaaaataaaacaaaaaacaaaaacaaaaacccgatgaacatgtactgttttaataaaatgtatgcacatatatgtatgtatacacacactctcacattttatataattaaaattattgtaatataaaagattaaacaagattaaataacctgcctaagattaacctaccagtaaaagaaatagaccagtatctctccatgtctggcctgctctcccagggagtcttaagctctattgtcttttctattaaaactcccattctctaaataaaaatgtctcattcaagtattctgtgttactcagggtgatagaaattcacatgtgaataatatctgctgcttctctacaagagttcagttattacaaatgacaaatatgtaaacaatgaattatagatactggatgctaggaaaaaa

SEQ ID NO: 73431 - DNA, 337 bp, Homo sapiens
cacctgtaatcccagctattcgggaggctgaggcagaagaatcacttgaacccgggaggcggaggttgcagtgagccgagatcgcgaaagagtggaactccatctcaaaaaaaaaaataaaaaataaaaataaagtctattattcataaagaattcattaattaatacaacacgttttatcaacacatatacacaaacacacatatacacacatctgcagtaaaaatttgatgagtgcaccactgtttgcaaaatccaggcaactcaaggaagtcaccaaccaaagcctttgctatgtcctttccccaggcaacctaatcacctgtttgtggctact

SEQ ID NO: 73432 - DNA, 397 bp, Homo sapiens
agcaagtgatacagaataaatgcagtagaaattataggagagagagatcactgagattgtggtacctagggaagagttcatggaggaacagtcaaacggtatcttccacagactcctagccccacacttccaccagtgtttgcacatctgcagttatgtgctctgcttctcatccagcccacaaactctgtttcctcatctgtaacacaaactttcctgctcctgtccagacccggttcccccactgggatactggaacccatcccattttgcctgtgtaaggacacattactctagcatttttcttttctctcttctgtgttatcaatttcttgttctctgctagattattttcattagtatcttgagccttttgtaatttcactcctgaaaacaa

SEQ ID NO: 73433 - DNA, 1439 bp, Homo sapiens
  misc_feature (646)..(646): n is a, c, g, or t
ggcacgaggctggcttctgccactggttccctccatggtaccacacaagggaagatggaagtgggtctgggcaccgggagtgtgcccaccggagactccaagagaaacgtacgagtcgtcccaggaccggggtggtgagcgaggccccattttgtcctcccagggcctagtctcagacagactggggtgagggaggtggggacaggcggcgagccagcgggcagactcaggcctggagctcgtcctgttcccctggccacacaccaaggtgttgctgcctcctgctccctggtggccatgcctgctgtccctcctcactggccttccaggcatgggcgctggctggggagggatggaagcgtgccctgccgggggtgcccctcggactcggtcttgccattcgtgtccgggcctgtgtggtggtctctggcctcgcacggcccgtgtgtgtctggggaggggtgaagcacgccgccggccccctctccccgtggggccgagacctcctggtggtcgcctgcctgatggtgtcccgcccgcgtcccagctgcaagctcgggtgccagggcaacgggcccgcctggccgactactgcgccggggccatgttcgtgcagcagctgctgagtcgcggctacggcttcgangagcgcgccttcggcggcgtgatcttccagaagaaggccgcggacactgcagtgggctgggcgctcggctacatgctgaacctgaccaacctgatccccgccgacccgccggggctgcgcaagggcacagacttcagctcctgggtcgtcctcctgctgctcttcgcctccgcgctcctggctgcgcttgtcctgctgctgcgtcaggtgcactccgccaagctgccaagcaccatttaggggccgacgggggcagctgccccatccctcccccaacccctgtatccccaccccgtactcccacccctcccacaacccctgtacctcccacccctgtatccccacccctccacccacccctctcccaacctctctccccgcccctgtatcctgcattcctccacccaccctctatcccccaccgctccaccccaccactgtcttctccatccttccaccccaccctcagcgtctctgcccctaaggcagcccaggaaataggaactgagactctggtacccacaggagcctgggtgggcaaagagcgctcaatccagctccttgaacccctccagcccgcttcagcctgggcatcactgcaggccccgtgctcctcctcctcctcctcagggctgggtctccagagagtggggccttggtcctgagaatcagcccttagaggctccttctgtgtagtctgggtctgtactggggagggtcacagcccacgggctggcagccagcccagcacctacttgtaaaaattttgtaataaaaagtttttcctagaaaa

SEQ ID NO: 73434 - DNA, 2000 bp, Homo sapiens
  misc_feature (1207)..(1207): n is a, c, g, or t
catcgtcctcccgcgcgcccgcccgcccatggccgggaaggtgcggtcactgctgccgccgctgctgctggccgccgcgggcctcgccggcctcctactgctgtgcgtccccacccgcgacgtccgggagccgcccgccctcaagtatggcatcgtcctggacgctggttcttcacacacgtccatgtttatctacaagtggccggcagacaaggagaacgacacaggcattgtgggccagcacagctcctgtgatgttccaggtgggggcatctccagctatgcagacaacccttctggggccagccagagtcttgttggatgcctcgaacaggcgcttcaggatgtgcccaaagagagacacgcgggcacacccctctacctgggagccacagcgggtatgcgcctgctcaacctgaccaatccagaggcctcgaccagtgtgctcatggcagtgactcacacactgacccagtacccctttgacttccggggtgcacgcatcctctcgggccaggaagagggggtgtttggctgggtgactgccaactacctgctggagaacttcatcaagtacggctgggtgggccggtggttccggccacggaaggggacactgggggccatggacctggggggtgcctctacccagatcacttttgagacaaccagtccagctgaggacagagccagcgaggtccagctgcatctctacggccagcactaccgagtctacacccacagcttcctctgctatggccgtgaccaggtcctccagaggctgctggccagcgccctccagacccacggcttccacccctgctggccgaggggcttttccacccaagtgctgctcggggatgtgtaccagtcaccatgcaccatggcccagcggccccagaacttcaacagcagtgccagggtcagcctgtcagggagcagtgacccccacctctgccgagatctggtttctgggctcttcagcttctcctcctgccccttctcccgatgctctttcaatggggtcttccagcccccagtggctgggaactttgtggccttctctgccttcttctacactgtggactttttgcggacttcgatggggctgcccgtggccaccctgcagcagctggaggcagccgcagtgaatgtctgcaaccagacctgggctcagcagctgctgagtcgcggctacggcttcgangagcgcgccttcggcggcgtgatcttccagaagaaggccgcggacactgcagtgggctgggcgctcggctacatgctgaacctgaccaacctgatccccgccgacccgccggggctgcgcaagggcacagacttcagctcctgggtcgtcctcctgctgctcttcgcctccgcgctcctggctgcgcttgtcctgctgctgcgtcaggtgcactccgccaagctgccaagcaccatttaggggccgacgggggcagctgccccatccctcccccaacccctgtatccccaccccgtactcccacccctcccacaacccctgtacctcccacccctgtatccccacccctccacccacccctctcccaacctctctccccgcccctgtatcctgcattcctccacccaccctctatcccccaccgctccaccccaccactgtcttctccatccttccaccccaccctcagcgtctctgcccctaaggcagcccaggaaataggaactgagactctggtacccacaggagcctgggtgggcaaagagcgctcaatccagctccttgaacccctccagcccgcttcagcctgggcatcactgcaggccccgtgctcctcctcctcctcctcagggctgggtctccagagagtggggccttggtcctgagaatcagcccttagaggctccttctgtgtagtctgggtctgtactggggagggtcacagcccacgggctggcagccagcccagcacctacttgtaaaaattttgtaataaaaagtttttcctagaaaa

SEQ ID NO: 73435 - DNA, 1991 bp, Homo sapiens
  misc_feature (1198)..(1198): n is a, c, g, or t
catcgtcctcccgcgcgcccgcccgcccatggccgggaaggtgcggtcactgctgccgccgctgctgctggccgccgcgggcctcgccggcctcctactgctgtgcgtccccacccgcgacgtccgggagccgcccgccctcaagtatggcatcgtcctggacgctggttcttcacacacgtccatgtttatctacaagtggccggcagacaaggagaacgacacaggcattgtgggccagcacagctcctgtgatgttccaggtgggggcatctccagctatgcagacaacccttctggggccagccagagtcttgttggatgcctcgaacaggcgcttcaggatgtgcccaaagagagacacgcgggcacacccctctacctgggagccacagcgggtatgcgcctgctcaacctgaccaatccagaggcctcgaccagtgtgctcatggcagtgactcacacactgacccagtacccctttgacttccggggtgcacgcatcctctcgggccaggaagagggggtgtttggctgggtgactgccaactacctgctggagaacttcatcaagatcacttttgagacaaccagtccagctgaggacagagccagcgaggtccagctgcatctctacggccagcactaccgagtctacacccacagcttcctctgctatggccgtgaccaggtcctccagaggctgctggccagcgccctccagacccacggcttccacccctgctggccgaggggcttttccacccaagtgctgctcggggatgtgtaccagtcaccatgcaccatggcccagcggccccagaacttcaacagcagtgccagggtcagcctgtcagggagcagtgacccccacctctgccgagatctggtttctgggctcttcagcttctcctcctgccccttctcccgatgctctttcaatggggtcttccagcccccagtggctgggaactttgtggccttctctgccttcttctacactgtggactttttgcggacttcgatggggctgcccgtggccaccctgcagcagctggaggcagccgcagtgaatgtctgcaaccagacctgggctcagctgcaagctcgggtgccagggcaacgggcccgcctggccgactactgcgccggggccatgttcgtgcagcagctgctgagtcgcggctacggcttcgangagcgcgccttcggcggcgtgatcttccagaagaaggccgcggacactgcagtgggctgggcgctcggctacatgctgaacctgaccaacctgatccccgccgacccgccggggctgcgcaagggcacagacttcagctcctgggtcgtcctcctgctgctcttcgcctccgcgctcctggctgcgcttgtcctgctgctgcgtcaggtgcactccgccaagctgccaagcaccatttaggggccgacgggggcagctgccccatccctcccccaacccctgtatccccaccccgtactcccacccctcccacaacccctgtacctcccacccctgtatccccacccctccacccacccctctcccaacctctctccccgcccctgtatcctgcattcctccacccaccctctatcccccaccgctccaccccaccactgtcttctccatccttccaccccaccctcagcgtctctgcccctaaggcagcccaggaaataggaactgagactctggtacccacaggagcctgggtgggcaaagagcgctcaatccagctccttgaacccctccagcccgcttcagcctgggcatcactgcaggccccgtgctcctcctcctcctcctcagggctgggtctccagagagtggggccttggtcctgagaatcagcccttagaggctccttctgtgtagtctgggtctgtactggggagggtcacagcccacgggctggcagccagcccagcacctacttgtaaaaattttgtaataaaaagtttttcctagaaaa

SEQ ID NO: 73436 - DNA, 2069 bp, Homo sapiens
  misc_feature (1276)..(1276): n is a, c, g, or t
catcgtcctcccgcgcgcccgcccgcccatggccgggaaggtgcggtcactgctgccgccgctgctgctggccgccgcgggcctcgccggcctcctactgctgtgcgtccccacccgcgacgtccgggagccgcccgccctcaagtatggcatcgtcctggacgctggttcttcacacacgtccatgtttatctacaagtggccggcagacaaggagaacgacacaggcattgtgggccagcacagctcctgtgatgttccaggtgggggcatctccagctatgcagacaacccttctggggccagccagagtcttgttggatgcctcgaacaggcgcttcaggatgtgcccaaagagagacacgcgggcacacccctctacctgggagccacagcgggtatgcgcctgctcaacctgaccaatccagaggcctcgaccagtgtgctcatggcagtgactcacacactgacccagtacccctttgacttccggggtgcacgcatcctctcgggccaggaagagggggtgtttggctgggtgactgccaactacctgctggagaacttcatcaagtacggctgggtgggccggtggttccggccacggaaggggacactgggggccatggacctggggggtgcctctacccagatcacttttgagacaaccagtccagctgaggacagagccagcgaggtccagctgcatctctacggccagcactaccgagtctacacccacagcttcctctgctatggccgtgaccaggtcctccagaggctgctggccagcgccctccagacccacggcttccacccctgctggccgaggggcttttccacccaagtgctgctcggggatgtgtaccagtcaccatgcaccatggcccagcggccccagaacttcaacagcagtgccagggtcagcctgtcagggagcagtgacccccacctctgccgagatctggtttctgggctcttcagcttctcctcctgccccttctcccgatgctctttcaatggggtcttccagcccccagtggctgggaactttgtggccttctctgccttcttctacactgtggactttttgcggacttcgatggggctgcccgtggccaccctgcagcagctggaggcagccgcagtgaatgtctgcaaccagacctgggctcagctgcaagctcgggtgccagggcaacgggcccgcctggccgactactgcgccggggccatgttcgtgcagcagctgctgagtcgcggctacggcttcgangagcgcgccttcggcggcgtgatcttccagaagaaggccgcggacactgcagtgggctgggcgctcggctacatgctgaacctgaccaacctgatccccgccgacccgccggggctgcgcaagggcacagacttcagctcctgggtcgtcctcctgctgctcttcgcctccgcgctcctggctgcgcttgtcctgctgctgcgtcaggtgcactccgccaagctgccaagcaccatttaggggccgacgggggcagctgccccatccctcccccaacccctgtatccccaccccgtactcccacccctcccacaacccctgtacctcccacccctgtatccccacccctccacccacccctctcccaacctctctccccgcccctgtatcctgcattcctccacccaccctctatcccccaccgctccaccccaccactgtcttctccatccttccaccccaccctcagcgtctctgcccctaaggcagcccaggaaataggaactgagactctggtacccacaggagcctgggtgggcaaagagcgctcaatccagctccttgaacccctccagcccgcttcagcctgggcatcactgcaggccccgtgctcctcctcctcctcctcagggctgggtctccagagagtggggccttggtcctgagaatcagcccttagaggctccttctgtgtagtctgggtctgtactggggagggtcacagcccacgggctggcagccagcccagcacctacttgtaaaaattttgtaataaaaagtttttcctagaaaa

SEQ ID NO: 73437 - DNA, 141 bp, Homo sapiens
catgacattaaagtgtggtttattctactgaaaaataccagtaaataccacttagaagaagtgttgcccagacaaagcaaagcaaacattcatttgatctttccatttccccatgtctcattttatagtaacagtatcaaa

SEQ ID NO: 73438 - DNA, 419 bp, Homo sapiens
tgcttaagactgctttgtctattcaggcttttttggttccacatgatttttggaatatctttttctagttctgtgaaaaatgacattggtaacttgattggaaaaacatttaatctgtagattgctctgggcaatatgaccattttaacaatattgattctttcaatccacgagcatgaaatgtgtttctatttgtttgggtttaacaaagaaaagcctgaccaggaacagtggtgtgcacctgtagtcccaactactctggaggctgaagtggaaggatcacttgatcccagaagtttaaggctgcagtgagctatgatcacaccactgcactacagcctgagtaacagggtaagaccctgtgtgggtcttactaaaaaaaattgtaaaaaagaaagtttaacactcagacacctcag

SEQ ID NO: 73439 - DNA, 1776 bp, Homo sapiens
caagaatatcttaacaaaatatcgttgttagtcggatgatcttattctttttcaaagtcccatggccagatatcctataatatactagatgcatgtttgctaatttttacttgaatttattttaaattgtaccaatcaaaaggttctttttctttccagctccaattttttgtaaaacagaagttccagagcacagaaggtcatcatcacaagcaaactttattaaaaaaaaactagaagtgtgctttgattttgctgttatttgttttatcacttctatatttggtgaacagccacagttactgatatttatggaaaagtactttcaagtacaaggtcaatacataagccagagtgaatgatactacaagttgagcatctctaattcaaaaatctgaaatccagaagcttcaaaatctgaatctttttgagcactgacttgaccccacaagtggaaaattccccacccgacacctttgctttctgatggttcagtttaaacagattttgtttcttgcacaaaatttttgtataaattactttcaggctatatgtataaggtggatgtgaaacatgaattatgtaattagagtcgggtcccgttgtgtatatgcagatattccaaacctgaaatccaaaacacttctggtccctagcattttggataagggatactcagcttgtacctatatattcatatatattcactgttgttagaaatgtttaagttgctgttctgtgatgaatctaaatcttttctcttgctaccaagctattgtcactgcagtgcattataccaaagagcgaagtcagtgccactgaaaatacagaacccattaatatcgtggctatctgattacatttatattccaagatgaaccttttttatatatgctaaaaattttggggaatatgttttgggatgtattatggagctaaaactctaacctcttaatagttttatagaacttaaaaattttttatacaattacccaattggtgatatgatcttaagcttttgtgtcagattatttaatatgatgacttcatgctttattatgccttattatggctgacgtattactgtggtgaaacaaaatatctttaaaagttaaaacatccagatatataagctattttttcctaaggataaagtacctttgagcatgagtgtatcacagctttcattaggaaaacttttcattacatacttgtttaaactctgtcttccagggtaaaaataataaggttgaatcattttattaaaaatactttttaagaaaataactatgaacatctgaatattaaagatataaaaatgcacataattcatatttcaggtggtatttgcattcagtgccttactggtattctcagaacattttaatgatttctaacatttcttaacagtcatagatatatacattttcattttttgtacttgaatattctaaataaaactgacatttactcttgacaaataaaacatatatttactaaatgtgtttaattttcctttctgaaaactctcattttaaaaacgttcatttaattatgtatttgaattattttggagatgaggtattttatgagtattttcagacaatgaaacttattagtctgtgtcagattctgagcaatcatagagtcatctaagttgtaaataaaaccttgcatagcacaatttatctgtatactttaaattttatttttgcatttgaaattcacagatgtctctcagtcttttaaaacttaagtaaattaaattatacatgt

SEQ ID NO: 73440 - DNA, 1657 bp, Homo sapiens
caagaatatcttaacaaaatatcgttgttagtcggatgatcttattctttttcaaagtcccatggccagatatcctataatatactagatgcatgtttgctaatttttacttgaatttattttaaattgtaccaatcaaaaggttctttttctttccagctccaattttttgtaaaacagaagttccagagcacagaaggtcatcatcacaagcaaactttattaaaaaaaaactagaagtgtgctttgattttgctgttatttgttttatcacttctatatttggtgaacagccacagttactgatatttatggaaaagtactttcaagtacaaggtcaatacataagccagagtgaatgatactacaagttgagcatctctaattcaaaaatctgaaatccagaagcttcaaaatctgaatctttttgagcactgacttgaccccacaagtggaaaattccccacccgacacctttgctttctgatggttcagtttaaacagattttgtttcttgcacaaaatttttgtataaattactttcaggctatatgtataaggtggatgtgaaacatgaattatgtaattagagtcgggtcccgttgtgtatatgcagatattccaaacctgaaatccaaaacacttctggtccctagcattttggataagggatactcagcttgtacctatatattcatatatattcactgttgttagaaatgtttaagttgctgttctgtgatgaatctaaatcttttctcttgctaccaagctattgtcactgcagtgcattataccaaagagcgaagtcagtgccactgaaaatacagaacccattaatatcgtggctatctgattacatttatattccaagatgaaccttttttatatatgctaaaaattttggggaatatgttttgggatgtattatggagctaaaactctaacctcttaatagttttatagaacttaaaaattttttatacaattacccaattggtgatatgatcttaagcttttgtgtcagattatttaatatgatgacttcatgctttattatgccttattatggctgacgtattactgtggtgaaacaaaatatctttaaaagttaaaacatccagatatataagctattttttcctaaggataaagtacctttgagcatgagtgtatcacagctttcattaggaaaacttttcattacatacttgtttaaactctgtcttccagggtaaaaataataaggttgaatcattttattaaaaatactttttaagaaaataactatgaacatctgaatattaaagatataaaaatgcacataattcatatttcaggtggtatttgcattcagtgccttactggtattctcagaacattttaatgatttctaacatttcttaacagtcatagatatatacattttcattttttgtacttgaatattctaaataaaactgacatttactcttgacaaataaaactttgctcacagagaaaagccaaagtcaaaacaaaaaaggggggggcaaaatcccgaggggcaacacagcccggtttgaagggcccaaggggggtaaaagacgccggcccaaggcggaaaggcgggtctgggggcaccctgggggtggacccaacaacaacggcaatgttg

SEQ ID NO: 73441 - DNA, 500 bp, Homo sapiens
gaggacctgcgatagcagacccataccaggcactatgagctttacaggcgctgcaaactggaggaaatgggctttacagatgtgggcccagaaaacaagccggtcagtcttcaagagacctatgaagccaaaagacatgagttccatggtgaacgtcagaggaaggaagaagaaatgaaacagatgtttgtgcagccagtgaaggagaaagaagccatattgaaagaagctgagagaaagctacaggccaaatttgaggaccttaagagacttcaccaagaagagagaatgaagcttgaagaacaaagaagacttttggaagaagaaataattgctttctctaaaaagaaagctacctccgagatatttcacagccagtcctttctggcaacaggcagcaacctgagtaaggacaaggaccataagaactccaattttttgtaaaacagaagttccagagcacagaaggtcatcatcacaagcaaactttattaaaaaaa

SEQ ID NO: 73442 - DNA, 186 bp, Homo sapiens
ctatctatcatctgtctatctagagatgatagatagattgatagatatcatctggagatgatagattgattgatagattagatttgataaaaatctatctattggccgggcgcggtggctcacgtctgtaatgccagcacttcaggagaccaaggcgggtggatcacgaggtcaggagatggagac

SEQ ID NO: 73443 - DNA, 382 bp, Homo sapiens
ttcactttatattttaaatattatgaaatatcatctgtcattatattcaaattaaaattgttttcatataaggctttggaaaaatggtcttttataggaagaaaactgggataattgatttctatggctttcaaagctaaaacataatatattaaacaaactctagtattgcttcttgtgttttactttcagattaaattactgcttttatggataactgaattttaatatattaaaaagagattaagaaaagaaaaaataatttctgtatttacctacaaatttgccatttccaatgtctttcatttatttctgtagatctgtataatgtagtataatttatcttcagtgtgaataattttctttaccacttcttgaggtg

SEQ ID NO: 73444 - DNA, 262 bp, Homo sapiens
ttgcccaggctggagtgcagtgacatgattacagctcactgcagctttgaactcctcccacctcagtctacagatacatgctaccacgccaggctaattaaaagaaaaaaattgtagagatgggatctcactttgtcacccaggctggtctcaaactcctggcctcatgcaatcctcccgccttggcctcccaaagtgctgggattataagcatgacccaccatgccaccagcctgaacttttgaagcaagtgaatgtttag

SEQ ID NO: 73445 - DNA, 337 bp, Homo sapiens
cctttattgttgttctgactttctataaaaccaataacacaaacacaaaaataatagcaaattgtatattttaaaaagttgcttaaaaaacagcactacatcaatttgttaacaataacccgtggctaatttatttgtaaagtttaaaatcacatcaataagaatatctccaaatatatataatgtagtttcagaattctatccactgaatttccttagagtgggacaattgttattttcccatgcgttcatgtgacaatgttttctgcaaatgtggagaaatattggggggatttgtaacctttttcattgctaataaaaatagtaaagtctgaaa

SEQ ID NO: 73446 - DNA, 419 bp, Homo sapiens
tctttcaagataggatgaggagatcagtttgccttttaaaatagaccccagataacatgctccatgttgagcatgacctggcttcccagtggagagatggagaaaataatcctggtgcaagttgctggagagggagagttgattagcatttgtttccttgagtaacaacataaaccacaagtgatcgagtgcatccctgcttggcaggaggagaatgactgttcataaatgatgcccttctccatttccagagctcttgtcagcttggcttcccaaagtggtatcactcatctgtcaagttgattgggtctgacccagacaaagcaaaccagaggcaatctcaattacgacacatttgtaaatgtcctgtccaactcattccaaagtccaaataggtgaatcagaattcgcaaaaaaaa

SEQ ID NO: 73447 - DNA, 479 bp, Homo sapiens
ctctgggagcctggaatgtgcaggaaccagctggccttggagtgctgcagactccaaggtgcgtcacctgcagttctgatccctgttctggatgcaacccaggaccctgcccttgccaagcatcccaggaacactggcactgatggctgaggctacatccaagacagacggtgaggaaggccccaaggaaagggccgtgtgggacacattgtccttcccaagatgatgagtctgagcctggcaggggaggcactgggagggcctgttgtgggcagttcattcaatggacacagggtggcaccgctctgtgtcctctaatgaccattagacacctctaaccatcacatgatgtgcagctcagcttttccaagggcctggaagtgaatatttcaggagataacgtgaataacccactgtattcatctgttctcaggctgctaataaagacatacccgagactgggtaatttataacagaaa

SEQ ID NO: 73448 - DNA, 751 bp, Homo sapiens
tagttgcagaacggtgtttcagcgaagttgattggagagttacctgattatagtgagattcttatccaatccctacagaattgtgagactaaatgttggtgcagcatgtttggtcctcaaaaggcaatgtccaagaggaacttcttatccccgaaaaatcaggctgtgtgactcagcaaaggaattgtttatgactggttactcatatgccagtgcttccagaatatctgctcgtatttaaaggagtgatcttgaagccccagaggccataatgtttagattaccaacctcttcaccaatcagtaagtccattacatctcactacgtgttagacatgggacaggagaagaggatttttattacctcactgttattactggaggccgcccaaatttgttttttgttttttttttttaaataaagaagcttgttttcatggaatggacttactagaacttttattattcagactacctagataaaattaagtaaattcgtttctttctcccaaattaaatattttgactacatgcaagatttaatcattcaaaattgccatgtatttgattatagaccagtagtataatccccctgccccaggccagattccaaaacaataaaccaaaacacacacacacctggcaacagaaattatatgtattccgagactcattcattcattttggaaagggccagtgtttccagtggtttctccttgggattgtaactttacaactttaaaactaggtaa

SEQ ID NO: 73449 - DNA, 1047 bp, Homo sapiens
  misc_feature (105)..(105): n is a, c, g, or t
  misc_feature (146)..(146): n is a, c, g, or t
gtcggcgaacgctttgggaaaccaaagcccatcacccaaaatgtctgtcccagatttctcaatgcaagcccctggcatggccccatccccttcattcattatganccctttttggaaagaaacccttttgaagaggtttcccatgnatgagtgcacccaattcaagttgggttagttggcttctgtttggtgtttgctacaccctgtgttgtgccctgtttcctcagaaaagttccatgtctgtgacaagcttggaggccgagttgcaagctaagatccaagagagccatcctgaattgcgacgcgtgtacttcaataagggattgtaaagcagagaggaaacctctgcagctcattctgccactgcaaagctggtgtagccatgctggtgagaaaaatcctgttcaacctgggttctcccagttacggaaaccttttaaagatccacattagccttttagaataaagctgctactttaacagagcacctggcgtgggccaagtgcctgatactcccttacactgaatcatgttatgatttatagaaatacctttcctgtagcttttatagtcattgtttttcaaagacgatataccagccctcacccaggttttaaaaaagcactggtaggcatagaataggtgctcagtatacggtcagtaaatgttctattgattatcaatcagtgaaaaaagaaatctgtttaaaatactgaattttcatctcactcccattgcaaatcaaggagatctcagcagtgaactgggaaaatacaaaagctctgggctaatctataaaaacttacctgaaatattaagggcagtttgcttctagtttggggattgcgctagcccaatgaaggtgatgaagcttttggatttggagggtaaaagctccttcacaccccttccaaaagtcagtcacagaccactgcaacatgccttccctgctggatcattatatacattcagattgtgagtggattgccttggttgacttttaatttattgttttttgttcttataaagatgataatcttaccttgc

SEQ ID NO: 73450 - DNA, 1060 bp, Homo sapiens
cagttccagtaagctcaaattttgtgagtcagaatattacccctgttaatgaatcagtggtttcttcagcaagagcagtaaatgtgctttcagttaccggagcaaatttatctttgggttcctttccagtgacctcagcctctgcttcagctggggcacaacctcctgttttagtcagtggaaatgatacctcttcaagaattatgcctattttgtcaaatagactttgctcatcaagtctcggaaacactgtggctatatcaactgtgaaaacaggacaccttgcatcatctgttctgatttcaactacacaaccagtagtgtctcctaaatgtttaacatcagctttgcaaattcctgttacggttgccttacctacacctgcgactacatcccctaaaataataaacacagttccacattcggcagcagtaccaggagccacacgttctgtatctatttctaaaagacaatctcggacttcactccagttccattcaccagggatttcaactacagtgccaacaaatgtaaacacaaataaacctcaaactgaattgtcgtccctttcaacaagtccaggtaaaataactaatacgtccaattttgcttctctgccaaatcagcaagctttagtaaaaacccccagttacagttctgctccaggtggcactaccattcacacggcttcggcaccatccaatgtaactagtctagtcgggagtcagttcagtgaaccttgtattcagcaaaaaatagtcatcaataccagtacacctttggcacctggtactcagattatgattaacggaacccggtttattgttccaccacaaggtcttggagctggcagccatgttctccttatatctactaatccaaaatatggagcccccttagttcttaacagtggccaaggcattcaatctacaccaatagataactctgcccagaagatcacactagcatcaaataattccttaagtgggccaacctctacaacatcctcttaagaagccctacaaaatttattaaactcttttgggaatgcaagttctat

SEQ ID NO: 73451 - DNA, 960 bp, Homo sapiens
cagttccagtaagctcaaattttgtgagtcagaatattacccctgttaatgaatcagtggtttcttcagcaagagcagtaaatgtgctttcagttaccggagcaaatttatctttgggttcctttccagtgacctcagcctctgcttcagctggggcacaacctcctgttttagtcagtggaaatgatacctcttcaagaattatgcctattttgtcaaatagactttgctcatcaagtctcggaaacactgtggctatatcaactgtgaaaacaggacaccttgcatcatctgttctgatttcaactacacaaccagtagtgtctcctaaatgtttaacatcagctttgcaaattcctgttacggttgccttacctacacctgcgactacatcccctaaaataataaacacagttccacattcggcagcagtaccaggagccacacgttctgtatctatttctaaaagacaatctcggacttcactccagttccattcaccagggatttcaactacagtgccaacaaatgtaaacacaaataaacctcaaactgaattgtcgtccctttcaacaagtccagtgagctttctcttaagtgtgccaagctgccatccaactttcttgagcattttttctcatgggaaatgatcaagttttgatagcagaaagtgcttctttccaagactttctcgaggccatcttcctgtaggcgtcatgcttctgatgttacacagctgatattttcatatgagctgcatttttagactacaaagatgcttactcagactcagcccaagtctccatgtccatcacctgggacactgtctgaggaactctgtgaggagagccttttccacagagaaatgagagcaccctcagtatcgctctgaagacttgatgaaggtttgctgacaagaaagggcttactcactgtacacagcccttcaataactcctac

SEQ ID NO: 73452 - DNA, 1121 bp, Homo sapiens
gtatttcctccaatattggagtcttgttcagattcatcaactcctcctccttcccactagatgtcagcacactagagggctatgctcggtgggtgtgtcagcccccagacttgacttgcctttgatggtttgtatttgtatttatgctctggaaagacattggggaacaggagacatgagacatgagactgcccaagtttcttggcaaagagggaaagaatccagagttgtatctctcaccttctccttatcagcttgccaagcttcaatccccaccccacaccaaccctcctctctttcacaggaccttttcctctaaatgaagtgcttgctgaatgaggaatgggactttccaacatcttttggaaagatactttttttccattatgcatcaacctgaaaagctttcagatctgtaataacaagaaagagagacagcgagatctatggagaatgccttcgggtgctgaagtgctgaagtgctacctggctttaagcaagattgctgaaacctgtaatttttatagcttataaactcagttgatgtttcccattcatggaggatactggtaccagaagattggattgtgtaattgtgttagcttcctgcatatttgggtaaagaagaaaaaaatactattaaaacctttggccatctaagaaggatgcagcctgttaaaaaacacacaagtgaccctttgtgctgatgcaggaaggatggtttcctcatcgcactgatgatatcctgggatgcttagtgtagagtcagaagaacttggaattcacaggtaaccagtgaggaaaggggtgaagaagaaaagtaggaagagcaggtcacaaagtggagtaacagaaccagcaagaattcccagaagtggtaaaacctgaggtgtctaatatactcctgtttgctataagggaacctcaaaccccttcccctgtgccctataaaccgtcagtgcttagctacacacaacatccaggtacccaagtctgctatgagtagaaccaaagagacaggtgctatagtttgaatgtgtcccccaaaattcgtgtattggaaacttaatccccaatgcaacaatggtaagaggtaggacttttaagaggtgattaagtta

SEQ ID NO: 73453 - DNA, 412 bp, Homo sapiens
cctcacctggagtggtatgatggcagtcaggagcaaggcagtttagggaaagctcctcagaagaacttggaattcacaggtaaccagtgaggaaaggggtgaagaagaaaagtaggaagagcaggtcacaaagtggagtaacagaaccagcaagaattcccagaagtggtaaaacctgaggtgtctaatatactcctgtttgctataagggaacctcaaaccccttcccctgtgccctataaaccgtcagtgcttagctacacacaacatccaggtacccaagtctgctatgagtagaaccaaagagacaggtgctatagtttgaatgtgtcccccaaaattcgtgtattggaaacttaatccccaatgcaacaatggtaagaggtaggacttttaagaggtgattaagtta

SEQ ID NO: 73454 - DNA, 1522 bp, Homo sapiens
ccagactcagagcgtggagaccaccagagtatctcaaatcaacaccctcaacaccctcacaccggttacaacatcaactgttttatcctcaccaagtggattcaacccaagtggaacagtttctcaggagacattcccttctggtgaaacaaccatctcatccccttccagtgtcagcaatacattcctggtaacatcaaaggtgttcagaatgccaatctccagagactctactcttggaaacacagaggagacatcactatctgtaagtggttccttgtcacaaggaaccacttgggaaaacctgaaatttaaactgctttagtcaactttgtctattgtgatcattttcttttcttatttcagtgagctttctcttaagtgtgccaagctgccatccaactttcttgagcattttttctcatgggaaatgatcaagttttgatagcagaaagtgcttctttccaagactttctcgaggccatcttcctgtaggcgtcatgcttctgatgttacacagctgatattttcatatgagctgcatttttagactacaaagatgcttactcaggtgggagaccatttctttgaactgtaagtgatttatttgattttctttttaatagtccttgtttttctccttcaagcctttttaaggaaacatttaacagcatcaatgtattttttcaaattgctttttgatttacctagaagttctcaattttctgatttgtgtttgtctgatttcaagttgccatcatccatgtaatttttgctaaagaagacaggcaagtgtatcaccttccatatgatttaagagattttaaagggctctcttttacaacctctttatgttttcaagttgtcaagcatttttttcctccgtttctcacactttttattccatttcacagcttcttgggatagcgcttttagattttcctaaaaatgagtgttttcatccaaacaacccattatttccttctgaaagttcttttgagacactttaaagatgtttttggcgccggttacttgagattgacagattttgatgcatcatcatgtaactgttgaactgtgaaatgaaagtttagagactcccttctgttctttttttgagaaggtctgcaatattctcaagtgacaagtgaacctgtccagatatttactaaatgctaaatttaacatttgtgacttcagaggactggtctccaccagagataacttgaaggcttcattgatttgtataatcagtctaaattttcactgactttaacctgggcagaaaatcttttggctagctcttgttccctccttaaagtatgcctgctctttactataaaaacaatcagagagaccatatcagaatcttgcagggaaatgcatagagacttgagccttgtcttaagcatcagtcaccaccactgagggctggacaggaaggggaaccccaggttctataaaacaatactctctaactttgctcaccatgcaaataaaagtactattatttgtacagtga

SEQ ID NO: 73455 - DNA, 1697 bp, Homo sapiens
cagttccagtaagctcaaattttgtgagtcagaatattacccctgttaatgaatcagtggtttcttcagcaagagcagtaaatgtgctttcagttaccggagcaaatttatctttgggttcctttccagtgacctcagcctctgcttcagctggggcacaacctcctgttttagtcagtggaaatgatacctcttcaagaattatgcctattttgtcaaatagactttgctcatcaagtctcggaaacactgtggctatatcaactgtgaaaacaggacaccttgcatcatctgttctgatttcaactacacaaccagtagtgtctcctaaatgtttaacatcagctttgcaaattcctgttacggttgccttacctacacctgcgactacatcccctaaaataataaacacagttccacattcggcagcagtaccaggagccacacgttctgtatctatttctaaaagacaatctcggacttcactccagttccattcaccagggatttcaactacagtgccaacaaatgtaaacacaaataaacctcaaactgaattgtcgtccctttcaacaagtccagtgagctttctcttaagtgtgccaagctgccatccaactttcttgagcattttttctcatgggaaatgatcaagttttgatagcagaaagtgcttctttccaagactttctcgaggccatcttcctgtaggcgtcatgcttctgatgttacacagctgatattttcatatgagctgcatttttagactacaaagatgcttactcagactcagcccaagtctccatgtccatcacctgggacactgtctgaggaactctgtgaggagagccttttccacagagaaatgagagcaccctcagaccttttcctctaaatgaagtgcttgctgaatgaggaatgggactttccaacatcttttggaaagatactttttttccattatgcatcaacctgaaaagctttcagatctgtaataacaagaaagagagacagcgagatctatggagaatgccttcgggtgctgaagtgctgaagtgctacctggctttaagcaagattgctgaaacctgtaatttttatagcttataaactcagttgatgtttcccattcatggaggatactggtaccagaagattggattgtgtaattgtgttagcttcctgcatatttgggtaaagaagaaaaaaatactattaaaacctttggccatctaagaaggatgcagcctgttaaaaaacacacaagtgaccctttgtgctgatgcaggaaggatggtttcctcatcgcactgatgatatcctgggatgcttagtgtagagtcagaagaacttggaattcacaggtaaccagtgaggaaaggggtgaagaagaaaagtaggaagagcaggtcacaaagtggagtaacagaaccagcaagaattcccagaagtggtaaaacctgaggtgtctaatatactcctgtttgctataagggaacctcaaaccccttcccctgtgccctataaaccgtcagtgcttagctacacacaacatccaggtacccaagtctgctatgagtagaaccaaagagacaggtgctatagtttgaatgtgtcccccaaaattcgtgtattggaaacttaatccccaatgcaacaatggtaagaggtaggacttttaagaggtgattaagtta

SEQ ID NO: 73456 - DNA, 608 bp, Homo sapiens
ttagaatttatacttaactgtgaagttcaaactggaaatcaacctcatgggtttaaagggagtataaattcatttatgctgataaaacattataaacgatgtctatcattgttactttattgtcatgtacatgtattttcctttgagaacacagcaaatgagcatagcttacaaacccaaaactctaccttaaaaatgggatataattagaggataataatgtcagacctcctgtccagaatgctcttaaaggaattccccttagagtcaagcccagctagtttaatgtagtcagaaatgcttatttccaaattctcaatttaaaataaagcagaatttaaaagtgggattgttacatcatgatagtgctttagggtaattgagtatttcatattaattggtattggtaagaatagcatttctgctgggtattaacatatccatatattattctctcatctgtgatcatatacatgttattaatttaagcccccatatttttgtctcctttctcatctctttcattagtgagttactgttttctggtatttttaaaagcagttatcaaattataaaaattttcagcaacttttctattttgagctaag

SEQ ID NO: 73457 - DNA, 173 bp, Homo sapiens
gagctgacggagtcggtgatggacgttgtcagaaaggaggctgagagctgtgactgcctgcagggtttccagctgacccactccctgggtggggggactgggtctgggatgggtacccttctcatcagcaagatccgggaggagtacccagacaggatcataaacacattcag

SEQ ID NO: 73458 - DNA, 784 bp, Homo sapiens
ctgatctctcggctcctctcggcctgtgtgacagacttggagatgtgccacccagatgccccttccaggaaggacttgctcccagctttggggagtggtcagaacatggcttccacctgttagctcttcaggatcttcccagtgatgagccccaaccggcctgggccaagtttttcatgcccagctaacacccggagactgggagagggtcttgggagacccgaggtgggatgctggatgggtactgtgcacttgggagcttccagacaggcctgtaccacagttgaacgtctccctccacccgcttctccctcctgtccaggtgctggaccctcataaacatcttgtatcctgactttgtctcaactcctgcttctgaaaaacccaacccatgacaggcgggtctctctccagctcccaacccacgacaggcgggtctctctccagctgccattagctactccggcagccccttgcctttcaggactggggtggtaactcccagctgtcaccagccccaagatactgtggagggtcatctcagcgattcccagcacaggctgctggctgacagtggcacagttcaggtcgtccattagctttctctgcacaccacgatcctgagacaagcttggctcgggggtcccacagaactggacagcctgttggaaacgggctcccggggatcgtacactcactccctaatgttggtctgtggggtcggagggggcagcaaaatggtggatgggaggagacctcaaatgaatgcgtgcttcacagaaga

SEQ ID NO: 73459 - DNA, 449 bp, Homo sapiens
ggagctattgtggctccggccggttgcgcgggccctcggaccctcagagaggcgagggttcgagggcacgagttcgaggccaacctggtccacatgggtcgaaaaaaaaaaacacaacaacaacacaaaacaacactggttgggggcggccgaggaccacgggggaggaaggtttcgtagcacccaatctccgttggggccaggggcccaggagggtaacggtgcacagtgggccacgcaggtgtgccaagcgggggacaccggggacagacgaacaggggcgtggactctcacgcaaaaaaaaggcgcccgggggaaaccaggactgttccagggaaacaccccacgagggggcgctaagagggggacagaaagggggatctacaacccacaagggggcccagacgcgagcgcgataatcaaaataaagccccgacggcgtggagtgg

SEQ ID NO: 73460 - DNA, 351 bp, Homo sapiens
  misc_feature (218)..(218): n is a, c, g, or t
  misc_feature (225)..(225): n is a, c, g, or t
  misc_feature (227)..(227): n is a, c, g, or t
  misc_feature (258)..(258): n is a, c, g, or t
ggagctattgtggctccggccggttgcgcgggccctcggaccctcagagaggcgagggttcgagggcacgagttcgaggccaacctggtccacatgggtcgaaaaaaaaaaaaaaaaaacctcgtgccgaattcggcagagcaaaggggctacggtctacaaggcagtattacaaacaattactctgggacccaacaagtccagaccacacataaagntcaggantnttaagctttcaagttagaaatgaaatatgangtagcacataaataattcctagttcaaatttcacttttgtttacatttgaaaaacaaaaaagctactaactccctttttgaaagtttcgcatg

SEQ ID NO: 73461 - DNA, 487 bp, Homo sapiens
  misc_feature (319)..(319): n is a, c, g, or t
ggagctattgtggctccggccggttgcgcgggccctcggaccctcagagaggcgagggttcgagggcacgagttcgaggccaacctggtccacatgggtcgaaaaaaaaaaaaaaaaaaaaaaaaaaaaaaaaaaacaatttgtgtggggcgcggcttggggccttggaaaaaagttttttaagaaccatatcgcgtgtgtggggcggcgggggccccagtgtgggtgtaagtgtggacattggggccataacgcgggggtccaagagggagaacccggggcaaggagccaaggggcggggggttctctctcacccaanttaaaaaagcgcgccgggggggagaaacccggaggcggttcctgtggaaaaaatttcccaggtgtgggggttcacgagggggggaaattaaggggggatttatttacaacaggggggttcaaaggggagggtctgagatttaaaatttagggcccgggtcggggggga

SEQ ID NO: 73462 - DNA, 1186 bp, Homo sapiens
ctctactgttagtattgcaaagtatgtatgggaaacacagagaattggagctgcgttgaatgcaaacttgaggtgtttcccttgaggaattcttgtcttcaaacgtctgcagagtaatggaccatgttacaactttcctgttcatctgtgaaccatgaaaatggatggcactgatgcattagaccctcagcagcctgcaattgcaaatctgcgaggtttcattcggcccataaagcaaacatttgaacttacacagaatgagcacttaaatacgggtgcaataaatgaagggaaaaacctcagccgtttctccattctgaagatatagcaagcaccgggaaatctaagatttttcatcaacaatatcttctgccagcccagtttggggggaaaaaccccttttacatttttcttcagtaaagtactggaacttacttttccctgtctgtgctaatgagctgattttcagctgatagaaaacaaaatgatagagtacttttttccttggccaagtattttctcatttgtatttaatttcataaattagacagccagtgaaattagacctcaaactaggtcctgatggataatgaatgttatgtcacctttaacagtgaagtggttattataggtcactttctaatttcatattttcccttttgctttctgctgccctcagggtatatagtgtatctctaacctgatttttcaaggttatttttggagcagtttcttaaaacaggcattccctaacttgctcatttaattaatgaaaaattgaactgatgccatggatataaaaacaaatgcaatgtttgattgtcagtgtttctgatttggcaaaaaggaatcatctctatttttttgcaaacaatatcaaagtgcatattttctctcatgtggtttctatttattcaatcattcatttgtttgctaaggacgccatagtcaaccctttacttggtgtttgttttctatttctgtattcattttccaaggcattttcttttctttattactgttttcaccattggtggggtagggggaagcattttatatctccaacagtttgctgggaaaaaccacactttttccctttctattcactggaaagggaaatgtaactacttctgaagcattctaagtacaactggaaatgctttcttcacctcagttctttcactct

SEQ ID NO: 73463 - DNA, 471 bp, Homo sapiens
tattgttattcaaaagggattagcttggaagaaaaaaaaatgtttctttaaagattggtgattcagaatcaccatccggaggtctagaataattttggcctggaatctctgcaggacttgatctaatctggtgggggtgtcctgaattaataaggtagcattttaatgcatcagtctgcgtattaccacgtctcattcatataaacaagacagtggtcatgaggagaagggaaacaaaccatgtaattggggcagaaaggactacatttttacagctgtgacttaagtggggagaagcatttgttgtgcatctaaccctctgctaggagcttcacagagattacttacattgaatcctttcagttgcccatgtcgtccctatgttagagaatagtgtttactcagcctcacagagccaagcaacttgcctgaaatctcacagctggtaagaaacaactgagacttaactca

SEQ ID NO: 73464 - DNA, 576 bp, Homo sapiens
ggggtagggggaagcattttatatctccaacagtttgctgggaaaaaccacactttttccctttctattcactggaaagggaaatgtaactacttctgaagcattctaagtacaactggaaatgctttcttcacctcagttctttcactctcgccttgcttgcaaatagacttttttattgttattcaaaagggattagcttggaagaaaaaaaaatgtttctttaaagattggtgattcagaatcaccatccggaggtctagaataattttggcctggaatctctgcaggacttgatctaatctggtgtggacagttcccctgccccaacccccacttcccccataagcactgataccagcttctttagtaaaaaggagatgctgagggaactaaggatttttatgtctgctggttcaacattgcccagaacaggtaaacagaactaaatgggtttctcatattaaagaattcctaggagacttgacggcgggagatgacaatgaaggctttctttatgtcttcaaatttatttatcttttcttctttaagaaaccttatatgctgggaatcttg

SEQ ID NO: 73465 - DNA, 293 bp, Homo sapiens
gagatgctatgaaggggagctgtgaaagtcaaagatagaactggtggtggcactacatatgccactgaaagtgggcttgatgggaggatttttcatacttttattaggctattagtggccactcttgaaattacaacatatatcattgatttattaaacattaatgttaactcttaattttccgtcctcccagacaatgcaaggaccttagaacactttaactctattacctccctcctgaacccccatttctgatttgtcaggaatttttttttaacaaaacttaaaaatgg

SEQ ID NO: 73466 - DNA, 577 bp, Homo sapiens
cagtatttccccgggaagtcagccaccatacagctaccagcatgttgtgagagggcccaagctatccacgtggatggagagagaggtgctcagccagccttcaaccatccaggtcagcccagcccaggtaccaaacatgaatgagcaaaccatcttgaacatctgtcccggctgagtcttcagatgactccaaccctagccaccatcccactgaaactgcatgagaatttgaaagcaagaagtgcccagctgagtcctgtcagctcactgaaccatggaagataaaaataaattgttgttttgagccagtaagtttgagggtagtttgtttatagcaatagataactgaaacagtgccctgagtattttaacaggacagtatagttagctctgagcttcttactattcaaagcaaaaaggggagtagaatggattataggcatttattatcttgagattctgtgatttaccttaatgcagggttcatccaactgtctctttgcagtcacatcagaatgaaaattaaaccatcttccttacgtgagaatttctcctatcttcaccaaaactatttgtg

SEQ ID NO: 73467 - DNA, 691 bp, Homo sapiens
agttgttaggagagaccattggggataggaaagatgaaaggtcatggtgagcttcaaggacatgaaagaagaatgtcttccaagcaagccacctctccatttgcctgtgcagctgatggagaggatgcaatgacccaggatttaacctcaagggaaaaggaagagggcagtgatcaacatgtggcctcccatctgcctctgcaccccataatgcacaacaaacctcactctgaggagctaccaacacttgtcagtaccattcaacaagatgctgactgggacagcgttctgtcatctcagcaaagaatggaatcagagaataataagttatgttccctatattccttccgaaatacctctacctcaccacataagcctgacgaagggagtcgggaccgtgagataatgaccagtgttacttttggaaccccagagcgccgcaaagggagtcttgccgatgtggtggacacactgaaacagaagaagcttgaggaaatgactcggactgaacaagaggattcctcctgcatgcgaacaactactttcaacaagcatcggaaggcaccacactggacaagactaacgtacccaggtgcaacttctcgacagacaacttcagaggtacaccctgagtagccctggcccgaccaccagacaccggcatgctcctccaaccaatgacattagcgca

SEQ ID NO: 73468 - DNA, 4493 bp, Homo sapiens
atacgtagacaatatccaacctggacaaaacgggcttcccttgcgagcgacctaaaccgatcccccaaagaatagagactaaatgcaaagtgagaagaaacagttgaaggactaggaagaggatcctctagggatgagctggtcactttcatgaattcaaaggcaatttaccagtgatttctgggtgctggggctgatattttttgtgcatatttctcacacagttgatataaacttaagtgaatgaattcattaataaaagcagattttctatttttatttcacctctgggctattttatacctttggagcacacaagcacaacaaaagaagaatgtcttccaagcaagccacctctccatttgcctgtgcagctgatggagaggatgcaatgacccaggatttaacctcaagggaaaaggaagagggcagtgatcaacatgtggcctcccatctgcctctgcaccccataatgcacaacaaacctcactctgaggagctaccaacacttgtcagtaccattcaacaagatgctgactgggacagcgttctgtcatctcagcaaagaatggaatcagagaataataagttatgttccctatattccttccgaaatacctctacctcaccacataagcctgacgaagggagtcgggaccgtgagataatgaccagtgttacttttggaaccccagagcgccgcaaagggagtcttgccgatgtggtggacacactgaaacagaagaagcttgaggaaatgactcggactgaacaagaggattcctcctgcatggaaaaactactttcaaaagattggaaggaaaaaatggaaagactaaataccagtgaacttcttggagaaattaaaggtacacctgagagcctggcagaaaaagaacggcagctctccaccatgattacccagctgatcagtttacgggagcagctactggcagcgcatgatgaacagaaaaaactggcagcgtcacaaattgagaaacaacggcagcaaatggaccttgctcgccaacagcaagaacagattgcgagacaacagcagcaacttctgcaacagcagcacaaaattaatctcctgcagcaacagatccaggttcagggtcacatgcctccgctcatgatcccaatttttccacatgaccagcggactctggcagcagctgctgctgcccaacagggattcctcttcccccctggaataacatacaaaccaggtgataactaccccgtacagttcattccatcaacaatggcagctgctgctgcttctggactcagccctttacagctccagaagggtcatgcctcccacccacaaattaaccaaaggctaaagggcctaagtgaccgttttggcaggaatttggacacctttgaacatggtggtggccactcttacaaccacaaacagattgagcagctctatgccgctcagctggccagcatgcaggtgtcacctggagcaaagatgccatcaactccacagccaccaaacacagcagggacggtctcacctactgggataaaaaatgaaaagagagggaccagccctgtaactcaagttaaggatgaagcagcagcacagcctctgaatctctcatcccgacccaagacagcagagcctgtaaagtccccaacgtctcccacccagaacctcttcccagccagcaaaaccagccctgtcaatctgccaaacaaaagcagcatccctagccccattggaggaagcctgggaagaggatcctctttaggtaaatggaaaagtcaacaccaggaagagacttacgaattagatatcctatctagtctcaactcccctgccctttttggggatcaggatacagtgatgaaagccattcaggaggcgcggaagatgcgagagcagatccagcgggagcaacagcagcaacagccacatggtgttgacgggaaactgtcctccataaataatatggggctgaacagctgcaggaatgaaaaggaaagaacgcgctttgagaatttggggccccagttaacgggaaagtcaaatgaagatggaaaactgggcccaggtgtcatcgaccttactcggccagaagatgcagagggaggtgccactgtggctgaagcacgagtctacagggacgcccgcggccgtgccagcagcgagccacacattaagcgaccaatgaatgcattcatggtttgggcaaaggatgagaggagaaaaatccttcaggccttccccgacatgcataactccaacattagcaaaatcttaggatctcgctggaaatcaatgtccaaccaggagaagcaaccttattatgaagagcaggcccggctaagcaagatccacttagagaagtacccaaactataaatacaaaccccgaccgaaacgcacctgcattgttgatggcaaaaagcttcggattggggagtataagcaactgatgaggtctcggagacaggagatgaggcagttctttactgtggggcaacagcctcagattccaatcaccacaggaacaggtgttgtgtatcctggtgctatcactatggcaactaccacaccatcgcctcagatgacatctgactgctctagcacctcggccagcccggagcccagcctcccggtcatccagagcacttatggtatgaagacagatggcggaagcctagctggaaatgaaatgatcaatggagaggatgaaatggaaatgtatgatgactatgaagatgaccccaaatcagactatagcagtgaaaatgaagccccggaggctgtcagtgccaactgaggagtttttgtttgctgaattaaagtactctgacatttcacccccctccccaacaaagagttattaaagagcccgcatgcatttgtggctccacaattacatcagcagaatggtcttaattgtttcgtaaagtgtgagacagattaagttttccctgatttttcatgaacttgagttttttgttgttattgttattgttgttgttgttgtttttttaatttaggtgaagacatattaaatatgagacaccaggacttgaaacttatctcaacccgtagatgtcttacaagtcttatatttttgtcttactttttttttcttttggatgttgataaaggtttaagttactgttttagatggggttaaacattctcactcaggtatgctgtgccggcctacaggttgtgaatgtgtttttattctgaattattttagaaaacaactgaggatttcatattgtgaaacagaacaagtccacggcgtgtgcagctgcatgtagagcatattcaaaaggcctcggaattccaattttccatttgtagagttaaactttgaatgtgccaaactttttcgtaacttttgaatcttaatattttgaaagtcttaaaggagacactgcaaagtcttagacaatctttggcatcttaaaataaaatagcaaaccaacatttttttttccagaaaatggtaaggtactcaggaatctggagacaagatattgtaaggaatgaacaaggttgccacagtgcatggacccaattgtgtttgcctgttgacgtgccatcagtgcgtgatgtggtatgacatacacacaccagagcaaccgccacaccagatatcgacagagtggtcttctctgcctgagaccacctctcactacatccattatccctttgcctttaaccctgacattcagtcttaacacattttatcttaaataatttattcattccagaatgtcaagggtccacttgctatttattttttttcaattgttggtggcattaatttaataattcttgtttttcaccttccttccccgaagaacttttccgtccttttcacctccttctcctgtgtacatagtgattttatgtccccagaacgcctggaagcatttctgaaaccaagatattattaaaaacctattattgtttttaatcatgagtatgtatctggctgcagggctgtgtattgggatataggtatatagtcttacacttaaacaggtatgcccctgaggttcactgtgacctcaagtcttttgccagaattttcccctaattcagttcacaagtggtagggtctgcatcagtggcatttccccctgaattccattcagcagcaaggttcaacagtggtgactgccaggcaggagagtcctgcggccaaacctgaagcccaaggctcgtgggccatgcaggaatctcagtgaagctgtcatgggctggcacctttacactgagttgccttgtcccagctggcacatctagggagttcattgcaaaatccccaggatgcaaaaagccacatgacagcctcagagcaaagatggtggcaaatagtcatgatacatctagagaatgaaagaaaactgtaagggaggagaaggaggggaatacattccctatatgggatgttcctactgttaactctggggaacagatagctccgggggcagcagatgagt

SEQ ID NO: 73469 - DNA, 4352 bp, Homo sapiens
ttccttggggttagttttagtcatatttttatctctataaaacatcaggctgggaggtggtgtgtgcctgtagtctcaactgctagggagcctgaggcaggaagactccttgagcacaggagttcaaggccagcctgtgcaacatagtgagaccctatcactctggaaaaaaaaaaaaaatctgcggagaagaatgtcttccaagcaagccacctctccatttgcctgtgcagctgatggagaggatgcaatgacccaggatttaacctcaagggaaaaggaagagggcagtgatcaacatgtggcctcccatctgcctctgcaccccataatgcacaacaaacctcactctgaggagctaccaacacttgtcagtaccattcaacaagatgctgactgggacagcgttctgtcatctcagcaaagaatggaatcagagaataataagttatgttccctatattccttccgaaatacctctacctcaccacataagcctgacgaagggagtcgggaccgtgagataatgaccagtgttacttttggaaccccagagcgccgcaaagggagtcttgccgatgtggtggacacactgaaacagaagaagcttgaggaaatgactcggactgaacaagaggattcctcctgcatggaaaaactactttcaaaagattggaaggaaaaaatggaaagactaaataccagtgaacttcttggagaaattaaaggtacacctgagagcctggcagaaaaagaacggcagctctccaccatgattacccagctgatcagtttacgggagcagctactggcagcgcatgatgaacagaaaaaactggcagcgtcacaaattgagaaacaacggcagcaaatggaccttgctcgccaacagcaagaacagattgcgagacaacagcagcaacttctgcaacagcagcacaaaattaatctcctgcagcaacagatccaggttcagggtcacatgcctccgctcatgatcccaatttttccacatgaccagcggactctggcagcagctgctgctgcccaacagggattcctcttcccccctggaataacatacaaaccaggtgataactaccccgtacagttcattccatcaacaatggcagctgctgctgcttctggactcagccctttacagctccagaagggtcatgcctcccacccacaaattaaccaaaggctaaagggcctaagtgaccgttttggcaggaatttggacacctttgaacatggtggtggccactcttacaaccacaaacagattgagcagctctatgccgctcagctggccagcatgcaggtgtcacctggagcaaagatgccatcaactccacagccaccaaacacagcagggacggtctcacctactgggataaaaaatgaaaagagagggaccagccctgtaactcaagttaaggatgaagcagcagcacagcctctgaatctctcatcccgacccaagacagcagagcctgtaaagtccccaacgtctcccacccagaacctcttcccagccagcaaaaccagccctgtcaatctgccaaacaaaagcagcatccctagccccattggaggaagcctgggaagaggatcctctttaggtaaatggaaaagtcaacaccaggaagagacttacgaattagatatcctatctagtctcaactcccctgccctttttggggatcaggatacagtgatgaaagccattcaggaggcgcggaagatgcgagagcagatccagcgggagcaacagcagcaacagccacatggtgttgacgggaaactgtcctccataaataatatggggctgaacagctgcaggaatgaaaaggaaagaacgcgctttgagaatttggggccccagttaacgggaaagtcaaatgaagatggaaaactgggcccaggtgtcatcgaccttactcggccagaagatgcagagggaggtgccactgtggctgaagcacgagtctacagggacgcccgcggccgtgccagcagcgagccacacattaagcgaccaatgaatgcattcatggtttgggcaaaggatgagaggagaaaaatccttcaggccttccccgacatgcataactccaacattagcaaaatcttaggatctcgctggaaatcaatgtccaaccaggagaagcaaccttattatgaagagcaggcccggctaagcaagatccacttagagaagtacccaaactataaatacaaaccccgaccgaaacgcacctgcattgttgatggcaaaaagcttcggattggggagtataagcaactgatgaggtctcggagacaggagatgaggcagttctttactgtggggcaacagcctcagattccaatcaccacaggaacaggtgttgtgtatcctggtgctatcactatggcaactaccacaccatcgcctcagatgacatctgactgctctagcacctcggccagcccggagcccagcctcccggtcatccagagcacttatggtatgaagacagatggcggaagcctagctggaaatgaaatgatcaatggagaggatgaaatggaaatgtatgatgactatgaagatgaccccaaatcagactatagcagtgaaaatgaagccccggaggctgtcagtgccaactgaggagtttttgtttgctgaattaaagtactctgacatttcacccccctccccaacaaagagttattaaagagcccgcatgcatttgtggctccacaattacatcagcagaatggtcttaattgtttcgtaaagtgtgagacagattaagttttccctgatttttcatgaacttgagttttttgttgttattgttattgttgttgttgttgtttttttaatttaggtgaagacatattaaatatgagacaccaggacttgaaacttatctcaacccgtagatgtcttacaagtcttatatttttgtcttactttttttttcttttggatgttgataaaggtttaagttactgttttagatggggttaaacattctcactcaggtatgctgtgccggcctacaggttgtgaatgtgtttttattctgaattattttagaaaacaactgaggatttcatattgtgaaacagaacaagtccacggcgtgtgcagctgcatgtagagcatattcaaaaggcctcggaattccaattttccatttgtagagttaaactttgaatgtgccaaactttttcgtaacttttgaatcttaatattttgaaagtcttaaaggagacactgcaaagtcttagacaatctttggcatcttaaaataaaatagcaaaccaacatttttttttccagaaaatggtaaggtactcaggaatctggagacaagatattgtaaggaatgaacaaggttgccacagtgcatggacccaattgtgtttgcctgttgacgtgccatcagtgcgtgatgtggtatgacatacacacaccagagcaaccgccacaccagatatcgacagagtggtcttctctgcctgagaccacctctcactacatccattatccctttgcctttaaccctgacattcagtcttaacacattttatcttaaataatttattcattccagaatgtcaagggtccacttgctatttattttttttcaattgttggtggcattaatttaataattcttgtttttcaccttccttccccgaagaacttttccgtccttttcacctccttctcctgtgtacatagtgattttatgtccccagaacgcctggaagcatttctgaaaccaagatattattaaaaacctattattgtttttaatcatgagtatgtatctggctgcagggctgtgtattgggatataggtatatagtcttacacttaaacaggtatgcccctgaggttcactgtgacctcaagtcttttgccagaattttcccctaattcagttcacaagtggtagggtctgcatcagtggcatttccccctgaattccattcagcagcaaggttcaacagtggtgactgccaggcaggagagtcctgcggccaaacctgaagcccaaggctcgtgggccatgcaggaatctcagtgaagctgtcatgggctggcacctttacactgagttgccttgtcccagctggcacatctagggagttcattgcaaaatccccaggatgcaaaaagccacatgacagcctcagagcaaagatggtggcaaatagtcatgatacatctagagaatgaaagaaaactgtaagggaggagaaggaggggaatacattccctatatgggatgttcctactgttaactctggggaacagatagctccgggggcagcagatgagt

SEQ ID NO: 73470 - DNA, 2717 bp, Homo sapiens
agttgttaggagagaccattggggataggaaagatgaaaggtcatggtgagcttcaaggacatgaaaggttgttgtctcatgtaacaatagtagattgttttttttcctaatatttctagccagcccctaagtcaggtgatggaacaaatacctacagtttagtcaggtgaaacaggagtgggtggaggaaggaaagaagaaaaatgggaagaatgtcttccaagcaagccacctctccatttgcctgtgcagctgatggagaggatgcaatgacccaggatttaacctcaagggaaaaggaagagggcagtgatcaacatgtggcctcccatctgcctctgcaccccataatgcacaacaaacctcactctgaggagctaccaacacttgtcagtaccattcaacaagatgctgactgggacagcgttctgtcatctcagcaaagaatggaatcagagaataataagttatgttccctatattccttccgaaatacctctacctcaccacataagcctgacgaagggagtcgggaccgtgagataatgaccagtgttacttttggaaccccagagcgccgcaaagggagtcttgccgatgtggtggacacactgaaacagaagaagcttgaggaaatgactcggactgaacaagaggattcctcctgcatggaaaaactactttcaaaagattggaaggaaaaaatggaaagactaaataccagtgaacttcttggagaaattaaaggtacacctgagagcctggcagaaaaagaacggcagctctccaccatgattacccagctgatcagtttacgggagcagctactggcagcgcatgatgaacagaaaaaactggcagcgtcacaaattgagaaacaacggcagcaaatggaccttgctcgccaacagcaagaacagattgcgagacaacagcagcaacttctgcaacagcagcacaaaattaatctcctgcagcaacagatccaggttcagggtcacatgcctccgctcatgatcccaatttttccacatgaccagcggactctggcagcagctgctgctgcccaacagggattcctcttcccccctggaataacatacaaaccaggtgataactaccccgtacagttcattccatcaacaatggcagctgctgctgcttctggactcagccctttacagctccagcagctctatgccgctcagctggccagcatgcaggtgtcacctggagcaaagatgccatcaactccacagccaccaaacacagcagggacggtctcacctactgggataaaaaatgaaaagagagggaccagccctgtaactcaagttaaggatgaagcagcagcacagcctctgaatctctcatcccgacccaagacagcagagcctgtaaagtccccaacgtctcccacccagaacctcttcccagccagcaaaaccagccctgtcaatctgccaaacaaaagcagcatccctagccccattggaggaagcctgggaagaggatcctctttaggtaaatggaaaagtcaacaccaggaagagacttacgaattagatatcctatctagtctcaactcccctgccctttttggggatcaggatacagtgatgaaagccattcaggaggcgcggaagatgcgagagcagatccagcgggagcaacagcagcaacagccacatggtgttgacgggaaactgtcctccataaataatatggggctgaacagctgcaggaatgaaaaggaaagaacgcgctttgagaatttggggccccagttaacgggaaagtcaaatgaagatggaaaactgggcccaggtgtcatcgaccttactcggccagaagatgcagagggaagtaaagcaatgaatggctctgcagctaaactacagcagtattattgttggccaacaggaggtgccactgtggctgaagcacgagtctacagggacgcccgcggccgtgccagcagcgagccacacattaagcgaccaatgaatgcattcatggtttgggcaaaggatgagaggagaaaaatccttcaggccttccccgacatgcataactccaacattagcaaaatcttaggatctcgctggaaatcaatgtccaaccaggagaagcaaccttattatgaagagcaggcccggctaagcaagatccacttagagaagtacccaaactataaatacaaaccccgaccgaaacgcacctgcattgttgatggcaaaaagcttcggattggggagtataagcaactgatgaggtctcggagacaggagatgaggcagttctttactgtggggcaacagcctcagattccaatcaccacaggaacaggtgttgtgtatcctggtgctatcactatggcaactaccacaccatcgcctcagatgacatctgactgctctagcacctcggccagcccggagcccagcctcccggtcatccagagcacttatggtatgaagacagatggcggaagcctagctggaaatgaaatgatcaatggagaggatgaaatggaaatgtatgatgactatgaagatgaccccaaatcagactatagcagtgaaaatgaagccccggaggctgtcagtgccaactgaggagtttttgtttgctgaattaaagtactctgacatttcacccccctccccaacaaagagttattaaagagcccgcatgcatttgtggctccacaatt

SEQ ID NO: 73471 - DNA, 4614 bp, Homo sapiens
actcactttctgatgttgcacgacgggaaatgctttgaatacttacgacatggccgctcacactgattgccaagattgacagcactaaccatcgccttcacttgttccagggtgaagcccctagtcaccccgctccgcgcgcacctcctggaaccccggcggcaaacttctgccgctctgcgctgcccccacccggggcgggacacccccgcagacttgagttaacgggctacgccggccgcggcgctggggggttctgttcccttgctccccggactgtgacaattgacctagcaccgactccccttccttttaattttttttatttgtatctttccctttttctttaatgccatttactcctgcggcgcagcgcacaaggagccctcccgcgcggtaccatcctggagcccgcccaggtcactttcatgaattcaaaggcaatttaccagtgatttctgggtgctggggctgatattttttgtgcatatttaagaatgtcttccaagcaagccacctctccatttgcctgtgcagctgatggagaggatgcaatgacccaggatttaacctcaagggaaaaggaagagggcagtgatcaacatgtggcctcccatctgcctctgcaccccataatgcacaacaaacctcactctgaggagctaccaacacttgtcagtaccattcaacaagatgctgactgggacagcgttctgtcatctcagcaaagaatggaatcagagaataataagttatgttccctatattccttccgaaatacctctacctcaccacataagcctgacgaagggagtcgggaccgtgagataatgaccagtgttacttttggaaccccagagcgccgcaaagggagtcttgccgatgtggtggacacactgaaacagaagaagcttgaggaaatgactcggactgaacaagaggattcctcctgcatggaaaaactactttcaaaagattggaaggaaaaaatggaaagactaaataccagtgaacttcttggagaaattaaaggtacacctgagagcctggcagaaaaagaacggcagctctccaccatgattacccagctgatcagtttacgggagcagctactggcagcgcatgatgaacagaaaaaactggcagcgtcacaaattgagaaacaacggcagcaaatggaccttgctcgccaacagcaagaacagattgcgagacaacagcagcaacttctgcaacagcagcacaaaattaatctcctgcagcaacagatccaggttcagggtcacatgcctccgctcatgatcccaatttttccacatgaccagcggactctggcagcagctgctgctgcccaacagggattcctcttcccccctggaataacatacaaaccaggtgataactaccccgtacagttcattccatcaacaatggcagctgctgctgcttctggactcagccctttacagctccagaagggtcatgcctcccacccacaaattaaccaaaggctaaagggcctaagtgaccgttttggcaggaatttggacacctttgaacatggtggtggccactcttacaaccacaaacagattgagcagctctatgccgctcagctggccagcatgcaggtgtcacctggagcaaagatgccatcaactccacagccaccaaacacagcagggacggtctcacctactgggataaaaaatgaaaagagagggaccagccctgtaactcaagttaaggatgaagcagcagcacagcctctgaatctctcatcccgacccaagacagcagagcctgtaaagtccccaacgtctcccacccagaacctcttcccagccagcaaaaccagccctgtcaatctgccaaacaaaagcagcatccctagccccattggaggaagcctgggaagaggatcctctttagatatcctatctagtctcaactcccctgccctttttggggatcaggatacagtgatgaaagccattcaggaggcgcggaagatgcgagagcagatccagcgggagcaacagcagcaacagccacatggtgttgacgggaaactgtcctccataaataatatggggctgaacagctgcaggaatgaaaaggaaagaacgcgctttgagaatttggggccccagttaacgggaaagtcaaatgaagatggaaaactgggcccaggtgtcatcgaccttactcggccagaagatgcagagggaggtgccactgtggctgaagcacgagtctacagggacgcccgcggccgtgccagcagcgagccacacattaagcgaccaatgaatgcattcatggtttgggcaaaggatgagaggagaaaaatccttcaggccttccccgacatgcataactccaacattagcaaaatcttaggatctcgctggaaatcaatgtccaaccaggagaagcaaccttattatgaagagcaggcccggctaagcaagatccacttagagaagtacccaaactataaatacaaaccccgaccgaaacgcacctgcattgttgatggcaaaaagcttcggattggggagtataagcaactgatgaggtctcggagacaggagatgaggcagttctttactgtggggcaacagcctcagattccaatcaccacaggaacaggtgttgtgtatcctggtgctatcactatggcaactaccacaccatcgcctcagatgacatctgactgctctagcacctcggccagcccggagcccagcctcccggtcatccagagcacttatggtatgaagacagatggcggaagcctagctggaaatgaaatgatcaatggagaggatgaaatggaaatgtatgatgactatgaagatgaccccaaatcagactatagcagtgaaaatgaagccccggaggctgtcagtgccaactgaggagtttttgtttgctgaattaaagtactctgacatttcacccccctccccaacaaagagttattaaagagcccgcatgcatttgtggctccacaattacatcagcagaatggtcttaattgtttcgtaaagtgtgagacagattaagttttccctgatttttcatgaacttgagttttttgttgttattgttattgttgttgttgttgtttttttaatttaggtgaagacatattaaatatgagacaccaggacttgaaacttatctcaacccgtagatgtcttacaagtcttatatttttgtcttactttttttttcttttggatgttgataaaggtttaagttactgttttagatggggttaaacattctcactcaggtatgctgtgccggcctacaggttgtgaatgtgtttttattctgaattattttagaaaacaactgaggatttcatattgtgaaacagaacaagtccacggcgtgtgcagctgcatgtagagcatattcaaaaggcctcggaattccaattttccatttgtagagttaaactttgaatgtgccaaactttttcgtaacttttgaatcttaatattttgaaagtcttaaaggagacactgcaaagtcttagacaatctttggcatcttaaaataaaatagcaaaccaacatttttttttccagaaaatggtaaggtactcaggaatctggagacaagatattgtaaggaatgaacaaggttgccacagtgcatggacccaattgtgtttgcctgttgacgtgccatcagtgcgtgatgtggtatgacatacacacaccagagcaaccgccacaccagatatcgacagagtggtcttctctgcctgagaccacctctcactacatccattatccctttgcctttaaccctgacattcagtcttaacacattttatcttaaataatttattcattccagaatgtcaagggtccacttgctatttattttttttcaattgttggtggcattaatttaataattcttgtttttcaccttccttccccgaagaacttttccgtccttttcacctccttctcctgtgtacatagtgattttatgtccccagaacgcctggaagcatttctgaaaccaagatattattaaaaacctattattgtttttaatcatgagtatgtatctggctgcagggctgtgtattgggatataggtatatagtcttacacttaaacaggtatgcccctgaggttcactgtgacctcaagtcttttgccagaattttcccctaattcagttcacaagtggtagggtctgcatcagtggcatttccccctgaattccattcagcagcaaggttcaacagtggtgactgccaggcaggagagtcctgcggccaaacctgaagcccaaggctcgtgggccatgcaggaatctcagtgaagctgtcatgggctggcacctttacactgagttgccttgtcccagctggcacatctagggagttcattgcaaaatccccaggatgcaaaaagccacatgacagcctcagagcaaagatggtggcaaatagtcatgatacatctagagaatgaaagaaaactgtaagggaggagaaggaggggaatacattccctatatgggatgttcctactgttaactctggggaacagatagctccgggggcagcagatgagt

SEQ ID NO: 73472 - DNA, 446 bp, Homo sapiens
ctttcattccactgctgtaattactctctggtgttcctgtaccctcaatggcctccagtcattgtcccagatctttaaatgtcttaggatagtccctttctaaattctgccctcctttcccttattcgtccaggtatttctcaagcttgtgagatctcttcttgcttccattttaggtacacctgagagcctggcagaaaaagaacggcagctctccaccatgattacccagctgatcagtttacgggagcagctactggcagcgcatgatgaacagaaaaaactggcagcgtcacaaattgagaaacaacggcagcaaatggaccttgctcgccaacagcaagaacaggtgagccctgcaaaaggcactgacgaactggagatgtggaatgtgccaggctcagagagtaatcaaattgattggcttatttgttgtaagctttcct

SEQ ID NO: 73473 - DNA, 383 bp, Homo sapiens
gtcggccggtccgaaagcttatagtgtaagtgaagagagtagagagctaatagggaaggagaagagagatgtcaagacacttacatgctgatgagctataagggaaagatgaaaggattcgcctgagcaagggatctagaagaatagaaatgtttggatttaagatttcgaagagaccagcctggccaatatggtgacaccccgtctctactaaaaatacaaaaattagcctggcatggtggcgtgcgcctgtagtcccagcaactcaggaggctgaggcagaagaattgcttgaacccgggaggcagaggttgcagtgagctgagatcacaccactgcattccaacctggcgacagagcgagactctgtctcaaaaaaaaaa

SEQ ID NO: 73474 - DNA, 303 bp, Homo sapiens
gtcggccggtccgaaagcttatagtgtaagtgaagagagtagagagctaatagggaaggagaagagagatgtcaagacacttacatgctgatgagctataagggaaagatgaaaggattcgcctgagcaagggatctagaagaatagaaatgtttggatttaagatttcgaagagaccagcctggccaatatggtgacaccccgtctctactaaaaatacaaaaattagcctggcatggtggcgtgcgcctgtagtcccagcaactcaggaggctgagcactataagctttcggtccggccaa

SEQ ID NO: 73475 - DNA, 448 bp, Homo sapiens
atgaaacaagacaatgagaattatagggaagtggtaggtagatttgaggaaattgaagaagccttagagtagtctcagaattcagaaaattgatttaaaaagttagaattgtttggcaggtaaggctggaagcttgaatttactattatctatctgcacaatttaatgattttttccctaatactgtttagtggcccaggattgtgtgacatacagtatatactagtgacatactagtataatagaatgacaaaagatcaagataatgttttttatgttgccagtagtgatggtagtgttagctatcattcattgagcatttctgtctgccagtgctttacctacattatctcactgaattctctagagataattgagttgagaatatttgaaagagagtggttaaagtctaagtttggttgacgtgtaagtgaagagagtagagagc

SEQ ID NO: 73476 - DNA, 918 bp, Homo sapiens
agactccgcccttgggcggggcctggatgcggccggagcggagcagtgctggagcgggagcctcagccctcaggcgccactgtgaggacctgaccggaccagaccatcccgcagcgccccgccccggccccctccgcgccctcccgacgccaggtcctgccgtcccgccgaccgtccgggagcgaacccgtcgtcccgcactcggagtccgcgatggcttcagtgacagatggtaaaactggagtcaaagatgcctctgaccagaattttgactacatgtttaaactgcttatcattggcaacagcagtgttggcaagacctccttcctcttccgctatgctgatgacacgttcaccccagccttcgttagcaccgtgggcatcgacttcaaggtgaagacagtctaccgtcacgagaagcgggtgaaactgcagatctgggacacagctgggcaggagcggtaccggaccatcacaacagcctattaccgtggggccatgggcttcattctgatgtatgacatcaccaatgaagagtccttcaatgctgtccaagactgggctactcagatcaagacctactcctgggacaatgcacaagttattctggtggggaacaagtgtgacatggaggaagagagggttgttcccactgagaagggccagctccttgcagagcagcttgggtttgatttctttgaagccagtgcaaaggagaacatcagtgtaaggcaggcctttgagcgcctggtggatgccatttgtgacaagatgtctgattcgctggacacagacccgtcgatgctgggctcctccaagaacacgcgtctctcggacaccccaccgctgctgcagcagaactgctcatgctagtggcaatgatggtatatgcattaaggttaatctgaattgtgaaaa

SEQ ID NO: 73477 - DNA, 1805 bp, Homo sapiens
agactccgcccttgggcggggcctggatgcggccggagcggagcagtgctggagcgggagcctcagccctcaggcgccactgtgaggacctgaccggaccagaccatcccgcagcgccccgccccggccccctccgcgccctcccgacgccaggtcctgccgtcccgccgaccgtccgggagcgaacccgtcgtcccgcactcggagtccgcgatggcttcagtgacagatggtaaaactggagtcaaagatgcctctgaccagaattttgactacatgtttaaactgcttatcattggcaacagcagtgttggcaagacctccttcctcttccgctatgctgatgacacgttcaccccagccttcgttagcaccgtgggcatcgacttcaaggtgaagacagtctaccgtcacgagaagcgggtgaaactgcagatctgggacacagctgggcaggagcggtaccggaccatcacaacagcctattaccgtggggccatgggcttcattctgatgtatgacatcaccaatgaagagtccttcaatgctgtccaagactgggctactcagatcaagacctactcctgggacaatgcacaagttattctggtggggaacaagtgtgacatggaggaagagagggttgttcccactgagaagggccagctccttgcagagcagcttgggtttgatttctttgaagccagtgcaaaggagaacatcagtgtaaggcaggcctttgagcgcctggtggatgccatttgtgacaagatgtctgattcgctggacacagacccgtcgatgctgggctcctccaagaacacgcgtctctcggacaccccaccgctgctgcagcagaactgctcatgctaggcaaggcccaccttcctgacctcccctcattgtggccccacacccagtctgcttctccctgttacacactgtccgctctcagcccactctccctgttacacactgcccacactcagagcaagatgagttgctgctattctttgcctgcccctggggttctctgcagatggtcccagtaatagatactcagcactagactaacataacaggtcactacacgggtgcagaatcactttacaaaagaagactctgttttacgaaggggattcactacagggacttagagaacagtctcttttctgcctttaaaatgagagttcctccatttaccaaaatttgacacgcacacattcttcaggggcatgccaattgcgtaaagtgaggctcgcctgcatagctaatcctgttaaagacaacttctcaaagcacaacgtgcttgtttcctatcgggctccctgcggggctttctctcactacaagtcaagcttgggctctcaaagccctgcgcctgttaccacggatgcccacagggcctgggcagttgctgtggcgacaggaagagctaatcttcagagagctcagactctctaatgatgctgaaggagcaaaggctgagtcagaaacacacttaagagaaaaggattggccgggcgcggtggctcacgcctgtaatcccagcactttgggaggccgaggcgggtggatcatgaggtcaggagatcgagaccatcctggctaacaaggtgaaaccccgtctctactaaaaatacaaaaaattagccgggcgcggtggcgggcgcctgtagtcccagctactcgggaggctgaggcaggagaatggcgtgaacccgggaagcggagcttgcagtgagccgagattgcgccactgcagtccgcagtccggcctgggcgacagagcgagactccgtctc

SEQ ID NO: 73478 - DNA, 514 bp, Homo sapiens
gatagggtagccatcctcagttgtcaagtacgcaggcttggctcatgtacctctttatgttttctcatccatttacacttagacctagaccagacagtgatatttggaactacttgctggatgcactaaggcaggggattcctgttggcatggttctgcatgaatggaacctcaaatggattttgtagattatcctcattgttaccaaaacattttttatttgaggaaaatgttgcaagtatttatactagataatatccactgtgactgtactggaacaaaggtattctgatagagaaaaaagaatgtaatcataaggtccaggaaagagaggtatttcatttatcttaactgatgagaatgttctaatgacaggtatttgctgtagaagtttctaggcctagcttaccctgaaatcaatacacttttgaaagtcagtgtctgtttgtgaggaaatacattgctaaggttttctcttattttctttataaaaaataaaattatgttactttgt

SEQ ID NO: 73479 - DNA, 389 bp, Homo sapiens
aatggcaagagtgatcattctttctgaggaaattcctcagtgaggggatgagccctgcccccacttctgtgcccccatcagcttgggaaattgacatttggtatttggggagggcattgaagtcaagggcagtctgggtgcagcacaagcatctgttggcttgcacagtccgtttccagactttgaagagggagggaagagcctggccacatcaccttccgaggtggtgtggtgtgcaggaaggatgagagaccagccagccctagagctgtgtgtgtatgtgtgtgtgtgtgtgtgtgtgtgtgtgtgtgtgtatgtgtgacgccttctgagacaggacaattggtgaatgcattagcattggcatgcacattaatctttgagggaac

SEQ ID NO: 73480 - DNA, 880 bp, Homo sapiens
agaggtgctgaatgaagacctatcgatgattgattgatacgttaaagattatttcctccttcctcagaatgctacacttcgctcatcaatggagctcaagatgtaaaagtctggtttaagagacattgaatctattctgccttttattatccctttcttataagttgacttttaagaaatcaatgactgtgtggagagttctaactgggtacgtaataaaataaccaactgtgggggtgggcagggggccctatcgcaccaggaagcttgtttattggttgcattagaccactaaagtggaagcactgagatattctggaaagaacacagcttgggggccaacagatctgggttcagagccttactgcatcacctacaagttgtgtctctttagaaaatttacttaaaattactgggaatttatttcatcatctgtacaatgggctacttttttctgtgattgttgtaagaattgtaataactgttaaattgcctagcatggtgctcagtacaagatgttacactctcggcggaatcacttccaagtcaaattggaaattgactgttagccacccatcactctggtttgagaaagctggtgggatagtttacatgcatggcattagcgccatctagtggtgtgttactgcctacgcttccttacggaattctctcttccagtacctttgaatggccacttaatttattcattttattcaacaagcatttattgaatgcctactgtgtgccagacactgatttggcagctgaagctacaacagtgaacaagatagatcatggtccctgcctttagggagtttgtggtcaggtgggaagatagaaataaaataattactgaaataaaatttgaattcaactt

SEQ ID NO: 73481 - DNA, 647 bp, Homo sapiens
tggtggggatgactgagctaacagaccaaaaagttaaaacaggaggaagtgtcaaaacttggaagtgggttcattggttggctgtttaggatgtcatgtgaagcctgcttcaagttctccccacctcattaattgcaatttatgagtttgcagggactccccagtttgaaacttttagtcccatataatccacaaatctagaacctgtggttcagactttatgcttctcttactacctacactgcaataagtagattggaaacaaaagagaaatttgccttgatctttatatttcatctttgttactcctaactactgaggcacattaaatacttaccttgctttctcctgtgtgtgcatgtgtgtgtgtgtgcacgcatgcacaggcatgcacgtgtgtgtatatgtatgcaggcatgcacgtgcatatgtgtgtgtgagcttgtgtgtgtgtatgtgtggtttaagtctccttcccagcatttctcagaaactgcttatggaaaaaaataataataaatgaaagggttggcttgtttgcccttcaactggttagccccacagagtgaggcataggaaattaaatttggcataaaatattatagctttttgaacacccgtggcttttccatctcatggtaatcgta

SEQ ID NO: 73482 - DNA, 579 bp, Homo sapiens
tggccaggatgttcttgaactcttgacctcaagtgatccgcccaccttggcttcccaaagtgctgggattacaggtgtaaaccactgcacccagcctgttcatttactttcttaataagcttgctttcactttatggacttgccccaaactctttattatgtgaggtccaagaaccctctcttggggtctggatcgaggcccctttgcagtataacaaggatcaggagtagacaaagaaaagtccaggtccctggctcaacagaatctactctccagcaaacaagataaaacttgctatctccctttaattgaagtccctaatgtttaatggaagtcccagtaggcatccatatggtctctgtatttaccagcggctggaagctcgctttgtacgttactctgcacaacaccacatgactgctcctgacagtaatttgaggagcttctggtgatggtaaacttgcacagtatgttcaaaaccaacctacaatctgtgttacgcctgtatgtttcacaaggaacatgtctgtatatttcgactccagaaatataatttgtcaaaccaattatcgtaccta

SEQ ID NO: 73483 - DNA, 407 bp, Homo sapiens
actagctctatgggatgttgacttacaataatatgtggtgaaaaggttttccagacaaacactgagttcagagttaagcaggtttttttctattgcagagcttgtcagagcctctgatatgcccactagtattgtaagtgtacaagatgaagctttaaaattgggcaaataacagatatttcatacagaatcctggatgtggccaggagtgatgggagatgaaggatcctcttgtcagagtagcactccacagaacacacttggggaaaagttgtcccagggcctgtggcatagtgctctgaattcattttcgcctggctcttaattctggggttcggaaggaactggtcaaacacccacagaagttatctaggatcttattgagtgcttccccctcgtccttccat

SEQ ID NO: 73484 - DNA, 408 bp, Homo sapiens
aataatatcaagttatttgctaaatatataaatgagttataggcctaagactaagatataagagattgacaattagaaaacacttttcaatattaaggtagtatgattttctttaacaattttacaatgaaaataaaaacttaataaaaggtggtaacgggccaggcatggtggctcacacctgtaaccccagcactttgggagactaaggcgagagaatcacttgagcccaggagttccagatctgtctttgcaacaaagtgagaccctgactctaagaaaaaataaaaatgtttacaataaaagtaaaatttaaaatagtaatgtgtccatgaaaactttaattttagagtagttttatatttacagaaaaactgtaaatagaaaggtcccttacagacctatggg

SEQ ID NO: 73485 - DNA, 466 bp, Homo sapiens
aataccactctcccgacgcaccccaaacattcagagttggactttccacacttgatcagggtccaggacacctgggttccacttgattacggctaattaggttatttatttaatgaacagctcattaagatagtcatctgaaatttgaagtgctttcaacaactttcattcattctctcattcattcatgtaagatttttagagcacctaacagatgctaggcactattctaagtcctgggggtacaccaatgaacagagcagaaaaatccccctgccccattcattttgttcatgtgaatactttcttggtgagagtgatttcagctagcacatagtttagagagaatgctgcagagggaggcagatagctgagtttcagggttaacccggagttgcagagttgcgaggcctgctcctgaactttctgaatgaagctttgtagcaagcctttaaaaaaaaagtaa

SEQ ID NO: 73486 - DNA, 758 bp, Homo sapiens
gggactctaaattacacacaccttaatgacaagactccagttggttttcttctgactgcacttgttctcatagtagtaaaatgctatgcgcatttataccttgcataagtcctcattctaccacatgttaaccctctagctgataatgcaaacactaactgggggattttatttataagggctctagaaaaaacgagttattcacaccagcatcatcttaactaacattctgaactagttagtgcagcttttcattgtgttgtgtggttggtctcataactaggttgagtttttctcctctgctgaggaaacagtaccgaagttctttttcttgtggcatttgtattataaaaacttggtgtgggggaggagcacaaaactccagcccactgaacctctgccaattaagatggtgttgggttaggttacatctggttactgtcctgggaaaatcatttttatagagatggccttccaagtggttttaaaatttactgaagtttttaggtcaattatgtatgttgactaaatttacaaataaacttgtttatccaaaaaaaaaaaaaaaaaaaaaaaaaaaaaaaaaaaaaaaaaaaaaaaaaaaaaaaaaaaaaaccttgtgggccgcttgggcccattcgattttaaattggaccaagtttttccttgcggccgaatttcgggttaattgggccatttggccttttggggggccgttttacatttaatgggccgtggtttaacaacgtatggattgg

SEQ ID NO: 73487 - DNA, 1019 bp, Homo sapiens
agtcgttggtgtatgcaaataagggttctatgacgcagagacgcagcgtgaagcgtgcctataaaaacggaggcgacgcgggggcttggagcgcagagcggtttggtcgttcgttgggcggtgctggtttttcgctcgtcgactgcggctcttcctcgggcagcggaagcggcgcggcggtcggagaagtggcctaaaacttcggcgttgggtgaaagaaaatggcccgaaccaagcagactgctcgtaagtccaccggtgggaaagccccccgcaaacagctggccacgaaagccgccaggaaaagcgctccctctaccggcggggtgaagaagcctcatcgctacaggcccgggaccgtggcgcttcgagagattcgtcgttatcagaagtcgaccgagctgctcatccggaagctgcccttccagaggttggtgagggagatcgcgcaggatttcaaaaccgacctgaggtttcagagcgcagccatcggtgcgctgcaggaggctagcgaagcgtacctggtgggtctgttcgaagataccaacctgtgtgccatccacgctaagagagtcaccatcatgcccaaagacatccagttggctcgccggatacggggagagagagcttaagtgaaggcagtttttatggcgttttgtagtaaattctgtaaaatactttggtttaatttgtgactttttttgtaagaaattgtttataatatgttgcatttgtacttaagtcattccatctttcactcaggatgaatgcgaaaagtgactgttcacagacctcagtgatgtgagcactgttgctcaggagtgacaagttgctaatatgcagaagggatgggtgatacttcttgcttctcatgatgcatgtttctgtatgttaatgacttgttgggtagctattaaggtactagagttgataaatgtgtacagggtccttttgcaaggataaacggttgatgatcagtggtttggggtgtttggctattatggggtggggtttcgggg

SEQ ID NO: 73488 - DNA, 401 bp, Homo sapiens
atgctgaggtgatctaaggatcccagttcgacggagactctcgaagaaaagcgctccctctaccggcggggtgaagaagcctcatcgctacaggcccgggaccgtggcgcttcgagagattcgtcgttatcagaagtcgaccgagctgctcatccggaagctgcccttccagaggttggtgagggagatcgcgcaggatttcaaaaccgacctgaggtttcagagcgcagccatcggtgcgctgcaggaggctagcgaagcgtacctggtgggtctgttcgaagataccaacctgtgtgccatccacgctaagagagtcaccatcatgcccaaagacatccagttggctcgccggatacggggagagagagcttaatctccgtcgaactgggatcctctga

SEQ ID NO: 73489 - DNA, 2190 bp, Homo sapiens
aattcgcggccgcgtcgacacggtgcgagaagacgacagaaggggagtttggtcgttcgttgggcggtgctggtttttcgctcgtcgactgcggctcttcctcgggcagcggaagcggcgcggcggtcggagaagtggcctaaaacttcggcgttgggtaggcgttcgtaggtttacccgcggcttcaggttctgccaaccgttggcgccgcgcgccgcggccgttgggagccgagcggcgggggctgctcgggccgctggcgtcgggtcgggtatggggccgggaggtttccccttggggctttgttccggaactgtgtccccgccttttcccggcggtgattcagaggtcccgacgccgggttccgggcagtcgggcctccgcccgtcgaggaagggaagtgactcctccccgcgctccccctcccgggggaggctgccgctcctcgcagcctgagtcattaggggagggggaggaggttggcggccctcggccatctgctgccgcgaggtggggcgcggggaggcgggaggcccggcggtggggccaggatctgttcctccccccgcagccctggggggcggcccgggtgagcgcggcggccttatcttcggggcgtctttcttaggtgaaagaaaatggcccgaaccaagcagactgctcgtaagtccaccggtgggaaagccccccgcaaacagctggccacgaaagccgccaggaaaagcgctccctctaccggcggggtgaagaagcctcatcgctacaggcccgggaccgtggcgcttcgagagattcgtcgttatcagaagtcgaccgagctgctcatccggaagctgcccttccagaggttggtgagggagatcgcgcaggatttcaaaaccgacctgaggtttcagagcgcagccatcggtgcgctgcaggaggctagcgaagcgtacctggtgggtctgttcgaagataccaacctgtgtgccatccacgctaagagagtcaccatcatgcccaaagacatccagttggctcgccggatacggggagagagagcttaagtgaaggcagtttttatggcgttttgtagtaaattctgtaaaatactttggtttaatttgtgactttttttgtaagaaattgtttataatatgttgcatttgtacttaagtcattccatctttcactcaggatgaatgcgaaaagtgactgttcacagacctcagtgatgtgagcactgttgctcaggagtgacaagttgctaatatgcagaagggatgggtgatacttcttgcttctcatgatgcatgtttctgtatgttaatgacttgttgggtagctattaaggtactagagttgataaatgtgtacagggtccttttgcaataaaactggttatgacttgatccaagtgtttaacaattggggctgttaagtctgaccatacatcactgtgatagaatgtgggctttttcaagggtgaagatacaagtcttaaccacagtgtaacttacagtttcctttaaaaaaaaaaaaagtaaacctggcagctatagaatacactatgtgcatttataatagctattttatatattgtagtatcaacatttttaaattaaatgttttacattcacaagtggtggggagtcttgtcattaaggtgtgtgtaatttagagtccagttggttttcttctgactgcacttgttctcatagtagtaaaatgctatgcgcatttataccttgcataagtcctcattctaccacatgttaaccctctagctgataatgcaaacactaactgggggattttatttataagggctctagaaaaaacgagttattcacaccagcatcatcttaactaacattctgaactagttagtgcagcttttcattgtgttgtgtggttggtctcataactaggttgagtttttctcctctgctgaggaaacagtaccgaagttctttttcttgtggcatttgtattataaaaacttggtgtgggggaggagcacaaaactccagcccactgaacctctgccaattaagatggtgttgggttaggttacatctggttactgtcctgggaaaatcatttttatagagatggccttccaagtggttttaaaatttactgaagtttttaggtcaattatgtatgttgactaaatttacaaataaacttgtttatccaaaaaa

SEQ ID NO: 73490 - DNA, 3227 bp, Homo sapiens
aattcgcggccgcgtcgacacggtgcgagaagacgacagaaggggagtttggtcgttcgttgggcggtgctggtttttcgctcgtcgactgcggctcttcctcgggcagcggaagcggcgcggcggtcggagaagtggcctaaaacttcggcgttgggtaggcgttcgtaggtttacccgcggcttcaggttctgccaaccgttggcgccgcgcgccgcggccgttgggagccgagcggcgggggctgctcgggccgctggcgtcgggtcgggtatggggccgggaggtttccccttggggctttgttccggaactgtgtccccgccttttcccggcggtgattcagaggtcccgacgccgggttccgggcagtcgggcctccgcccgtcgaggaagggaagtgactcctccccgcgctccccctcccgggggaggctgccgctcctcgcagcctgagtcattaggggagggggaggaggttggcggccctcggccatctgctgccgcgaggtggggcgcggggaggcgggaggcccggcggtggggccaggatctgttcctccccccgcagccctggggggcggcccgggtgagcgcggcggccttatcttcggggcgtctttcttaggtgaaagaaaatggcccgaaccaagcagactgctcgtaagtccaccggtgggaaagccccccgcaaacagctggccacgaaagccgccaggaaaagcgctccctctaccggcggggtgaagaagcctcatcgctacaggcccgggaccgtggcgcttcgagagattcgtcgttatcagaagtcgaccgagctgctcatccggaagctgcccttccagaggttggtgagggagatcgcgcaggatttcaaaaccgacctgaggtttcagagcgcagccatcggtgcgctgcaggaggctagcgaagcgtacctggtgggtctgttcgaagataccaacctgtgtgccatccacgctaagagagtcaccatcatgcccaaagacatccagttggctcgccggatacggggagagagagcttaagtgaaggcagtttttatggcgttttgtagtaaattctgtaaaatactttggtttaatttgtgactttttttgtaagaaattgtttataatatgttgcatttgtacttaagtcattccatctttcactcaggatgaatgcgaaaagtgactgttcacagacctcagtgatgtgagcactgttgctcaggagtgacaagttgctaatatgcagaagggatgggtgatacttcttgcttctcatgatgcatgtttctgtatgttaatgacttgttgggtagctattaaggtactagagttgataaatgtgtacagggtccttttgcaataaaactggttatgacttgatccaagtgtttaacaattggggctgttaagtctgaccatacatcactgtgatagaatgtgggctttttcaagggtgaagatacaagtcttaaccacagtgtaacttacagtttcctttaaaaaaaaaaaaagtaaacctggcagctatagaatacactatgtgcatttataatagctattttatatattgtagtatcaacatttttaaattaaatgttttacattcacaagtggtggggagtcttgtcattaaggtgtgtgtaatttagagtccagttggttttcttctgactgcacttgttctcatagtagtaaaatgctatgcgcatttataccttgcataagtcctcattctaccacatgttaaccctctagctgataatgcaaacactaactgggggattttatttataagggctctagaaaaaacgagttattcacaccagcatcatcttaactaacattctgaactagttagtgcagcttttcattgtgttgtgtggttggtctcataactaggttgagtttttctcctctgctgaggaaacagtaccgaagttctttttcttgtggcatttgtattataaaaacttggtgtgggggaggagcacaaaactccagcccactgaacctctgccaattaagatggtgttgggttaggttacatctggttactgtcctgggaaaatcatttttatagagatggccttccaagtggttttaaaatttactgaagtttttaggtcaattatgtatgttgactaaatttacaaataaacttgtttatccaaaaaagtgtccaaaacctaaattgaatgtactaagttttcacatgtcccattatctaggtccttgtatactaatgttttgaacttagatcatttcaggtgttgtttggtggataaaggaaccttttatttataaagatactgtagaaagcatgtgaacagctctctgcttgattaagatgccataatagtgctgtatttgcagtgtgggctaagacaaagtatattaataagcttttcagcccccccactcccgttccgtagtgtagaagcccacaggtgtagaactcagtcttaaacttcagtatgaaaccagtttccttgtgcgatgatggccactaaagcatagtacgtggatgtcagtgagacagcatgagagccagcagtcatcaaagcgttccacgtttgaagttagcaactgcttaaagttatgccctattaaaattgctttctcaaaagtttgggttagtttcaaatgtgatattttggagggaaggtaaagtaggtatctttcaggtcgtgataatgagctcctatgaaagaatgcaatataatgacccgcttttctagaaagttcataatcagctctggaacaagcacacttgattcctcactgtgcttcagaatgagattaagatcagatgttggaacgtgctatgctgtagcgtgtctggaaacaaagtacacaaacctggctacggtgatgagttagcttctgcttactacctgtgacaacccaagtgggtgacactagtgaaccttctccagtctgcaggctggcatagaaggctcttagattatattgggcagcttgcaatctgccgaagcagtgacttgcatttccacacttggcttgagcactcaacccagaaggcgaagatagcttttggttgtaggcggcttcctgtatgggatatccctcggtaagggtaaaggagcagaggcaaaggagaaaagcagaagttgcagctgatgcaggtatcctatgcccttgatggatgagactaaaataaaatttttgaagttaagatttaaaattctcaa

SEQ ID NO: 73491 - DNA, 3165 bp, Homo sapiens
aattcgcggccgcgtcgacacggtgcgagaagacgacagaaggggagtttggtcgttcgttgggcggtgctggtttttcgctcgtcgactgcggctcttcctcgggcagcggaagcggcgcggcggtcggagaagtggcctaaaacttcggcgttgggtaggcgttcgtaggtttacccgcggcttcaggttctgccaaccgttggcgccgcgcgccgcggccgttgggagccgagcggcgggggctgctcgggccgctggcgtcgggtcgggtatggggccgggaggtttccccttggggctttgttccggaactgtgtccccgccttttcccggcggtgattcagaggtcccgacgccgggttccgggcagtcgggcctccgcccgtcgaggaagggaagtgactcctccccgcgctccccctcccgggggaggctgccgctcctcgcagcctgagtcattaggggagggggaggaggttggcggccctcggccatctgctgccgcgaggtggggcgcggggaggcgggaggcccggcggtggggccaggatctgttcctccccccgcagccctggggggcggcccgggtgagcgcggcggccttatcttcggggcgtctttcttaggtgaaagaaaatggcccgaaccaagcagactgctcgtaagtccaccggtgggaaagccccccgcaaacagctggccacgaaagccgccaggaaaagcgctccctctaccggcggggtgaagaagcctcatcgctacaggcccgggaccgtggcgcttcgagagattcgtcgttatcagaagtcgaccgagctgctcatccggaagctgcccttccagaggttggtgagggagatcgcgcaggatttcaaaaccgacctgaggtttcagagcgcagccatcggtgcgctgcaggaggctagcgaagcgtacctggtgggtctgttcgaagataccaacctgtgtgccatccacgctaagagagtcaccatcatgcccaaagacatccagttggctcgccggatacggggagagagagcttaagtgaaggcagtttttatggcgttttgtagtaaattctgtaaaatactttggtttaatttgtgactttttttgtaagaaattgtttataatatgttgcatttgtacttaagtcattccatctttcactcaggatgaatgcgaaaagtgactgttcacagacctcagtgatgtgagcactgttgctcaggagtgacaagttgctaatatgcagaagggatgggtgatacttcttgcttctcatgatgcatgtttctgtatgttaatgacttgttgggtagctattaaggtactagagttgataaatgtgtacagggtccttttgcaataaaactggttatgacttgatccaagtgtttaacaattggggctgttaagtctgaccatacatcactgtgatagaatgtgggctttttcaagggtgaagatacaagtcttaaccacagtgtaacttacagtttcctttaaaaaaaaaaaaagtaaacctggcagctatagaatacactatgtgcatttataatagctattttatatattgtagtatcaacatttttaaattaaatgttttacattcacaagtggtggggagtcttgtcattaaggtgtgtgtaatttagagtccagttggttttcttctgactgcacttgttctcatagtagtaaaatgctatgcgcatttataccttgcataagtcctcattctaccacatgttaaccctctagctgataatgcaaacactaactgggggattttatttataagggctctagaaaaaacgagttattcacaccagcatcatcttaactaacattctgaactagttagtgcagcttttcattgtgttgtgtggttggtctcataactaggttgagtttttctcctctgctgaggaaacagtaccgaagttctttttcttgtggcatttgtattataaaaacttggtgtgggggaggagcacaaaactccagcccactgaacctctgccaattaagatggtgttgggttaggttacatctggttactgtcctgggaaaatcatttttatagagatggccttccaagtggttttaaaatttactgaagtttttaggtcaattatgtatgttgactaaatttacaaataaacttgtttatccaaaaaatactaatgttttgaacttagatcatttcaggtgttgtttggtggataaaggaaccttttatttataaagatactgtagaaagcatgtgaacagctctctgcttgattaagatgccataatagtgctgtatttgcagtgtgggctaagacaaagtatattaataagcttttcagcccccccactcccgttccgtagtgtagaagcccacaggtgtagaactcagtcttaaacttcagtatgaaaccagtttccttgtgcgatgatggccactaaagcatagtacgtggatgtcagtgagacagcatgagagccagcagtcatcaaagcgttccacgtttgaagttagcaactgcttaaagttatgccctattaaaattgctttctcaaaagtttgggttagtttcaaatgtgatattttggagggaaggtaaagtaggtatctttcaggtcgtgataatgagctcctatgaaagaatgcaatataatgacccgcttttctagaaagttcataatcagctctggaacaagcacacttgattcctcactgtgcttcagaatgagattaagatcagatgttggaacgtgctatgctgtagcgtgtctggaaacaaagtacacaaacctggctacggtgatgagttagcttctgcttactacctgtgacaacccaagtgggtgacactagtgaaccttctccagtctgcaggctggcatagaaggctcttagattatattgggcagcttgcaatctgccgaagcagtgacttgcatttccacacttggcttgagcactcaacccagaaggcgaagatagcttttggttgtaggcggcttcctgtatgggatatccctcggtaagggtaaaggagcagaggcaaaggagaaaagcagaagttgcagctgatgcaggtatcctatgcccttgatggatgagactaaaataaaatttttgaagttaagatttaaaattctcaa

SEQ ID NO: 73492 - DNA, 3179 bp, Homo sapiens
aattcgcggccgcgtcgacacggtgcgagaagacgacagaaggggagtttggtcgttcgttgggcggtgctggtttttcgctcgtcgactgcggctcttcctcgggcagcggaagcggcgcggcggtcggagaagtggcctaaaacttcggcgttgggtaggcgttcgtaggtttacccgcggcttcaggttctgccaaccgttggcgccgcgcgccgcggccgttgggagccgagcggcgggggctgctcgggccgctggcgtcgggtcgggtatggggccgggaggtttccccttggggctttgttccggaactgtgtccccgccttttcccggcggtgattcagaggtcccgacgccgggttccgggcagtcgggcctccgcccgtcgaggaagggaagtgactcctccccgcgctccccctcccgggggaggctgccgctcctcgcagcctgagtcattaggggagggggaggaggttggcggccctcggccatctgctgccgcgaggtggggcgcggggaggcgggaggcccggcggtggggccaggatctgttcctccccccgcagccctggggggcggcccgggtgagcgcggcggccttatcttcggggcgtctttcttaggtgaaagaaaatggcccgaaccaagcagactgctcgtaagtccaccggtgggaaagccccccgcaaacagctggccacgaaagccgccaggaaaagcgctccctctaccggcggggtgaagaagcctcatcgctacaggcccgggaccgtggcgcttcgagagattcgtcgttatcagaagtcgaccgagctgctcatccggaagctgcccttccagaggttggtgagggagatcgcgcaggatttcaaaaccgacctgaggtttcagagcgcagccatcggtgcgctgcaggaggctagcgaagcgtacctggtgggtctgttcgaagataccaacctgtgtgccatccacgctaagagagtcaccatcatgcccaaagacatccagttggctcgccggatacggggagagagagcttaagtgaaggcagtttttatggcgttttgtagtaaattctgtaaaatactttggtttaatttgtgactttttttgtaagaaattgtttataatatgttgcatttgtacttaagtcattccatctttcactcaggatgaatgcgaaaagtgactgttcacagacctcagtgatgtgagcactgttgctcaggagtgacaagttgctaatatgcagaagggatgggtgatacttcttgcttctcatgatgcatgtttctgtatgttaatgacttgttgggtagctattaaggtactagagttgataaatgtgtacagggtccttttgcaataaaactggttatgacttgatccaagtgtttaacaattggggctgttaagtctgaccatacatcactgtgatagaatgtgggctttttcaagggtgaagatacaagtcttaaccacagtgtaacttacagtttcctttaaaaaaaaaaaaagtaaacctggcagctatagaatacactatgtgcatttataatagctattttatatattgtagtatcaacatttttaaattaaatgttttacattcacaagtggtggggagtcttgtcattaaggtgtgtgtaatttagagtccagttggttttcttctgactgcacttgttctcatagtagtaaaatgctatgcgcatttataccttgcataagtcctcattctaccacatgttaaccctctagctgataatgcaaacactaactgggggattttatttataagggctctagaaaaaactgcagcttttcattgtgttgtgtggttggtctcataactaggttgagtttttctcctctgctgaggaaacagtaccgaagttctttttcttgtggcatttgtattataaaaacttggtgtgggggaggagcacaaaactccagcccactgaacctctgccaattaagatggtgttgggttaggttacatctggttactgtcctgggaaaatcatttttatagagatggccttccaagtggttttaaaatttactgaagtttttaggtcaattatgtatgttgactaaatttacaaataaacttgtttatccaaaaaagtgtccaaaacctaaattgaatgtactaagttttcacatgtcccattatctaggtccttgtatactaatgttttgaacttagatcatttcaggtgttgtttggtggataaaggaaccttttatttataaagatactgtagaaagcatgtgaacagctctctgcttgattaagatgccataatagtgctgtatttgcagtgtgggctaagacaaagtatattaataagcttttcagcccccccactcccgttccgtagtgtagaagcccacaggtgtagaactcagtcttaaacttcagtatgaaaccagtttccttgtgcgatgatggccactaaagcatagtacgtggatgtcagtgagacagcatgagagccagcagtcatcaaagcgttccacgtttgaagttagcaactgcttaaagttatgccctattaaaattgctttctcaaaagtttgggttagtttcaaatgtgatattttggagggaaggtaaagtaggtatctttcaggtcgtgataatgagctcctatgaaagaatgcaatataatgacccgcttttctagaaagttcataatcagctctggaacaagcacacttgattcctcactgtgcttcagaatgagattaagatcagatgttggaacgtgctatgctgtagcgtgtctggaaacaaagtacacaaacctggctacggtgatgagttagcttctgcttactacctgtgacaacccaagtgggtgacactagtgaaccttctccagtctgcaggctggcatagaaggctcttagattatattgggcagcttgcaatctgccgaagcagtgacttgcatttccacacttggcttgagcactcaacccagaaggcgaagatagcttttggttgtaggcggcttcctgtatgggatatccctcggtaagggtaaaggagcagaggcaaaggagaaaagcagaagttgcagctgatgcaggtatcctatgcccttgatggatgagactaaaataaaatttttgaagttaagatttaaaattctcaa

SEQ ID NO: 73493 - DNA, 2130 bp, Homo sapiens
aattcgcggccgcgtcgacacggtgcgagaagacgacagaaggggagtttggtcgttcgttgggcggtgctggtttttcgctcgtcgactgcggctcttcctcgggcagcggaagcggcgcggcggtcggagaagtggcctaaaacttcggcgttgggtaggcgttcgtaggtttacccgcggcttcaggttctgccaaccgttggcgccgcgcgccgcggccgttgggagccgagcggcgggggctgctcgggccgctggcgtcgggtcgggtatggggccgggaggtttccccttggggctttgttccggaactgtgtccccgccttttcccggcggtgattcagaggtcccgacgccgggttccgggcagtcgggcctccgcccgtcgaggaagggaagtgactcctccccgcgctccccctcccgggggaggctgccgctcctcgcagcctgagtcattaggggagggggaggaggttggcggccctcggccatctgctgccgcgaggtggggcgcggggaggcgggaggcccggcggtggggccaggatctgttcctccccccgcagccctggggggcggcccgggtgagcgcggcggccttatcttcggggcgtctttcttaggtgaaagaaaatggcccgaaccaagcagactgctcgtaagtccaccggtgggaaagccccccgcaaacagctggccacgaaagccgccaggaaaagcgctccctctaccggcggggtgaagaagcctcatcgctacaggcccgggaccgtggcgcttcgagagattcgtcgttatcagaagtcgaccgagctgctcatccggaagctgcccttccagaggttggtgagggagatcgcgcaggatttcaaaaccgacctgaggtttcagagcgcagccatcggtgcgctgcaggaggctagcgaagcgtacctggtgggtctgttcgaagataccaacctgtgtgccatccacgctaagagagtcaccatcatgcccaaagacatccagttggctcgccggatacggggagagagagcttaagtgaaggcagtttttatggcgttttgtagtaaattctgtaaaatactttggtttaatttgtgactttttttgtaagaaattgtttataatatgttgcatttgtacttaagtcattccatctttcactcaggatgaatgcgaaaagtgactgttcacagacctcagtgatgtgagcactgttgctcaggagtgacaagttgctaatatgcagaagggatgggtgatacttcttgcttctcatgatgcatgtttctgtatgttaatgacttgttgggtagctattaaggtactagagttgataaatgtgtacagggtccttttgcaataaaactggttatgacttgatccaagtgtttaacaattggggctgttaagtctgaccatacatcactgtgatagaatgtgggctttttcaagggtgaagatacaagtcttaaccacagtgtaacttacagtttcctttaaatatatattgtagtatcaacatttttaaattaaatgttttacattcacaagtggtggggagtcttgtcattaaggtgtgtgtaatttagagtccagttggttttcttctgactgcacttgttctcatagtagtaaaatgctatgcgcatttataccttgcataagtcctcattctaccacatgttaaccctctagctgataatgcaaacactaactgggggattttatttataagggctctagaaaaaacgagttattcacaccagcatcatcttaactaacattctgaactagttagtgcagcttttcattgtgttgtgtggttggtctcataactaggttgagtttttctcctctgctgaggaaacagtaccgaagttctttttcttgtggcatttgtattataaaaacttggtgtgggggaggagcacaaaactccagcccactgaacctctgccaattaagatggtgttgggttaggttacatctggttactgtcctgggaaaatcatttttatagagatggccttccaagtggttttaaaatttactgaagtttttaggtcaattatgtatgttgactaaatttacaaataaacttgtttatccaaaaaa

SEQ ID NO: 73494 - DNA, 2502 bp, Homo sapiens
aattcgcggccgcgtcgacacggtgcgagaagacgacagaaggggagtttggtcgttcgttgggcggtgctggtttttcgctcgtcgactgcggctcttcctcgggcagcggaagcggcgcggcggtcggagaagtggcctaaaacttcggcgttgggtaggcgttcgtaggtttacccgcggcttcaggttctgccaaccgttggcgccgcgcgccgcggccgttgggagccgagcggcgggggctgctcgggccgctggcgtcgggtcgggtatggggccgggaggtttccccttggggctttgttccggaactgtgtccccgccttttcccggcggtgattcagaggtcccgacgccgggttccgggcagtcgggcctccgcccgtcgaggaagggaagtgactcctccccgcgctccccctcccgggggaggctgccgctcctcgcagcctgagtcattaggggagggggaggaggttggcggccctcggccatctgctgccgcgaggtggggcgcggggaggcgggaggcccggcggtggggccaggatctgttcctccccccgcagccctggggggcggcccgggtgagcgcggcggccttatcttcggggcgtctttcttaggtgaaagaaaatggcccgaaccaagcagactgctcgtaagtccaccggtgggaaagccccccgcaaacagctggccacgaaagccgccaggaaaagcgctccctctaccggcggggtgaagaagcctcatcgctacaggcccgggaccgtggcgcttcgagagattcgtcgttatcagaagtcgaccgagctgctcatccggaagctgcccttccagaggttggtgagggagatcgcgcaggatttcaaaaccgacctgaggtttcagagcgcagccatcggtgcgctgcaggaggctagcgaagcgtacctggtgggtctgttcgaagataccaacctgtgtgccatccacgctaagagagtcaccatcatgcccaaagacatccagttggctcgccggatacggggagagagagcttaagtgaaggcagtttttatggcgttttgtagtaaattctgtaaaatactttggtttaatttgtgactttttttgtaagaaattgtttataatatgttgcatttgtacttaagtcattccatctttcactcaggatgaatgcgaaaagtgactgttcacagacctcagtgatgtgagcactgttgctcaggagtgacaagttgctaatatgcagaagggatgggtgatacttcttgcttctcatgatgcatgtttctgtatgttaatgacttgttgggtagctattaaggtactagagttgataaatgtgtacagggtccttttgcaataaaactggttatgacttgatccaagtgtttaacaattggggctgttaagtctgaccatacatcactgtgatagaatgtgggctttttcaagggtgaagatacaagtcttaaccacagtgtaacttacagtttcctttaaaaaaaaaaaaagtaaacctggcagctatagaatacactatgtgcatttataatagctattttatatattgtagtatcaacatttttaaattaaatgttttacattcacaagtggtggggagtcttgtcattaaggtgtgtgtaatttagagtccagttggttttcttctgactgcacttgttctcatagtagtaaaatgctatgcgcatttataccttgcataagtcctcattctaccacatgttaaccctctagctgataatgcaaacactaactgggggattttatttataagggctctagaaaaaacgagttattcacaccagcatcatcttaactaacattctgaactagttagtgcagcttttcattgtgttgtgtggttggtctcataactaggttgagtttttctcctctgctgaggaaacagtaccgaagttctttttcttgtggcatttgtattataaaaacttggtgtgggggaggagcacaaaactccagcccactgaacctctgccaattaagatggtgttgggttaggttacatctggttactgtcctgggaaaatcatttttatagagatggccttccaagtggttttaaaatttactgaagtttttaggtcaattatgtatgttgactaaatttacaaataaacttgtttatccaaaaaaacccataaattaaagaaattatttgtataaaccaaaataaagaaactcctccttaacaaaaaaaaaaaaatatgtaaaaaatcttgggggcccgtttggcccaattcttcttatgactggagcaattttttcctgccgcccccaatttgggcttattttgcccatttgccctttatgggggccgattacaattccacgggccggtttttataacacgtgggacctggaaaacccctgggggtaccccaccttaaatccctttgacctccaacgtgtgcccaccctaatgggaaatggaaatttaacagttaa

SEQ ID NO: 73495 - DNA, 3033 bp, Homo sapiens
aattcgcggccgcgtcgacacggtgcgagaagacgacagaaggggagtttggtcgttcgttgggcggtgctggtttttcgctcgtcgactgcggctcttcctcgggcagcggaagcggcgcggcggtcggagaagtggcctaaaacttcggcgttgggtaggcgttcgtaggtttacccgcggcttcaggttctgccaaccgttggcgccgcgcgccgcggccgttgggagccgagcggcgggggctgctcgggccgctggcgtcgggtcgggtatggggccgggaggtttccccttggggctttgttccggaactgtgtccccgccttttcccggcggtgattcagaggtcccgacgccgggttccgggcagtcgggcctccgcccgtcgaggaagggaagtgactcctccccgcgctccccctcccgggggaggctgccgctcctcgcagcctgagtcattaggggagggggaggaggttggcggccctcggccatctgctgccgcgaggtggggcgcggggaggcgggaggcccggcggtggggccaggatctgttcctccccccgcagccctggggggcggcccgggtgagcgcggcggccttatcttcggggcgtctttcttaggtgaaagaaaatggcccgaaccaagcagactgctcgtaagtccaccggtgggaaagccccccgcaaacagctggccacgaaagccgccaggaaaagcgctccctctaccggcggggtgaagaagcctcatcgctacaggcccgggaccgtggcgcttcgagagattcgtcgttatcagaagtcgaccgagctgctcatccggaagctgcccttccagaggttggtgagggagatcgcgcaggatttcaaaaccgacctgaggtttcagagcgcagccatcggtgcgctgcaggaggctagcgaagcgtacctggtgggtctgttcgaagataccaacctgtgtgccatccacgctaagagagtcaccatcatgcccaaagacatccagttggctcgccggatacggggagagagagcttaagtgaaggcagtttttatggcgttttgtagtaaattctgtaaaatactttggtttaatttgtgactttttttgtaagaaattgtttataatatgttgcatttgtacttaagtcattccatctttcactcaggatgaatgcgaaaagtgactgttcacagacctcagtgatgtgagcactgttgctcaggagtgacaagttgctaatatgcagaagggatgggtgatacttcttgcttctcatgatgcatgtttctgtatgttaatgacttgttgggtagctattaaggtactagagttgataaatgtgtacagggtccttttgcaataaaactggttatgacttgatccaagtgtttaacaattggggctgttaagtctgaccatacatcactgtgatagaatgtgggctttttcaagggtgaagatacaagtcttaaccacagtgtaacttacagtttcctttaaaaaaaaaaaaagtaaacctggcagctatagaatacactatgtgcatttataatagctattttatatattgtagtatcaacatttttaaattaaatgttttacattcacaagtggtggggagtcttgtcattaaggtgtgtgtaatttagagtccagttggttttcttctgactgcacttgttctcatagtagtaaaatgctatgcgcatttataccttgcataagtcctcattctaccacatgttaaccctctagctgataatgcaaacactaactgggggattttatttataagggctctagaaaaaacgagttattcacaccagcatcatcttaactaacattctgaactagttagtgcagcttttcattgtgttgtgtggttggtctcataactaggttgagtttttctcctctgctgaggaaacagtaccgaagttctttttcttgtggcatttgtattataaaaacttggtgtgggggaggagcacaaaactccagcccactgaacctctgccaattaagatggtgttgggttaggttacatctggttactgtcctgggaaaatcatttttatagagatggccttccaagtggttttaaaatttactgaagtttttaggtcaattatgtatgttgactaaatttacaaataaacttgtttatccaaaaaagtgtccaaaacctaaattgaatgtactaagttttcacatgtcccattatctaggtccttgtatactaatgttttgaacttagatcatttcaggtgttgtttggtggataaaggaaccttttatttataaagatactgtagaaagcatgtgaacagctctctgcttgattaagatgccataatagtgctgtatttgcagtgtgggctaagacaaagtatattaataagcttttcagcccccccactcccgttccgtagtgtagaagcccacaggtgtagaactcagtcttaaacttcagtatgaaaccagtttccttgtgcgatgatggccactaaagcatagtacgtggatgtcagtgagacagcatgagagccagcagtcatcaaagcgttccacgtttgaagttagcaactgcttaaagttatgccctattaaaattgctttctcaaaagtttgggttagtttcaaatgtgatattttggagggaaggtaaagtaggtatctttcaggtcgtgataatgagctcctatgaaagaatgcaatataatgacccgcttttctagaaaattaagatcagatgttggaacgtgctatgctgtagcgtgtctggaaacaatctgccgaagcagtgacttgcatttccacacttggcttgagcactcaacccagaaggcgaagatagcttttggttgtaggcggcttcctgtatgggatatccctcggtaagggtaaaggagcagaggcaaaggagaaaagcagaagttgcagctgatgcaggtatcctatgcccttgatggatgagactaaaataaaatttttgaagttaagatttaaaattctcaa

SEQ ID NO: 73496 - DNA, 2389 bp, Homo sapiens
aattcgcggccgcgtcgacacggtgcgagaagacgacagaaggggagtttggtcgttcgttgggcggtgctggtttttcgctcgtcgactgcggctcttcctcgggcagcggaagcggcgcggcggtcggagaagtggcctaaaacttcggcgttgggtaggcgttcgtaggtttacccgcggcttcaggttctgccaaccgttggcgccgcgcgccgcggccgttgggagccgagcggcgggggctgctcgggccgctggcgtcgggtcgggtatggggccgggaggtttccccttggggctttgttccggaactgtgtccccgccttttcccggcggtgattcagaggtcccgacgccgggttccgggcagtcgggcctccgcccgtcgaggaagggaagtgactcctccccgcgctccccctcccgggggaggctgccgctcctcgcagcctgagtcattaggggagggggaggaggttggcggccctcggccatctgctgccgcgaggtggggcgcggggaggcgggaggcccggcggtggggccaggatctgttcctccccccgcagccctggggggcggcccgggtgagcgcggcggccttatcttcggggcgtctttcttaggtgaaagaaaatggcccgaaccaagcagactgctcgtaagtccaccggtgggaaagccccccgcaaacagctggccacgaaagccgccaggaaaagcgctccctctaccggcggggtgaagaagcctcatcgctacaggcccgggaccgtggcgcttcgagagattcgtcgttatcagaagtcgaccgagctgctcatccggaagctgcccttccagaggttggtgagggagatcgcgcaggatttcaaaaccgacctgaggtttcagagcgcagccatcggtgcgctgcaggaggctagcgaagcgtacctggtgggtctgttcgaagataccaacctgtgtgccatccacgctaagagagtcaccatcatgcccaaagacatccagttggctcgccggatacggggagagagagcttaagtgaaggcagtttttatggcgttttgtagtaaattctgtaaaatactttggtttaatttgtgactttttttgtaagaaattgtttataatatgttgcatttgtacttaagtcattccatctttcactcaggatgaatgcgaaaagtgactgttcacagacctcagtgatgtgagcactgttgctcaggagtgacaagttgctaatatgcagaagggatgggtgatacttcttgcttctcatgatgcatgtttctgtatgttaatgacttgttgggtagctattaaggtactagagttgataaatgtgtacagggtccttttgcaataaaactggttatgacttgatccaagtgtttaacaattggggctgttaagtctgaccatacatcactgtgatagaatgtgggctttttcaagggtgaagatacaagtcttaaccacagtgtaacttacagtttcctttaaaaaaaaaaaaagtaaacctggcagctatagaatacactatgtgcatttataatagctattttatatattgtagtatcaacatttttaaattaaatgttttacattcacaagtggtggggagtcttgtcattaaggtgtgtgtaatttagagtccagttggttttcttctgactgcacttgttctcatagtagtaaaatgctatgcgcatttataccttgcataagtcctcattctaccacatgttaaccctctagctgataatgcaaacactaactgggggattttatttataagggctctagaaaaaacgagttattcacaccagcatcatcttaactaacattctgaactagttagtgcagcttttcattgtgttgtgtggttggtctcataactaggttgagtttttctcctctgctgaggaaacagtaccgaagttctttttcttgtggcatttgtattataaaaacttggtgtgggggaggagcacaaaactccagcccactgaacctctgccaattaagatggtgttgggttaggttacatctggttactgtcctgggaaaatcatttttatagagatggccttccaagtggttttaaaatttactgaagtttttaggtcaattatgtatgttgactaaatttacaaataaacttgtttatccaaaaaaaaaaaaaaaaaaaaaaaaaaaaaaaaaaaaaaaaaaaaaaaaaaaaaaaaaaaaaaccttgtgggccgcttgggcccattcgattttaaattggaccaagtttttccttgcggccgaatttcgggttaattgggccatttggccttttggggggccgttttacatttaatgggccgtggtttaacaacgtatggattgg

SEQ ID NO: 73497 - DNA, 2192 bp, Homo sapiens
aattcgcggccgcgtcgacacggtgcgagaagacgacagaaggggagtttggtcgttcgttgggcggtgctggtttttcgctcgtcgactgcggctcttcctcgggcagcggaagcggcgcggcggtcggagaagtggcctaaaacttcggcgttgggtaggcgttcgtaggtttacccgcggcttcaggttctgccaaccgttggcgccgcgcgccgcggccgttgggagccgagcggcgggggctgctcgggccgctggcgtcgggtcgggtatggggccgggaggtttccccttggggctttgttccggaactgtgtccccgccttttcccggcggtgattcagaggtcccgacgccgggttccgggcagtcgggcctccgcccgtcgaggaagggaagtgactcctccccgcgctccccctcccgggggaggctgccgctcctcgcagcctgagtcattaggggagggggaggaggttggcggccctcggccatctgctgccgcgaggtggggcgcggggaggcgggaggcccggcggtggggccaggatctgttcctccccccgcagccctggggggcggcccgggtgagcgcggcggccttatcttcggggcgtctttcttaggtgaaagaaaatggcccgaaccaagcagactgctcgtaagtccaccggtgggaaagccccccgcaaacagctggccacgaaagccgccaggaaaagcgctccctctaccggcggggtgaagaagcctcatcgctacaggcccgggaccgtggcgcttcgagagattcgtcgttatcagaagtcgaccgagctgctcatccggaagctgcccttccagaggttggtgagggagatcgcgcaggatttcaaaaccgacctgaggtttcagagcgcagccatcggtgcgctgcaggaggctagcgaagcgtacctggtgggtctgttcgaagataccaacctgtgtgccatccacgctaagagagtcaccatcatgcccaaagacatccagttggctcgccggatacggggagagagagcttaagtgaaggcagtttttatggcgttttgtagtaaattctgtaaaatactttggtttaatttgtgactttttttgtaagaaattgtttataatatgttgcatttgtacttaagtcattccatctttcactcaggatgaatgcgaaaagtgactgttcacagacctcagtgatgtgagcactgttgctcaggagtgacaagttgctaatatgcagaagggatgggtgatacttcttgcttctcatgatgcatgtttctgtatgttaatgacttgttgggtagctattaaggtactagagttgataaatgtgtacagggtccttttgcaataaaactggttatgacttgatccaagtgtttaacaattggggctgttaagtctgaccatacatcactgtgatagaatgtgggctttttcaagggtgaagatacaagtcttaaccacagtgtaacttacagtttcctttaaaaaaaaaaaaagtaaacctggcagctatagaatacactatgtgcatttataatagctattttatatattgtagtatcaacatttttaaattaaatgttttacattcacaagtggtggggagtcttgtcattaaggtgtgtgtaatttagagtccagttggttttcttctgactgcacttgttctcatagtagtaaaatgctatgcgcatttataccttgcataagtcctcattctaccacatgttaaccctctagctgataatgcaaacactaactgggggattttatttataagggctctagaaaaaacgagttattcacaccagcatcatcttaactaacattctgaactagttagtgcagcttttcattgtgttgtgtggttggtctcataactaggttgagtttttctcctctgctgaggaaacagtaccgaagttctttttcttgtggcatttgtattataaaaacttggtgtgggggaggagcacaaaactccagcccactgaacctctgccaattaagatggtgttgggttaggttacatctggttactgtcctgggaaaatcatttttatagagatggccttccaagtggttttaaaatttactgaagtttttaggtcaattaactccgtgactaactacaatacatgtcgccttccccctccgtcccc

SEQ ID NO: 73498 - DNA, 2275 bp, Homo sapiens
aattcgcggccgcgtcgacacggtgcgagaagacgacagaaggggagtttggtcgttcgttgggcggtgctggtttttcgctcgtcgactgcggctcttcctcgggcagcggaagcggcgcggcggtcggagaagtggcctaaaacttcggcgttgggtaggcgttcgtaggtttacccgcggcttcaggttctgccaaccgttggcgccgcgcgccgcggccgttgggagccgagcggcgggggctgctcgggccgctggcgtcgggtcgggtatggggccgggaggtttccccttggggctttgttccggaactgtgtccccgccttttcccggcggtgattcagaggtcccgacgccgggttccgggcagtcgggcctccgcccgtcgaggaagggaagtgactcctccccgcgctccccctcccgggggaggctgccgctcctcgcagcctgagtcattaggggagggggaggaggttggcggccctcggccatctgctgccgcgaggtggggcgcggggaggcgggaggcccggcggtggggccaggatctgttcctccccccgcagccctggggggcggcccgggtgagcgcggcggccttatcttcggggcgtctttcttaggtgaaagaaaatggcccgaaccaagcagactgctcgtaagtccaccggtgggaaagccccccgcaaacagctggccacgaaagccgccaggaaaagcgctccctctaccggcggggtgaagaagcctcatcgctacaggcccgggaccgtggcgcttcgagagattcgtcgttatcagaagtcgaccgagctgctcatccggaagctgcccttccagaggttggtgagggagatcgcgcaggatttcaaaaccgacctgaggtttcagagcgcagccatcggtgcgctgcaggtaagacaaaggcctggagccgggggagggctgggcggtttccgctccccgagtgggattaatagtgcggctctcgtcctcaacagaggctagcgaagcgtacctggtgggtctgttcgaagataccaacctgtgtgccatccacgctaagagagtcaccatcatgcccaaagacatccagttggctcgccggatacggggagagagagcttaagtgaaggcagtttttatggcgttttgtagtaaattctgtaaaatactttggtttaatttgtgactttttttgtaagaaattgtttataatatgttgcatttgtacttaagtcattccatctttcactcaggatgaatgcgaaaagtgactgttcacagacctcagtgatgtgagcactgttgctcaggagtgacaagttgctaatatgcagaagggatgggtgatacttcttgcttctcatgatgcatgtttctgtatgttaatgacttgttgggtagctattaaggtactagagttgataaatgtgtacagggtccttttgcaataaaactggttatgacttgatccaagtgtttaacaattggggctgttaagtctgaccatacatcactgtgatagaatgtgggctttttcaagggtgaagatacaagtcttaaccacagtgtaacttacagtttcctttaaaaaaaaaaaaagtaaacctggcagctatagaatacactatgtgcatttataatagctattttatatattgtagtatcaacatttttaaattaaatgttttacattcacaagtggtggggagtcttgtcattaaggtgtgtgtaatttagagtccagttggttttcttctgactgcacttgttctcatagtagtaaaatgctatgcgcatttataccttgcataagtcctcattctaccacatgttaaccctctagctgataatgcaaacactaactgggggattttatttataagggctctagaaaaaacgagttattcacaccagcatcatcttaactaacattctgaactagttagtgcagcttttcattgtgttgtgtggttggtctcataactaggttgagtttttctcctctgctgaggaaacagtaccgaagttctttttcttgtggcatttgtattataaaaacttggtgtgggggaggagcacaaaactccagcccactgaacctctgccaattaagatggtgttgggttaggttacatctggttactgtcctgggaaaatcatttttatagagatggccttccaagtggttttaaaatttactgaagtttttaggtcaattatgtatgttgactaaatttacaaataaacttgtttatccaaaaaa

SEQ ID NO: 73499 - DNA, 2358 bp, Homo sapiens
aattcgcggccgcgtcgacacggtgcgagaagacgacagaaggggagtttggtcgttcgttgggcggtgctggtttttcgctcgtcgactgcggctcttcctcgggcagcggaagcggcgcggcggtcggagaagtggcctaaaacttcggcgttgggtaggcgttcgtaggtttacccgcggcttcaggttctgccaaccgttggcgccgcgcgccgcggccgttgggagccgagcggcgggggctgctcgggccgctggcgtcgggtcgggtatggggccgggaggtttccccttggggctttgttccggaactgtgtccccgccttttcccggcggtgattcagaggtcccgacgccgggttccgggcagtcgggcctccgcccgtcgaggaagggaagtgactcctccccgcgctccccctcccgggggaggctgccgctcctcgcagcctgagtcattaggggagggggaggaggttggcggccctcggccatctgctgccgcgaggtggggcgcggggaggcgggaggcccggcggtggggccaggatctgttcctccccccgcagccctggggggcggcccgggtgagcgcggcggccttatcttcggggcgtctttcttaggtgaaagaaaatggcccgaaccaagcagactgctcgtaagtccaccggtgggaaagccccccgcaaacagctggccacgaaagccgccaggaaaagcgctccctctaccggcggggtgaagaagcctcatcgctacaggtaggtcgggcgggggaacaatggcccggcggtggccggctttgtgcggcagcgtccgctcactcctcccctgctcgctgcaggcccgggaccgtggcgcttcgagagattcgtcgttatcagaagtcgaccgagctgctcatccggaagctgcccttccagaggttggtgagggagatcgcgcaggatttcaaaaccgacctgaggtttcagagcgcagccatcggtgcgctgcaggtaagacaaaggcctggagccgggggagggctgggcggtttccgctccccgagtgggattaatagtgcggctctcgtcctcaacagaggctagcgaagcgtacctggtgggtctgttcgaagataccaacctgtgtgccatccacgctaagagagtcaccatcatgcccaaagacatccagttggctcgccggatacggggagagagagcttaagtgaaggcagtttttatggcgttttgtagtaaattctgtaaaatactttggtttaatttgtgactttttttgtaagaaattgtttataatatgttgcatttgtacttaagtcattccatctttcactcaggatgaatgcgaaaagtgactgttcacagacctcagtgatgtgagcactgttgctcaggagtgacaagttgctaatatgcagaagggatgggtgatacttcttgcttctcatgatgcatgtttctgtatgttaatgacttgttgggtagctattaaggtactagagttgataaatgtgtacagggtccttttgcaataaaactggttatgacttgatccaagtgtttaacaattggggctgttaagtctgaccatacatcactgtgatagaatgtgggctttttcaagggtgaagatacaagtcttaaccacagtgtaacttacagtttcctttaaaaaaaaaaaaagtaaacctggcagctatagaatacactatgtgcatttataatagctattttatatattgtagtatcaacatttttaaattaaatgttttacattcacaagtggtggggagtcttgtcattaaggtgtgtgtaatttagagtccagttggttttcttctgactgcacttgttctcatagtagtaaaatgctatgcgcatttataccttgcataagtcctcattctaccacatgttaaccctctagctgataatgcaaacactaactgggggattttatttataagggctctagaaaaaacgagttattcacaccagcatcatcttaactaacattctgaactagttagtgcagcttttcattgtgttgtgtggttggtctcataactaggttgagtttttctcctctgctgaggaaacagtaccgaagttctttttcttgtggcatttgtattataaaaacttggtgtgggggaggagcacaaaactccagcccactgaacctctgccaattaagatggtgttgggttaggttacatctggttactgtcctgggaaaatcatttttatagagatggccttccaagtggttttaaaatttactgaagtttttaggtcaattatgtatgttgactaaatttacaaataaacttgtttatccaaaaaa

SEQ ID NO: 73500 - DNA, 2204 bp, Homo sapiens
aattcgcggccgcgtcgacacggtgcgagaagacgacagaaggggagtttggtcgttcgttgggcggtgctggtttttcgctcgtcgactgcggctcttcctcgggcagcggaagcggcgcggcggtcggagaagtggcctaaaacttcggcgttgggtaggcgttcgtaggtttacccgcggcttcaggttctgccaaccgttggcgccgcgcgccgcggccgttgggagccgagcggcgggggctgctcgggccgctggcgtcgggtcgggtatggggccgggaggtttccccttggggctttgttccggaactgtgtccccgccttttcccggcggtgattcagaggtcccgacgccgggttccgggcagtcgggcctccgcccgtcgaggaagggaagtgactcctccccgcgctccccctcccgggggaggctgccgctcctcgcagcctgagtcattaggggagggggaggaggttggcggccctcggccatctgctgccgcgaggtggggcgcggggaggcgggaggcccggcggtggggccaggatctgttcctccccccgcagccctggggggcggcccgggtgagcgcggcggccttatcttcggggcgtctttcttaggtgaaagaaaatggcccgaaccaagcagactgctcgtaagtccaccggtgggaaagccccccgcaaacagctggccacgaaagccgccaggaaaagcgctccctctaccggcggggtgaagaagcctcatcgctacaggcccgggaccgtggcgcttcgagagattcgtcgttatcagaagtcgaccgagctgctcatccggaagctgcccttccagaggttggtgagggagatcgcgcaggatttcaaaaccgacctgaggtttcagagcgcagccatcggtgcgctgcaggaggctagcgaagcgtacctggtgggtctgttcgaagataccaacctgtgtgccatccacgctaagagagtcaccatcatgcccaaagacatccagttggctcgccggatacggggagagagagcttaagtgaaggcagtttttatggcgttttgtagtaaattctgtaaaatactttggtttaatttgtgactttttttgtaagaaattgtttataatatgttgcatttgtacttaagtcattccatctttcactcaggatgaatgcgaaaagtgactgttcacagacctcagtgatgtgagcactgttgctcaggagtgacaagttgctaatatgcagaagggatgggtgatacttcttgcttctcatgatgcatgtttctgtatgttaatgacttgttgggtagctattaaggtactagagttgataaatgtgtacagggtccttttgcaataaaactggttatgacttgatccaagtgtttaacaattggggctgttaagtctgaccatacatcactgtgatagaatgtgggctttttcaagggtgaagatacaagtcttaaccacagtgtaacttacagtttcctttaaaaaaaaaaaaagtaaacctggcagctatagaatacactatgtgcatttataatagctattttatatattgtagtatcaacatttttaaattaaatgttttacattcacaagtggtggggagtcttgtcattaaggtgtgtgtaatttagagtccagttggttttcttctgactgcacttgttctcatagtagtaaaatgctatgcgcatttataccttgcataagtcctcattctaccacatgttaaccctctagctgataatgcaaacactaactgggggattttatttataagggctctagaaaaaacgagttattcacaccagcatcatcttaactaacattctgaactagttagtgcagcttttcattgtgttgtgtggttggtctcataactaggttgagtttttctcctctgctgaggaaacagtaccgaagttctttttcttgtggcatttgtattataaaaacttggtgtgggggaggagcacaaaactccagcccactgaacctctgccaattaagatggtgttgggttaggtctacctgggttagggcataccgtggtgctttacacattgtcaactctactcagctcttctgcccctggaatgacctgtcccccagtatgtgcctaactccagatctttttttctattttttatttttatttgagacaggtcatcgct

SEQ ID NO: 73501 - DNA, 1951 bp, Homo sapiens
aattcgcggccgcgtcgacacggtgcgagaagacgacagaaggggagtttggtcgttcgttgggcggtgctggtttttcgctcgtcgactgcggctcttcctcgggcagcggaagcggcgcggcggtcggagaagtggcctaaaacttcggcgttgggtaggcgttcgtaggtttacccgcggcttcaggttctgccaaccgttggcgccgcgcgccgcggccgttgggagccgagcggcgggggctgctcgggccgctggcgtcgggtcgggtatggggccgggaggtttccccttggggctttgttccggaactgtgtccccgccttttcccggcggtgattcagaggtcccgacgccgggttccgggcagtcgggcctccgcccgtcgaggaagggaagtgactcctccccgcgctccccctcccgggggaggctgccgctcctcgcagcctgagtcattaggggagggggaggaggttggcggccctcggccatctgctgccgcgaggtggggcgcggggaggcgggaggcccggcggtggggccaggatctgttcctccccccgcagccctggggggcggcccgggtgagcgcggcggccttatcttcggggcgtctttcttaggtgaaagaaaatggcccgaaccaagcagactgctcgtaagtccaccggtgggaaagccccccgcaaacagctggccacgaaagccgccaggaaaagcgctccctctaccggcggggtgaagaagcctcatcgctacaggcccgggaccgtggcgcttcgagagattcgtcgttatcagaagtcgaccgagctgctcatccggaagctgcccttccagaggttggtgagggagatcgcgcaggatttcaaaaccgacctgaggtttcagagcgcagccatcggtgcgctgcaggaggctagcgaagcgtacctggtgggtctgttcgaagataccaacctgtgtgccatccacgctaagagagtcaccatcatgcccaaagacatccagttggctcgccggatacggggagagagagcttaagtgaaggcagtttttatggcgttttgtagtaaattctgtaaaatactttggtttaatttgtgactttttttgtaagaaattgtttataatatgttgcatttgtacttaagtcattccatctttcactcaggatgaatgcgaaaagtgactgttcacagacctcagtgatgtgagcactgttgctcaggagtgacaagttgctaatatgcagaagggatgggtgatacttcttgcttctcatgatgcatgtttctgtatgttaatgacttgttgggtagctattaaggtactagagttgataaatgtgtacagggtccttttgcaataaaactggttatgacttgatccaagtgtttaacaattggggctgttaagtctgaccatacatcactgtgatagaatgtgggctttttcaagggtgaagatacaagtcttaaccacagtgtaacttacagtttcctttaaaaaaaaaaaaagtaaacctggcagctatagaatacactatgtgcatttataatagctattttatatattgtagtatcaacatttttaaattaaatgttttacattcacaagtggtggggagtcttgtcattaaggtgtgtgtaatttagagtccagttggttttcttctgactgcacttgttctcatagtagtaaaatgctatgcgcatttataccttgcataagtcctcattctaccacatgttaaccctctagctgataatgcaaacactaactgggggattttatttataagggctctagaaaaaacgagttattcacaccagcatcatcttaactaacattctgaactagttagtgcagcttttcattgtgttgtgtggttggtctacctgggttaggtctacctgggttaggtctagttaggtctacctgg

SEQ ID NO: 73502 - DNA, 1580 bp, Homo sapiens
aattcgcggccgcgtcgacacggtgcgagaagacgacagaaggggagtttggtcgttcgttgggcggtgctggtttttcgctcgtcgactgcggctcttcctcgggcagcggaagcggcgcggcggtcggagaagtggcctaaaacttcggcgttgggtaggcgttcgtaggtttacccgcggcttcaggttctgccaaccgttggcgccgcgcgccgcggccgttgggagccgagcggcgggggctgctcgggccgctggcgtcgggtcgggtatggggccgggaggtttccccttggggctttgttccggaactgtgtccccgccttttcccggcggtgattcagaggtcccgacgccgggttccgggcagtcgggcctccgcccgtcgaggaagggaagtgactcctccccgcgctccccctcccgggggaggctgccgctcctcgcagcctgagtcattaggggagggggaggaggttggcggccctcggccatctgctgccgcgaggtggggcgcggggaggcgggaggcccggcggtggggccaggatctgttcctccccccgcagccctggggggcggcccgggtgagcgcggcggccttatcttcggggcgtctttcttaggtgaaagaaaatggcccgaaccaagcagactgctcgtaagtccaccggtgggaaagccccccgcaaacagctggccacgaaagccgccaggaaaagcgctccctctaccggcggggtgaagaagcctcatcgctacaggcccgggaccgtggcgcttcgagagattcgtcgttatcagaagtcgaccgagctgctcatccggaagctgcccttccagaggttggtgagggagatcgcgcaggatttcaaaaccgacctgaggtttcagagcgcagccatcggtgcgctgcaggaggctagcgaagcgtacctggtgggtctgttcgaagataccaacctgtgtgccatccacgctaagagagtcaccatcatgcccaaagacatccagttggctcgccggatacggggagagagagcttaagtgaaggcagtttttatggcgttttgtagtaaattctgtaaaatactttggtttaatttgtgactttttttgtaagaaattgtttataatatgttgcatttgtacttaagtcattccatctttcactcaggatgaatgcgaaaagtgactgttcacagacctcagtgatgtgagcactgttgctcaggagtgacaagttgctaatatgcagaagggatgggtgatacttcttgcttctcatgatgcatgtttctgtatgttaatgacttgttgggtagctattaaggtactagagttgataaatgtgtacagggtccttttgcaataaaactggttatgacttgatccaagtgtttaacaattggggctgttaagtctgaccatacatcactgtgatagaatgtgggctttttcaagggtgaagatacaagtcttaaccacagtgtaacttacagtttcctttaaaggaccctgtacacatttatcaactctagtaccttaatagctacccaacaagtcattaacataca

SEQ ID NO: 73503 - DNA, 2126 bp, Homo sapiens
aattcgcggccgcgtcgacacggtgcgagaagacgacagaaggggagtttggtcgttcgttgggcggtgctggtttttcgctcgtcgactgcggctcttcctcgggcagcggaagcggcgcggcggtcggagaagtggcctaaaacttcggcgttgggtaggcgttcgtaggtttacccgcggcttcaggttctgccaaccgttggcgccgcgcgccgcggccgttgggagccgagcggcgggggctgctcgggccgctggcgtcgggtcgggtatggggccgggaggtttccccttggggctttgttccggaactgtgtccccgccttttcccggcggtgattcagaggtcccgacgccgggttccgggcagtcgggcctccgcccgtcgaggaagggaagtgactcctccccgcgctccccctcccgggggaggctgccgctcctcgcagcctgagtcattaggggagggggaggaggttggcggccctcggccatctgctgccgcgaggtggggcgcggggaggcgggaggcccggcggtggggccaggatctgttcctccccccgcagccctggggggcggcccgggtgagcgcggcggccttatcttcggggcgtctttcttaggtgaaagaaaatggcccgaaccaagcagactgctcgtaagtccaccggtgggaaagccccccgcaaacagctggccacgaaagccgccaggaaaagcgctccctctaccggcggggtgaagaagcctcatcgctacaggcccgggaccgtggcgcttcgagagattcgtcgttatcagaagtcgaccgagctgctcatccggaagctgcccttccagaggttggtgagggagatcgcgcaggatttcaaaaccgacctgaggtttcagagcgcagccatcggtgcgctgcaggaggctagcgaagcgtacctggtgggtctgttcgaagataccaacctgtgtgccatccacgctaagagagtcaccatcatgcccaaagacatccagttggctcgccggatacggggagagagagcttaagtgaaggcagtttttatggcgttttgtagtaaattctgtaaaatactttggtttaatttgtgactttttttgtaagaaattgtttataatatgttgcatttgtacttaagtcattccatctttcactcaggatgaatgcgaaaagtgactgttcacagacctcagtgatgtgagcactgttgctcaggagtgacaagttgctaatatgcagaagggatgggtgatacttcttgcttctcatgatgcatgtttctgtatgttaatgacttgttgggtagctattaaggtactagagttgataaatgtgtacagggtccttttgcaaactgtgatagaatgtgggctttttcaagggtgaagatacaagtcttaaccacagtgtaacttacagtttcctttaaaaaaaaaaaaagtaaacctggcagctatagaatacactatgtgcatttataatagctattttatatattgtagtatcaacatttttaaattaaatgttttacattcacaagtggtggggagtcttgtcattaaggtgtgtgtaatttagagtccagttggttttcttctgactgcacttgttctcatagtagtaaaatgctatgcgcatttataccttgcataagtcctcattctaccacatgttaaccctctagctgataatgcaaacactaactgggggattttatttataagggctctagaaaaaacgagttattcacaccagcatcatcttaactaacattctgaactagttagtgcagcttttcattgtgttgtgtggttggtctcataactaggttgagtttttctcctctgctgaggaaacagtaccgaagttctttttcttgtggcatttgtattataaaaacttggtgtgggggaggagcacaaaactccagcccactgaacctctgccaattaagatggtgttgggttaggttacatctggttactgtcctgggaaaatcatttttatagagatggccttccaagtggttttaaaatttactgaagtttttaggtcaattatgtatgttgactaaatttacaaataaacttgtttatccaaaaaa

SEQ ID NO: 73504 - DNA, 2109 bp, Homo sapiens
aattcgcggccgcgtcgacacggtgcgagaagacgacagaaggggagtttggtcgttcgttgggcggtgctggtttttcgctcgtcgactgcggctcttcctcgggcagcggaagcggcgcggcggtcggagaagtggcctaaaacttcggcgttgggtaggcgttcgtaggtttacccgcggcttcaggttctgccaaccgttggcgccgcgcgccgcggccgttgggagccgagcggcgggggctgctcgggccgctggcgtcgggtcgggtatggggccgggaggtttccccttggggctttgttccggaactgtgtccccgccttttcccggcggtgattcagaggtcccgacgccgggttccgggcagtcgggcctccgcccgtcgaggaagggaagtgactcctccccgcgctccccctcccgggggaggctgccgctcctcgcagcctgagtcattaggggagggggaggaggttggcggccctcggccatctgctgccgcgaggtggggcgcggggaggcgggaggcccggcggtggggccaggatctgttcctccccccgcagccctggggggcggcccgggtgagcgcggcggccttatcttcggggcgtctttcttaggtgaaagaaaatggcccgaaccaagcagactgctcgtaagtccaccggtgggaaagccccccgcaaacagctggccacgaaagccgccaggaaaagcgctccctctaccggcggggtgaagaagcctcatcgctacaggcccgggaccgtggcgcttcgagagattcgtcgttatcagaagtcgaccgagctgctcatccggaagctgcccttccagaggttggtgagggagatcgcgcaggatttcaaaaccgacctgaggtttcagagcgcagccatcggtgcgctgcaggaggctagcgaagcgtacctggtgggtctgttcgaagataccaacctgtgtgccatccacgctaagagagtcaccatcatgcccaaagacatccagttggctcgccggatacggggagagagagcttaagtgaaggcagtttttatggcgttttgtagtaaattctgtaaaatactttggtttaatttgtgactttttttgtaagaaattgtttataatatgttgcatttgtacttaagtcattccatctttcactcaggatgaatgcgaaaagtgactgttcacagacctcagtgatgtgagcactgttgctcaggagtgacaagttgctaatatgcagaagggatgggtgatacttcttgcttctcatgatgcatgtttctgtatgttaatgacttgttgggtagctattaaggtactagagttgataaatgtgtacagggtccttttgcaaaaaaaacaaaaacacaaacaaaccacaaaaaaaaaaaaaaaaaaaaaaaaaaaaaaaaaaaaaaaaaaaagtaaacctggcagctatagaatacactatgtgcatttataatagctattttatatattgtagtatcaacatttttaaattaaatgttttacattcacaagtggtggggagtcttgtcattaaggtgtgtgtaatttagagtccagttggttttcttctgactgcacttgttctcatagtagtaaaatgctatgcgcatttataccttgcataagtcctcattctaccacatgttaaccctctagctgataatgcaaacactaactgggggattttatttataagggctctagaaaaaacgagttattcacaccagcatcatcttaactaacattctgaactagttagtgcagcttttcattgtgttgtgtggttggtctcataactaggttgagtttttctcctctgctgaggaaacagtaccgaagttctttttcttgtggcatttgtattataaaaacttggtgtgggggaggagcacaaaactccagcccactgaacctctgccaattaagatggtgttgggttaggttacatctggttactgtcctgggaaaatcatttttatagagatggccttccaagtggttttaaaatttactgaagtttttaggtcaattatgtatgttgactaaatttacaaataaacttgtttatccaaaaaa

SEQ ID NO: 73505 - DNA, 1955 bp, Homo sapiens
aattcgcggccgcgtcgacacggtgcgagaagacgacagaaggggagtttggtcgttcgttgggcggtgctggtttttcgctcgtcgactgcggctcttcctcgggcagcggaagcggcgcggcggtcggagaagtggcctaaaacttcggcgttgggtaggcgttcgtaggtttacccgcggcttcaggttctgccaaccgttggcgccgcgcgccgcggccgttgggagccgagcggcgggggctgctcgggccgctggcgtcgggtcgggtatggggccgggaggtttccccttggggctttgttccggaactgtgtccccgccttttcccggcggtgattcagaggtcccgacgccgggttccgggcagtcgggcctccgcccgtcgaggaagggaagtgactcctccccgcgctccccctcccgggggaggctgccgctcctcgcagcctgagtcattaggggagggggaggaggttggcggccctcggccatctgctgccgcgaggtggggcgcggggaggcgggaggcccggcggtggggccaggatctgttcctccccccgcagccctggggggcggcccgggtgagcgcggcggccttatcttcggggcgtctttcttaggtgaaagaaaatggcccgaaccaagcagactgctcgtaagtccaccggtgggaaagccccccgcaaacagctggccacgaaagccgccaggaaaagcgctccctctaccggcggggtgaagaagcctcatcgctacaggcccgggaccgtggcgcttcgagagattcgtcgttatcagaagtcgaccgagctgctcatccggaagctgcccttccagaggttggtgagggagatcgcgcaggatttcaaaaccgacctgaggtttcagagcgcagccatcggtgcgctgcaggaggctagcgaagcgtacctggtgggtctgttcgaagataccaacctgtgtgccatccacgctaagagagtcaccatcatgcccaaagacatccagttggctcgccggatacggggagagagagcttaagtgaaggcagtttttatggcgttttgtagtaaattctgtaaaatactttggtttaatttgtgactttttttgtaagaaattgtttataattaaaactggttatgacttgatccaagtgtttaacaattggggctgttaagtctgaccatacatcactgtgatagaatgtgggctttttcaagggtgaagatacaagtcttaaccacagtgtaacttacagtttcctttaaaaaaaaaaaaagtaaacctggcagctatagaatacactatgtgcatttataatagctattttatatattgtagtatcaacatttttaaattaaatgttttacattcacaagtggtggggagtcttgtcattaaggtgtgtgtaatttagagtccagttggttttcttctgactgcacttgttctcatagtagtaaaatgctatgcgcatttataccttgcataagtcctcattctaccacatgttaaccctctagctgataatgcaaacactaactgggggattttatttataagggctctagaaaaaacgagttattcacaccagcatcatcttaactaacattctgaactagttagtgcagcttttcattgtgttgtgtggttggtctcataactaggttgagtttttctcctctgctgaggaaacagtaccgaagttctttttcttgtggcatttgtattataaaaacttggtgtgggggaggagcacaaaactccagcccactgaacctctgccaattaagatggtgttgggttaggttacatctggttactgtcctgggaaaatcatttttatagagatggccttccaagtggttttaaaatttactgaagtttttaggtcaattatgtatgttgactaaatttacaaataaacttgtttatccaaaaaa

SEQ ID NO: 73506 - DNA, 1486 bp, Homo sapiens
aattcgcggccgcgtcgacacggtgcgagaagacgacagaaggggagtttggtcgttcgttgggcggtgctggtttttcgctcgtcgactgcggctcttcctcgggcagcggaagcggcgcggcggtcggagaagtggcctaaaacttcggcgttgggtaggcgttcgtaggtttacccgcggcttcaggttctgccaaccgttggcgccgcgcgccgcggccgttgggagccgagcggcgggggctgctcgggccgctggcgtcgggtcgggtatggggccgggaggtttccccttggggctttgttccggaactgtgtccccgccttttcccggcggtgattcagaggtcccgacgccgggttccgggcagtcgggcctccgcccgtcgaggaagggaagtgactcctccccgcgctccccctcccgggggaggctgccgctcctcgcagcctgagtcattaggggagggggaggaggttggcggccctcggccatctgctgccgcgaggtggggcgcggggaggcgggaggcccggcggtggggccaggatctgttcctccccccgcagccctggggggcggcccgggtgagcgcggcggccttatcttcggggcgtctttcttaggtgaaagaaaatggcccgaaccaagcagactgctcgtaagtccaccggtgggaaagccccccgcaaacagctggccacgaaagccgccaggaaaagcgctccctctaccggcggggtgaagaagcctcatcgctacaggcccgggaccgtggcgcttcgagagattcgtcgttatcagaagtcgaccgagctgctcatccggaagctgcccttccagaggttggtgagggagatcgcgcaggatttcaaaaccgacctgaggtttcagagcgcagccatcggtgcgctgcaggaggctagcgaagcgtacctggtgggtctgttcgaagataccaacctgtgtgccatccacgctaagagagtcaccatcatgcccaaagacatccagttggctcgccggatacggggagagagagcttaagtgaaggcagtttttatggcgttttgtagtaaattctgtaaaatactttggtttaatttgtgactttttttgtaagaaattgtttataatatgttgcatttgtacttaagtcattccatctttcactcaggatgaatgcgaaaagtgactgttcacagacctcagtgatgtgagcactgttgctcaggagtgacaagttgctaatatgcagaagggatgggtgatacttcttgcttctcatgatgcatgtttctgtatgttaatgacttgttgggtagctattaaggtactagagttgataaatgtgtacagggtccttttgcaataaaactggttatgacttgatccaagtgtttaacaattggggctgttaagtctgaccatacatcatggaatgacttaagtacaaatgcaacatattataaacaatttcgtc

SEQ ID NO: 73507 - DNA, 1437 bp, Homo sapiens
aattcgcggccgcgtcgacacggtgcgagaagacgacagaaggggagtttggtcgttcgttgggcggtgctggtttttcgctcgtcgactgcggctcttcctcgggcagcggaagcggcgcggcggtcggagaagtggcctaaaacttcggcgttgggtaggcgttcgtaggtttacccgcggcttcaggttctgccaaccgttggcgccgcgcgccgcggccgttgggagccgagcggcgggggctgctcgggccgctggcgtcgggtcgggtatggggccgggaggtttccccttggggctttgttccggaactgtgtccccgccttttcccggcggtgattcagaggtcccgacgccgggttccgggcagtcgggcctccgcccgtcgaggaagggaagtgactcctccccgcgctccccctcccgggggaggctgccgctcctcgcagcctgagtcattaggggagggggaggaggttggcggccctcggccatctgctgccgcgaggtggggcgcggggaggcgggaggcccggcggtggggccaggatctgttcctccccccgcagccctggggggcggcccgggtgagcgcggcggccttatcttcggggcgtctttcttaggtgaaagaaaatggcccgaaccaagcagactgctcgtaagtccaccggtgggaaagccccccgcaaacagctggccacgaaagccgccaggaaaagcgctccctctaccggcggggtgaagaagcctcatcgctacaggcccgggaccgtggcgcttcgagagattcgtcgttatcagaagtcgaccgagctgctcatccggaagctgcccttccagaggttggtgagggagatcgcgcaggatttcaaaaccgacctgaggtttcagagcgcagccatcggtgcgctgcaggaggctagcgaagcgtacctggtgggtctgttcgaagataccaacctgtgtgccatccacgctaagagagtcaccatcatgcccaaagacatccagttggctcgccggatacggggagagagagcttaagtgaaggcagtttttatggcgttttgtagtaaattctgtaaaatactttggtttaatttgtgactttttttgtaagaaattgtttataatatgttgcatttgtacttaagtcattccatctttcactcaggatgaatgcgaaaagtgactgttcacagacctcagtgatgtgagcactgttgctcaggagtgacaagttgctaatatgcagaagggatgggtgatacttcttgcttctcatgatgcatgtttctgtatgttaatgacttgttgggtagctattaaggtactagagttgataaatgtgtacagggtccttttgcaaggataaacggttgatgatcagtggtttggggtgtttggctattatggggtggggtttcgggg

SEQ ID NO: 73508 - DNA, 1408 bp, Homo sapiens
aattcgcggccgcgtcgacacggtgcgagaagacgacagaaggggagtttggtcgttcgttgggcggtgctggtttttcgctcgtcgactgcggctcttcctcgggcagcggaagcggcgcggcggtcggagaagtggcctaaaacttcggcgttgggtaggcgttcgtaggtttacccgcggcttcaggttctgccaaccgttggcgccgcgcgccgcggccgttgggagccgagcggcgggggctgctcgggccgctggcgtcgggtcgggtatggggccgggaggtttccccttggggctttgttccggaactgtgtccccgccttttcccggcggtgattcagaggtcccgacgccgggttccgggcagtcgggcctccgcccgtcgaggaagggaagtgactcctccccgcgctccccctcccgggggaggctgccgctcctcgcagcctgagtcattaggggagggggaggaggttggcggccctcggccatctgctgccgcgaggtggggcgcggggaggcgggaggcccggcggtggggccaggatctgttcctccccccgcagccctggggggcggcccgggtgagcgcggcggccttatcttcggggcgtctttcttaggtgaaagaaaatggcccgaaccaagcagactgctcgtaagtccaccggtgggaaagccccccgcaaacagctggccacgaaagccgccaggaaaagcgctccctctaccggcggggtgaagaagcctcatcgctacaggcccgggaccgtggcgcttcgagagattcgtcgttatcagaagtcgaccgagctgctcatccggaagctgcccttccagaggttggtgagggagatcgcgcaggatttcaaaaccgacctgaggtttcagagcgcagccatcggtgcgctgcaggaggctagcgaagcgtacctggtgggtctgttcgaagataccaacctgtgtgccatccacgctaagagagtcaccatcatgcccaaagacatccagttggctcgccggatacggggagagagagcttaagtgaaggcagtttttatggcgttttgtagtaaattctgtaaaatactttggtttaatttgtgactttttttgtaagaaattgtttataatatgttgcatttgtacttaagtcattccatctttcactcaggatgaatgcgaaaagtgactgttcacagacctcagtgatgtgagcactgttgctcaggagtgacaagttgctaatatgcagaagggatgggtgatacttcttgcttctcatgatgcatgtttctgtatgttaatgacttgttgggtagctattaaggtactagagttgataaatgtgtacagggtccttttgcaatctctcacgagatcctgctagagtcaccgagca

SEQ ID NO: 73509 - DNA, 2518 bp, Homo sapiens
aattcgcggccgcgtcgacacggtgcgagaagacgacagaaggggagtttggtcgttcgttgggcggtgctggtttttcgctcgtcgactgcggctcttcctcgggcagcggaagcggcgcggcggtcggagaagtggcctaaaacttcggcgttgggtaggcgttcgtaggtttacccgcggcttcaggttctgccaaccgttggcgccgcgcgccgcggccgttgggagccgagcggcgggggctgctcgggccgctggcgtcgggtcgggtatggggccgggaggtttccccttggggctttgttccggaactgtgtccccgccttttcccggcggtgattcagaggtcccgacgccgggttccgggcagtcgggcctccgcccgtcgaggaagggaagtgactcctccccgcgctccccctcccgggggaggctgccgctcctcgcagcctgagtcattaggggagggggaggaggttggcggccctcggccatctgctgccgcgaggtggggcgcggggaggcgggaggcccggcggtggggccaggatctgttcctccccccgcagccctggggggcggcccgggtgagcgcggcggccttatcttcggggcgtctttcttaggtgaaagaaaatggcccgaaccaagcagactgctcgtaagtccaccggtgggaaagccccccgcaaacagctggccacgaaagccgccaggaaaagcgctccctctaccggcggggtgaagaagcctcatcgctacaggcccgggaccgtggcgcttcgagagattcgtcgttatcagaagtcgaccgagctgctcatccggaagctgcccttccagaggttggtgagggagatcgcgcaggatttcaaaaccgacctgaggtttcagagcgcagccatcggtgcgctgcaggaggctagcgaagcgtacctggtgggtctgttcgaagataccaacctgtgtgccatccacgctaagagagtcaccatcatgcccaaagacatccagttggctcgccggatacggggagagagagcttaagtgaaggcagtttttatggcgttttgtagtaaattctgtaaaatactttggtttaatttgtgactttttttgtaagaaattgtttataatatgttgcatttgtacttaagtcattccatctttcactcaggatgaatgcgaaaagtgactgttcacagacctcagtgatgtgagcactgttgctcaggagtgacaagttgctaatatgcagaagggatgggtgatacttcttgcttctccactgcactgtcctctgctactgtcaactgaccttgctctggcgctacgctacttaacggctacctagccgcttgactaccactgctgtaccacgcggctccattaatgacaactaacacacctggctctactgaccttgactccaccgctgcttccaaaccaaacacttggcggacgtgattaacggatcatgtatccactaccatctccacctgctgcactacgcaacatgctggcgacgtatatgtacacaaacggtgctgaacagcactaaccaaagatcttctaagcccacccaagctcgctaacaatataacagaatttaaccctatatctatcaaataacaaaaaaacacaaacgtaaaccacccttggcgccccgcactcttaagaatcataccacacttcactcctcgccacttatccaactacacataccgctctacttcctaacaacatacttcggtaacgtatctccaacccaatcctactcctcacgtctaaccacttgctacacaaacctatctcacctacaagatgacattgcgcggacaaccctcctacggcacccctcaccacccggcatgatggccgatcaattcttcatgacgccccccacaaatcgtcgaacttatccccttccatgaatcctgcccacctgcggcaccctccacctacacatcgccttacccacctcgcccttattgcctcggcacttctatataccccatcgccccctacagtagtcgcgcgacttaccttacccaccaagatattacaacccactatcataaacagagattaaagtggcccaacaccctcaatacagggcatgctaactctctacctccaacaaagagggccccatatcccacatatcccaccacactatataatcccacacacccttgcacctacgcctcgatcacgccatcaccacccatcgtcaacaactagacagacgccaagctaacttcactacccgcgcaccagcgtctggactgggccaacaacacacctaggcgtcagcaaccgtgccccctcccgcctagagccaatatgcgaccccgaccacacaacacgagtgcaattcgcgcccacttaacccactcgtctgcccatccctgcccacatctcgccaacataagacccgtaaacgagcagacaagagccaacatcccgcttcacgcagccaaacattcgacaaaagcacttcccgctccccatc

SEQ ID NO: 73510 - DNA, 1254 bp, Homo sapiens
aattcgcggccgcgtcgacacggtgcgagaagacgacagaaggggagtttggtcgttcgttgggcggtgctggtttttcgctcgtcgactgcggctcttcctcgggcagcggaagcggcgcggcggtcggagaagtggcctaaaacttcggcgttgggtaggcgttcgtaggtttacccgcggcttcaggttctgccaaccgttggcgccgcgcgccgcggccgttgggagccgagcggcgggggctgctcgggccgctggcgtcgggtcgggtatggggccgggaggtttccccttggggctttgttccggaactgtgtccccgccttttcccggcggtgattcagaggtcccgacgccgggttccgggcagtcgggcctccgcccgtcgaggaagggaagtgactcctccccgcgctccccctcccgggggaggctgccgctcctcgcagcctgagtcattaggggagggggaggaggttggcggccctcggccatctgctgccgcgaggtggggcgcggggaggcgggaggcccggcggtggggccaggatctgttcctccccccgcagccctggggggcggcccgggtgagcgcggcggccttatcttcggggcgtctttcttaggtgaaagaaaatggcccgaaccaagcagactgctcgtaagtccaccggtgggaaagccccccgcaaacagctggccacgaaagccgccaggaaaagcgctccctctaccggcggggtgaagaagcctcatcgctacaggcccgggaccgtggcgcttcgagagattcgtcgttatcagaagtcgaccgagctgctcatccggaagctgcccttccagaggttggtgagggagatcgcgcaggatttcaaaaccgacctgaggtttcagagcgcagccatcggtgcgctgcaggaggctagcgaagcgtacctggtgggtctgttcgaagataccaacctgtgtgccatccacgctaagagagtcaccatcatgcccaaagacatccagttggctcgccggatacggggagagagagcttaagtgaaggcagtttttatggcgttttgtagtaaattctgtaaaatactttggtttaatttgtgactttttttgtaagaaattgtttataatatgttgcatttgtacttaagtcattccatctttcactcaggatgaatgcgtgtgaacagccggccactgcgatgcgcgcgccgattgtctcaggcctgagatagtgcagacaag

SEQ ID NO: 73511 - DNA, 960 bp, Homo sapiens
aattcgcggccgcgtcgacacggtgcgagaagacgacagaaggggagtttggtcgttcgttgggcggtgctggtttttcgctcgtcgactgcggctcttcctcgggcagcggaagcggcgcggcggtcggagaagtggcctaaaacttcggcgttgggtaggcgttcgtaggtttacccgcggcttcaggttctgccaaccgttggcgccgcgcgccgcggccgttgggagccgagcggcgggggctgctcgggccgctggcgtcgggtcgggtatggggccgggaggtttccccttggggctttgttccggaactgtgtccccgccttttcccggcggtgattcagaggtcccgacgccgggttccgggcagtcgggcctccgcccgtcgaggaagggaagtgactcctccccgcgctccccctcccgggggaggctgccgctcctcgcagcctgagtcattaggggagggggaggaggttggcggccctcggccatctgctgccgcgaggtggggcgcggggaggcgggaggcccggcggtggggccaggatctgttcctccccccgcagccctggggggcggcccgggtgagcgcggcggccttatcttcggggcgtctttcttaggtgaaagaaaatggcccgaaccaagcagactgctcgtaagtccaccggtgggaaagccccccgcaaacagctggccacgaaagccgccaggaaaagcgctccctctaccggcggggtgaagaagcctcatcgctacaggcccgggaccgtggcgcttcgagagattcgtcgttatcagaagtcgaccgagctgctcatccggaagctgcccttccagaggttggtgagggagatcgcgcaggatttcaaaaccgacctgaggttcccattgtagcgaagcgtacctggtggtctgttcgaagatactagagatacatcatgccccaagaca

SEQ ID NO: 73512 - DNA, 303 bp, Homo sapiens
tcaagcttctaacgatgtacggggacatgtgcgggcctatgtgtccctgccacggccggagcgcccgcgcagcacggattccagctggccacgtccggccgctggggcagacaggctggtccaggcaaggccagctgctgccaggaagctgcgacaggcaaggcggccgcctgtccatgcctgctgcagggtaactcagggctgaggtcgcaacggccaggtcagagaggggtcagcatcccaaagccccctctgctcaacccagcccagttttgcaaataaaccctgagcattgagtacgtt

SEQ ID NO: 73513 - DNA, 7187 bp, Homo sapiens
  misc_feature (35)..(35): n is a, c, g, or t
  misc_feature (97)..(97): n is a, c, g, or t
  misc_feature (126)..(126): n is a, c, g, or t
  misc_feature (150)..(150): n is a, c, g, or t
  misc_feature (384)..(384): n is a, c, g, or t
  misc_feature (412)..(412): n is a, c, g, or t
  misc_feature (846)..(846): n is a, c, g, or t
  misc_feature (4147)..(4147): n is a, c, g, or t
  misc_feature (5110)..(5110): n is a, c, g, or t
cccacatcggcccccataaccacggtggtgaccangggctgtgagccccagtgtgcctggtcagagtggctggactacagctaccccatgccggggncctctggcggggactttgacacctactcnaacatccgtgcggccggaggggcngtctgtgagcagcccctgggcctcgagtgccgtgcccaggcccagcctggtgtccccctgcgggagttgggccaggtcgtggaatgcagcctggactttggcctggtctgcaggaaccgtgagcaggtggggaagttcaagatgtgcttcaactatgaaatccgtgtgttctgctgcaactacggccactgccccagcaccccggccaccagctctacggccacgccctcctcnactccggggacgacctggatcctcacanagctgaccacaacagccactacgactgagtccactggatccacggccaccccgtcctccaccccagggaccacctggatcctcacagagccgagcactacagccaccgtgacggtgcccaccggatccacggccaccgcctcctccacccaggcaactgctggcaccccacatgtgagcaccacggccacgacacccacagtcaccagctccaaagccactcccttctccagtccagggactgcaaccgcccttccagcactgagaagcacagccaccacacccacagctaccagctttacagccatcccctcctcctccctgggcaccacctggacccgcctatcacagaccaccacacccacggccaccatgtccacagccacaccctcctccactccagagactgcccacacctccacagtgcttaccacnacggccaccacaaccagggccaccggctctgtggccaccccctcttccaccccaggaacagctcacactaccaaagtgccgactaccacaaccacgggcttcacagtcaccccctcctccagcccagggacggcacgcacgcctccagtgtggatcagcacaaccaccacacccacaaccagtggctccacggtgaccccctcctccatcccggggaccacccacacccccacagtgctgaccaccaccaccacaactgtggccactggttctatggcaacaccctcctctagcacacagaccagtggtactcccccatcactgatcaccacggccactacgatcacggccaccggctccaccaccaacccctcctcaactccagggacaacacctatccccccagtgctgaccaccaccgccaccacacctgcagccaccagcagcacagtgactccctcctctgccctagggaccacccacacacccccagtgccgaacaccacggccaccacacacgggcgatccctgtcccccagcagtccccacacggtgcgcacagcctggacttcggccacctcaggcaccttgggcaccacccacatcacagagccttccacggggacttcccacaccccagcagcaaccaccggtaccacccagcactcgactccagccctgtccagccctcaccctacgcagcaggaccaccgagtcacccccttccccagggacgaccaccccgggccacaccacggccacctccaggaccacggccacggccacacccagcaagacccgcacctcgaccctgctgcccagcagccccacatcggcccccataaccacggtggtgaccacgggctgtgagccccagtgtgcctggtcagagtggctggactacagctaccccatgccggggccctctggcggggactttgacacctactccaacatccgtgcggccggaggggccgtctgtgagcagcccctgggcctcgagtgccgtgcccaggcccagcctggtgtccccctgggggagttgggccaggtcgtggaatgcagcctggactttggcctggtctgcaggaaccgtgagcaggtggggaagttcaagatgtgcttcaactatgaaatccgtgtgttctgctgcaactacggccactgccccagcaccccggccaccagctctacggccatgccctcctccactccggggacgacctggatcctcacagagctgaccacaacagccactacgactgcatccactggatccacggccaccccgtcctccaccccgggaacagctccccctcccaaagtgctgaccagcccggccaccacacccacagccaccagttccaaagccacttcctcctccagtccaaggactgcaaccacccttccagtgctgacaagcacagccaccaaatccacagctaccagcgttacacccatcccctcctccacccttgggaccaccgggaccctcccagaacagaccaccacacccgtggccaccatgtccacaatccacccctcctccactccggagaccacccacacctccacagtgctgaccacgaaggccaccacgacaagggccaccagttccacgtccaccccctcctccactccggggacgacctggatcctcacagagctgaccacagcagccactacaactgcagccactggccccacggccaccccgtcctccaccccagggaccacctggatcctcacagagctgaccacaacagccactacgactgcgtccactggatccacggccaccctgtcctccaccccagggaccacctggatcctcacagagccgagcactacagccaccgtgacggtgcccaccggatccacggccaccgcctcctccacccaggcaactgctggcaccccacatgtgagcaccacggccacgacacccacagtcaccagctccaaagccactccctcctccagtccagggactgcaactgcccttccagcactgagaagcacagccaccacacccacagctaccagctttacagccatcccctcctcctccctgggcaccacctggacccgcctatcacagaccaccacacccacggccaccatgtccacagccacaccctcctccactccagagactgtccacacctccacagtgcttaccgccacggccaccacaaccggggccaccggctctgtggccaccccctcctccaccccaggaacagctcacactaccaaagtgccgactaccacaaccacgggcttcacagccaccccctcctccagcccagggacggcactcacgcctccagtgtggatcagcacaaccaccacacccacaaccaccacacccacaaccagtggctccacggtgaccccctcctccatcccggggaccacccacaccgccagagtgctgaccaccaccaccacaactgtggccactggttctatggcaacaccctcctctagcacacagaccagtggtactcccccatcactgaccaccacggccactacgatcacggccaccggctccaccaccaacccctcctcaactccagggacaacacccatccccccagtgctgaccagcacggccaccacacccgcagccaccagctccaaagccacttcctcctccagtccaaggactgcaaccacccttccagtgctgacaagcacagccacaaaatccacagctaccagctttacacccatcccctcctccaccctgtggaccacgtggaccgtcccagcacagaccaccacacccatgtccaccatgtccacaatccacacctcctctactccagagaccacccacacctccacagtgctgaccaccacagccaccatgacaagggccaccaattccacggccacaccctcctccactctggggacgacccggatcctcactgagctgaccacaacagccactacaactgcagccactggatccacggccaccctgtcctccaccccagggaccacctggatcctcacagagccgagcactatagccaccgtgatggtgcccaccggttccacggccaccgcctcctccactctgggaacagctcacacccccaaagtggtgaccaccatggccactatgcccacagccactgcctccacggttcccagctcgtccaccgtggggaccacccgcacccctgcagtgctccccagcagcctgccaaccttcagcgtgtccactgtgtcctcctcagtcctcaccaccctgagacccactggcttccccagctcccacttntctactccctgcttctgcagggcatttggacagtttttctcgcccggggaagtcatctacaataagaccgaccgagccggctgccatttctacgcagtgtgcaatcagcactgtgacattgaccgcttccagggcgcctgtcccacctccccaccgccagtgtcctccgccccgctgtcctcgccctcccctgcccctggctgtgacaatgccatccctctccggcaggtgaatgagacctggaccctggagaactgcacggtggccaggtgcgtgggtgacaaccgtgtcgtcctgctggacccaaagcctgtggccaacgtcacctgcgtgaacaagcacctgcccatcaaagtgtcggacccgagccagccctgtgacttccactatgagtgcgagtgcatctgcagcatgtggggcggctcccactattccacctttgacggcacctcttacaccttccggggcaactgcacctatgtcctcatgagagagatccatgcacgctttgggaatctcagcctctacctggacaaccactactgcacggcctctgccactgccgctgccgcccgctgcccccgcgccctcagcatccactacaagtccatggatatcgtcctcactgtcaccatggtgcatgggaaggaggagggcctgatcctgtttgaccaaattccggtgagcagcggtttcagcaagaacggcgtgcttgtgtctgtgctggggaccaccaccatgcgtgtggacattcctgccctgggcgtgagcgtcaccttcaatggccaagtcttccaggcccggctgccctacagcctcttccacaacaacaccgagggccagtgcggcacctgcaccaacaaccagagggacgactgtctccagcgggacggaaccactgccgccagttgcaaggacatggccaagacgtggctggtccccgacagcagaaaggatggctgntgggccccgactggcacaccccccactgccagccccgcagccccggtgtctagcacacccacccccaccccatgcccaccacagctgctctgtgatctgatgctgagccaggtctttgctgagtgccacacccttctgcccccgggcccattcttcaacgcctgcatcagcgaccactgcaggggccgccttgaggtgccctgccagagcctggaggcttacgcagagctctgccgcgcccggggagtgtgcagtgactggcgaggtgcaaccggtggcctgtgcgacctcacctgcccacccaccaaagtgtacaagccatgcggccccatacagcctgccacctgcaactctaggaaccagagcccacagctggaggggatggcggagggctgcttctgccctgaggaccagatcctcttcaacgcacacatgggcatctgcgtgcaggcctgcccctgcgtgggacccgatgggtttcctaaatttcccggggagcggtgggtcagcaactgccagtcctgcgtgtgtgacgagggttcagtgtcggtgcagtgcaagcccctgccctgtgacgcccagggtcagcccccgccgtgcaaccgtcccggcttcgtaaccgtgaccaggccccgggccgagaacccctgctgccccgagacggtgtgcgtgtgcaacacaaccacctgcccccagagcctgcctgtgtgcccgccagggcaggagtccatctgcacccaggaggagggcgactgctgtcccaccttccgctgcagacctcagctgtgttcgtacaatggcaccttctacggggttggtgcaaccttcccaggcgcccttccctgccacatgtgtacctgcctctctggggacacccaggacccaacggtgcaatgtcaggaggatgcctgcaacaatactacctgtccccagggctttgagtacaagagagtggccgggcagtgctgtggggagtgcgtccagaccgcctgcctcacgcccgatggccagccagtccagctgaatgaaacctgggtcaacagccatgtggacaactgcaccgtgtacctctgtgaggctgagggtggagtccatttgctgaccccacagcctgcatcctgcccagatgtgtccagctgcagggggagcctcaggaaaaccggctgctgctactcctgtgaggaggactcctgtcaagtccgcatcaacacgaccatcctgtggcaccagggctgcgagaccgaggtcaacatcaccttctgcgagggctcctgccccggagcgtccaagtactcagcagaggcccaggccatgcagcaccagtgcacctgctgccaggagaggcgggtccacgaggagacggtgcccttgcactgtcctaacggctcagccatcctgcacacctacacccacgtggatgagtgtggctgcacgcccttctgtgtccctgcgcccatggctcccccacacacccgtggcttcccggcccaggaggccactgctgtctgagaacgttctgcctccatccccatgctctgtccacctggagccaggatgtgcattgtctgatcatgaaaaccttgggcctcctctgcggagccccccggcctgtgtgtggcaccccgcgctccgtgctcctgctgcccaccccgtgggtgaaaccggccccagaagggtgaggggccagcaggacccctttcgggagggcgccactcaggagtcctaccctgggagagcctgtggcccaccttggccttgcccctccctgatgtcactgggacgccctggaacaaactaagcatgtgcgggcctatgtgtccctgccacggccggagcgcccgcgcagcacggattccagctggccacgtccggccgctggggcagacaggctggtccaggcaaggccagctgctgccaggaagctgcgacaggcaaggcggccgcctgtccatgcctgctgcagggtaactcagggctgaggtcgcaacggccaggtcagagaggggtcagcatcccaaagccccctctgctcaacccagcccagttttgcaaataaaccctgagcattgagtacgtt

SEQ ID NO: 73514 - DNA, 4892 bp, Homo sapiens
  misc_feature (1852)..(1852): n is a, c, g, or t
  misc_feature (2815)..(2815): n is a, c, g, or t
gttgcgagctgttctagaggatcccagcactgtgagactccattgcccagaacagaccaccacacccgtggccaccatgtccacaatccacccctcctccactccggagaccacccacacctccacagtgctgaccacgaaggccaccacgacaagggccaccagttccacgtccaccccctcctccactccggggacgacctggatcctcacagagctgaccacagcagccactacaactgcagccactggccccacggccaccccgtcctccaccccagggaccacctggatcctcacagagctgaccacaacagccactacgactgcgtccactggatccacggccaccctgtcctccaccccagggaccacctggatcctcacagagccgagcactacagccaccgtgacggtgcccaccggatccacggccaccgcctcctccacccaggcaactgctggcaccccacatgtgagcaccacggccacgacacccacagtcaccagctccaaagccactccctcctccagtccagggactgcaactgcccttccagcactgagaagcacagccaccacacccacagctaccagctttacagccatcccctcctcctccctgggcaccacctggacccgcctatcacagaccaccacacccacggccaccatgtccacagccacaccctcctccactccagagactgtccacacctccacagtgcttaccgccacggccaccacaaccggggccaccggctctgtggccaccccctcctccaccccaggaacagctcacactaccaaagtgccgactaccacaaccacgggcttcacagccaccccctcctccagcccagggacggcactcacgcctccagtgtggatcagcacaaccaccacacccacaaccaccacacccacaaccagtggctccacggtgaccccctcctccatcccggggaccacccacaccgccagagtgctgaccaccaccaccacaactgtggccactggttctatggcaacaccctcctctagcacacagaccagtggtactcccccatcactgaccaccacggccactacgatcacggccaccggctccaccaccaacccctcctcaactccagggacaacacccatccccccagtgctgaccagcacggccaccacacccgcagccaccagctccaaagccacttcctcctccagtccaaggactgcaaccacccttccagtgctgacaagcacagccacaaaatccacagctaccagctttacacccatcccctcctccaccctgtggaccacgtggaccgtcccagcacagaccaccacacccatgtccaccatgtccacaatccacacctcctctactccagagaccacccacacctccacagtgctgaccaccacagccaccatgacaagggccaccaattccacggccacaccctcctccactctggggacgacccggatcctcactgagctgaccacaacagccactacaactgcagccactggatccacggccaccctgtcctccaccccagggaccacctggatcctcacagagccgagcactatagccaccgtgatggtgcccaccggttccacggccaccgcctcctccactctgggaacagctcacacccccaaagtggtgaccaccatggccactatgcccacagccactgcctccacggttcccagctcgtccaccgtggggaccacccgcacccctgcagtgctccccagcagcctgccaaccttcagcgtgtccactgtgtcctcctcagtcctcaccaccctgagacccactggcttccccagctcccacttntctactccctgcttctgcagggcatttggacagtttttctcgcccggggaagtcatctacaataagaccgaccgagccggctgccatttctacgcagtgtgcaatcagcactgtgacattgaccgcttccagggcgcctgtcccacctccccaccgccagtgtcctccgccccgctgtcctcgccctcccctgcccctggctgtgacaatgccatccctctccggcaggtgaatgagacctggaccctggagaactgcacggtggccaggtgcgtgggtgacaaccgtgtcgtcctgctggacccaaagcctgtggccaacgtcacctgcgtgaacaagcacctgcccatcaaagtgtcggacccgagccagccctgtgacttccactatgagtgcgagtgcatctgcagcatgtggggcggctcccactattccacctttgacggcacctcttacaccttccggggcaactgcacctatgtcctcatgagagagatccatgcacgctttgggaatctcagcctctacctggacaaccactactgcacggcctctgccactgccgctgccgcccgctgcccccgcgccctcagcatccactacaagtccatggatatcgtcctcactgtcaccatggtgcatgggaaggaggagggcctgatcctgtttgaccaaattccggtgagcagcggtttcagcaagaacggcgtgcttgtgtctgtgctggggaccaccaccatgcgtgtggacattcctgccctgggcgtgagcgtcaccttcaatggccaagtcttccaggcccggctgccctacagcctcttccacaacaacaccgagggccagtgcggcacctgcaccaacaaccagagggacgactgtctccagcgggacggaaccactgccgccagttgcaaggacatggccaagacgtggctggtccccgacagcagaaaggatggctgntgggccccgactggcacaccccccactgccagccccgcagccccggtgtctagcacacccacccccaccccatgcccaccacagctgctctgtgatctgatgctgagccaggtctttgctgagtgccacacccttctgcccccgggcccattcttcaacgcctgcatcagcgaccactgcaggggccgccttgaggtgccctgccagagcctggaggcttacgcagagctctgccgcgcccggggagtgtgcagtgactggcgaggtgcaaccggtggcctgtgcgacctcacctgcccacccaccaaagtgtacaagccatgcggccccatacagcctgccacctgcaactctaggaaccagagcccacagctggaggggatggcggagggctgcttctgccctgaggaccagatcctcttcaacgcacacatgggcatctgcgtgcaggcctgcccctgcgtgggacccgatgggtttcctaaatttcccggggagcggtgggtcagcaactgccagtcctgcgtgtgtgacgagggttcagtgtcggtgcagtgcaagcccctgccctgtgacgcccagggtcagcccccgccgtgcaaccgtcccggcttcgtaaccgtgaccaggccccgggccgagaacccctgctgccccgagacggtgtgcgtgtgcaacacaaccacctgcccccagagcctgcctgtgtgcccgccagggcaggagtccatctgcacccaggaggagggcgactgctgtcccaccttccgctgcagacctcagctgtgttcgtacaatggcaccttctacggggttggtgcaaccttcccaggcgcccttccctgccacatgtgtacctgcctctctggggacacccaggacccaacggtgcaatgtcaggaggatgcctgcaacaatactacctgtccccagggctttgagtacaagagagtggccgggcagtgctgtggggagtgcgtccagaccgcctgcctcacgcccgatggccagccagtccagctgaatgaaacctgggtcaacagccatgtggacaactgcaccgtgtacctctgtgaggctgagggtggagtccatttgctgaccccacagcctgcatcctgcccagatgtgtccagctgcagggggagcctcaggaaaaccggctgctgctactcctgtgaggaggactcctgtcaagtccgcatcaacacgaccatcctgtggcaccagggctgcgagaccgaggtcaacatcaccttctgcgagggctcctgccccggagcgtccaagtactcagcagaggcccaggccatgcagcaccagtgcacctgctgccaggagaggcgggtccacgaggagacggtgcccttgcactgtcctaacggctcagccatcctgcacacctacacccacgtggatgagtgtggctgcacgcccttctgtgtccctgcgcccatggctcccccacacacccgtggcttcccggcccaggaggccactgctgtctgagaacgttctgcctccatccccatgctctgtccacctggagccaggatgtgcattgtctgatcatgaaaaccttgggcctcctctgcggagccccccggcctgtgtgtggcaccccgcgctccgtgctcctgctgcccaccccgtgggtgaaaccggccccagaagggtgaggggccagcaggacccctttcgggagggcgccactcaggagtcctaccctgggagagcctgtggcccaccttggccttgcccctccctgatgtcactgggacgccctggaacaaactaagcatgtgcgggcctatgtgtccctgccacggccggagcgcccgcgcagcacggattccagctggccacgtccggccgctggggcagacaggctggtccaggcaaggccagctgctgccaggaagctgcgacaggcaaggcggccgcctgtccatgcctgctgcagggtaactcagggctgaggtcgcaacggccaggtcagagaggggtcagcatcccaaagccccctctgctcaacccagcccagttttgcaaataaaccctgagcattgagtacgtt

SEQ ID NO: 73515 - DNA, 3471 bp, Homo sapiens
  misc_feature (431)..(431): n is a, c, g, or t
  misc_feature (1394)..(1394): n is a, c, g, or t
aatcgagctcgcaccctgccatttactccatggccacaccctcctccactctggggacgacccggatcctcactgagctgaccacaacagccactacaactgcagccactggatccacggccaccctgtcctccaccccagggaccacctggatcctcacagagccgagcactatagccaccgtgatggtgcccaccggttccacggccaccgcctcctccactctgggaacagctcacacccccaaagtggtgaccaccatggccactatgcccacagccactgcctccacggttcccagctcgtccaccgtggggaccacccgcacccctgcagtgctccccagcagcctgccaaccttcagcgtgtccactgtgtcctcctcagtcctcaccaccctgagacccactggcttccccagctcccacttntctactccctgcttctgcagggcatttggacagtttttctcgcccggggaagtcatctacaataagaccgaccgagccggctgccatttctacgcagtgtgcaatcagcactgtgacattgaccgcttccagggcgcctgtcccacctccccaccgccagtgtcctccgccccgctgtcctcgccctcccctgcccctggctgtgacaatgccatccctctccggcaggtgaatgagacctggaccctggagaactgcacggtggccaggtgcgtgggtgacaaccgtgtcgtcctgctggacccaaagcctgtggccaacgtcacctgcgtgaacaagcacctgcccatcaaagtgtcggacccgagccagccctgtgacttccactatgagtgcgagtgcatctgcagcatgtggggcggctcccactattccacctttgacggcacctcttacaccttccggggcaactgcacctatgtcctcatgagagagatccatgcacgctttgggaatctcagcctctacctggacaaccactactgcacggcctctgccactgccgctgccgcccgctgcccccgcgccctcagcatccactacaagtccatggatatcgtcctcactgtcaccatggtgcatgggaaggaggagggcctgatcctgtttgaccaaattccggtgagcagcggtttcagcaagaacggcgtgcttgtgtctgtgctggggaccaccaccatgcgtgtggacattcctgccctgggcgtgagcgtcaccttcaatggccaagtcttccaggcccggctgccctacagcctcttccacaacaacaccgagggccagtgcggcacctgcaccaacaaccagagggacgactgtctccagcgggacggaaccactgccgccagttgcaaggacatggccaagacgtggctggtccccgacagcagaaaggatggctgntgggccccgactggcacaccccccactgccagccccgcagccccggtgtctagcacacccacccccaccccatgcccaccacagctgctctgtgatctgatgctgagccaggtctttgctgagtgccacacccttctgcccccgggcccattcttcaacgcctgcatcagcgaccactgcaggggccgccttgaggtgccctgccagagcctggaggcttacgcagagctctgccgcgcccggggagtgtgcagtgactggcgaggtgcaaccggtggcctgtgcgacctcacctgcccacccaccaaagtgtacaagccatgcggccccatacagcctgccacctgcaactctaggaaccagagcccacagctggaggggatggcggagggctgcttctgccctgaggaccagatcctcttcaacgcacacatgggcatctgcgtgcaggcctgcccctgcgtgggacccgatgggtttcctaaatttcccggggagcggtgggtcagcaactgccagtcctgcgtgtgtgacgagggttcagtgtcggtgcagtgcaagcccctgccctgtgacgcccagggtcagcccccgccgtgcaaccgtcccggcttcgtaaccgtgaccaggccccgggccgagaacccctgctgccccgagacggtgtgcgtgtgcaacacaaccacctgcccccagagcctgcctgtgtgcccgccagggcaggagtccatctgcacccaggaggagggcgactgctgtcccaccttccgctgcagacctcagctgtgttcgtacaatggcaccttctacggggttggtgcaaccttcccaggcgcccttccctgccacatgtgtacctgcctctctggggacacccaggacccaacggtgcaatgtcaggaggatgcctgcaacaatactacctgtccccagggctttgagtacaagagagtggccgggcagtgctgtggggagtgcgtccagaccgcctgcctcacgcccgatggccagccagtccagctgaatgaaacctgggtcaacagccatgtggacaactgcaccgtgtacctctgtgaggctgagggtggagtccatttgctgaccccacagcctgcatcctgcccagatgtgtccagctgcagggggagcctcaggaaaaccggctgctgctactcctgtgaggaggactcctgtcaagtccgcatcaacacgaccatcctgtggcaccagggctgcgagaccgaggtcaacatcaccttctgcgagggctcctgccccggagcgtccaagtactcagcagaggcccaggccatgcagcaccagtgcacctgctgccaggagaggcgggtccacgaggagacggtgcccttgcactgtcctaacggctcagccatcctgcacacctacacccacgtggatgagtgtggctgcacgcccttctgtgtccctgcgcccatggctcccccacacacccgtggcttcccggcccaggaggccactgctgtctgagaacgttctgcctccatccccatgctctgtccacctggagccaggatgtgcattgtctgatcatgaaaaccttgggcctcctctgcggagccccccggcctgtgtgtggcaccccgcgctccgtgctcctgctgcccaccccgtgggtgaaaccggccccagaagggtgaggggccagcaggacccctttcgggagggcgccactcaggagtcctaccctgggagagcctgtggcccaccttggccttgcccctccctgatgtcactgggacgccctggaacaaactaagcatgtgcgggcctatgtgtccctgccacggccggagcgcccgcgcagcacggattccagctggccacgtccggccgctggggcagacaggctggtccaggcaaggccagctgctgccaggaagctgcgacaggcaaggcggccgcctgtccatgcctgctgcagggtaactcagggctgaggtcgcaacggccaggtcagagaggggtcagcatcccaaagccccctctgctcaacccagcccagttttgcaaataaaccctgagcattgagtacgtt

SEQ ID NO: 73516 - DNA, 3437 bp, Homo sapiens
  misc_feature (35)..(35): n is a, c, g, or t
  misc_feature (97)..(97): n is a, c, g, or t
  misc_feature (126)..(126): n is a, c, g, or t
  misc_feature (150)..(150): n is a, c, g, or t
  misc_feature (384)..(384): n is a, c, g, or t
  misc_feature (412)..(412): n is a, c, g, or t
  misc_feature (846)..(846): n is a, c, g, or t
cccacatcggcccccataaccacggtggtgaccangggctgtgagccccagtgtgcctggtcagagtggctggactacagctaccccatgccggggncctctggcggggactttgacacctactcnaacatccgtgcggccggaggggcngtctgtgagcagcccctgggcctcgagtgccgtgcccaggcccagcctggtgtccccctgcgggagttgggccaggtcgtggaatgcagcctggactttggcctggtctgcaggaaccgtgagcaggtggggaagttcaagatgtgcttcaactatgaaatccgtgtgttctgctgcaactacggccactgccccagcaccccggccaccagctctacggccacgccctcctcnactccggggacgacctggatcctcacanagctgaccacaacagccactacgactgagtccactggatccacggccaccccgtcctccaccccagggaccacctggatcctcacagagccgagcactacagccaccgtgacggtgcccaccggatccacggccaccgcctcctccacccaggcaactgctggcaccccacatgtgagcaccacggccacgacacccacagtcaccagctccaaagccactcccttctccagtccagggactgcaaccgcccttccagcactgagaagcacagccaccacacccacagctaccagctttacagccatcccctcctcctccctgggcaccacctggacccgcctatcacagaccaccacacccacggccaccatgtccacagccacaccctcctccactccagagactgcccacacctccacagtgcttaccacnacggccaccacaaccagggccaccggctctgtggccaccccctcttccaccccaggaacagctcacactaccaaagtgccgactaccacaaccacgggcttcacagtcaccccctcctccagcccagggacggcacgcacgcctccagtgtggatcagcacaaccaccacacccacaaccagtggctccacggtgaccccctcctccatcccggggaccacccacacccccacagtgctgaccaccaccaccacaactgtggccactggttctatggcaacaccctcctctagcacacagaccagtggtactcccccatcactgatcaccacggccactacgatcacggccaccggctccaccaccaacccctcctcaactccagggacaacacctatccccccagtgctgaccaccaccgccaccacacctgcagccaccagcagcacagtgactccctcctctgccctagggaccacccacacacccccagtgccgaacaccacggccaccacacacgggcgatccctgtcccccagcagtccccacacggtgcgcacagcctggacttcggccacctcaggcaccttgggcaccacccacatcacagagccttccacggggacttcccacaccccagcagcaaccaccggtaccacccagcactcgactccagccctgtccagccctcaccctacgcagcaggaccaccgagtcacccccttccccagggacgaccaccccgggccacaccacggccacctccaggaccacggccacggccacacccagcaagacccgcacctcgaccctgctgcccagcagccccacatcggcccccataaccacggtggtgaccacgggctgtgagccccagtgtgcctggtcagagtggctggactacagctaccccatgccggggccctctggcggggactttgacacctactccaacatccgtgcggccggaggggccgtctgtgagcagcccctgggcctcgagtgccgtgcccaggcccagcctggtgtccccctgggggagttgggccaggtcgtggaatgcagcctggactttggcctggtctgcaggaaccgtgagcaggtggggaagttcaagatgtgcttcaactatgaaatccgtgtgttctgctgcaactacggccactgccccagcaccccggccaccagctctacggccatgccctcctccactccggggacgacctggatcctcacagagctgaccacaacagccactacgactgcatccactggatccacggccaccccgtcctccaccccgggaacagctccccctcccaaagtgctgaccagcccggccaccacacccacagccaccagttccaaagccacttcctcctccagtccaaggactgcaaccacccttccagtgctgacaagcacagccaccaaatccacagctaccagcgttacacccatcccctcctccacccttgggaccaccgggaccctcccagaacagaccaccacacccgtggccaccatgtccacaatccacccctcctccactccggagaccacccacacctccacagtgctgaccacgaaggccaccacgacaagggccaccagttccacgtccaccccctcctccactccggggacgacctggatcctcacagagctgaccacagcagccactacaactgcagccactggccccacggccaccccgtcctccaccccagggaccacctggatcctcacagagctgaccacaacagccactacgactgcgtccactggatccacggccaccctgtcctccaccccagggaccacctggatcctcacagagccgagcactacagccaccgtgacggtgcccaccggatccacggccaccgcctcctccacccaggcaactgctggcaccccacatgtgagcaccacggccacgacacccacagtcaccagctccaaagccactccctcctccagtccagggactgcaactgcccttccagcactgagaagcacagccaccacacccacagctaccagctttacagccatcccctcctcctccctgggcaccacctggacccgcctatcacagaccaccacacccacggccaccatgtccacagccacaccctcctccactccagagactgtccacacctccacagtgcttaccgccacggccaccacaaccggggccaccggctctgtggccaccccctcctccaccccaggaacagctcacactaccaaagtgccgactaccacaaccacgggcttcacagccaccccctcctccagcccagggacggcactcacgcctccagtgtggatcagcacaaccaccacacccacaaccaccacacccacaaccagtggctccacggtgaccccctcctccatcccggggaccacccacaccgccagagtgctgaccaccaccaccacaactgtggccactggttctatggcaacaccctcctctagcacacagaccagtggtactcccccatcactgaccaccacggccactacgatcacggccaccgcctattttacaccaaccccgtgatcgtggggtgtaa

SEQ ID NO: 73517 - DNA, 397 bp, Homo sapiens
  misc_feature (27)..(29): n is a, c, g, or t
  misc_feature (57)..(57): n is a, c, g, or t
  misc_feature (63)..(63): n is a, c, g, or t
  misc_feature (70)..(72): n is a, c, g, or t
  misc_feature (90)..(90): n is a, c, g, or t
  misc_feature (98)..(98): n is a, c, g, or t
  misc_feature (176)..(176): n is a, c, g, or t
cccttctctggtctgaagaagggggtnnntgtaaacccgtgtttgtggtagtcgccnctttgntatgtannntgttcccggggtggagancggggtgnccgtggatccagtgaatgcagtcgtagtggctgttgtggtcagctctgtgaggatccaggtcgtccccggagtgaagnagggcatggccgtagagctggtgcccggccaccacacccacagccaccagttccaaagccacttcctcctccagtccaaggactgcaaccacccttccagtgctgacaagcacagccaccaaatccacagctaccagcgttacacccatcccctcctccacccttgggaccaccgggacccttcagggtttcatcactataccatatttaaggcgttctgg

SEQ ID NO: 73518 - DNA, 5089 bp, Homo sapiens
  misc_feature (35)..(35): n is a, c, g, or t
  misc_feature (97)..(97): n is a, c, g, or t
  misc_feature (126)..(126): n is a, c, g, or t
  misc_feature (150)..(150): n is a, c, g, or t
  misc_feature (384)..(384): n is a, c, g, or t
  misc_feature (412)..(412): n is a, c, g, or t
  misc_feature (2049)..(2049): n is a, c, g, or t
  misc_feature (3012)..(3012): n is a, c, g, or t
cccacatcggcccccataaccacggtggtgaccangggctgtgagccccagtgtgcctggtcagagtggctggactacagctaccccatgccggggncctctggcggggactttgacacctactcnaacatccgtgcggccggaggggcngtctgtgagcagcccctgggcctcgagtgccgtgcccaggcccagcctggtgtccccctgcgggagttgggccaggtcgtggaatgcagcctggactttggcctggtctgcaggaaccgtgagcaggtggggaagttcaagatgtgcttcaactatgaaatccgtgtgttctgctgcaactacggccactgccccagcaccccggccaccagctctacggccacgccctcctcnactccggggacgacctggatcctcacanagctgaccacaacagccactacgactgagtccactggatccacggccaccccgtcctccaccccagggaccacctggatcctcacagagctgaccacaacagccactacgactgcgtccactggatccacggccaccctgtcctccaccccagggaccacctggatcctcacagagccgagcactacagccaccgtgacggtgcccaccggatccacggccaccgcctcctccacccaggcaactgctggcaccccacatgtgagcaccacggccacgacacccacagtcaccagctccaaagccactccctcctccagtccagggactgcaactgcccttccagcactgagaagcacagccaccacacccacagctaccagctttacagccatcccctcctcctccctgggcaccacctggacccgcctatcacagaccaccacacccacggccaccatgtccacagccacaccctcctccactccagagactgtccacacctccacagtgcttaccgccacggccaccacaaccggggccaccggctctgtggccaccccctcctccaccccaggaacagctcacactaccaaagtgccgactaccacaaccacgggcttcacagccaccccctcctccagcccagggacggcactcacgcctccagtgtggatcagcacaaccaccacacccacaaccaccacacccacaaccagtggctccacggtgaccccctcctccatcccggggaccacccacaccgccagagtgctgaccaccaccaccacaactgtggccactggttctatggcaacaccctcctctagcacacagaccagtggtactcccccatcactgaccaccacggccactacgatcacggccaccggctccaccaccaacccctcctcaactccagggacaacacccatccccccagtgctgaccagcacggccaccacacccgcagccaccagctccaaagccacttcctcctccagtccaaggactgcaaccacccttccagtgctgacaagcacagccacaaaatccacagctaccagctttacacccatcccctcctccaccctgtggaccacgtggaccgtcccagcacagaccaccacacccatgtccaccatgtccacaatccacacctcctctactccagagaccacccacacctccacagtgctgaccaccacagccaccatgacaagggccaccaattccacggccacaccctcctccactctggggacgacccggatcctcactgagctgaccacaacagccactacaactgcagccactggatccacggccaccctgtcctccaccccagggaccacctggatcctcacagagccgagcactatagccaccgtgatggtgcccaccggttccacggccaccgcctcctccactctgggaacagctcacacccccaaagtggtgaccaccatggccactatgcccacagccactgcctccacggttcccagctcgtccaccgtggggaccacccgcacccctgcagtgctccccagcagcctgccaaccttcagcgtgtccactgtgtcctcctcagtcctcaccaccctgagacccactggcttccccagctcccacttntctactccctgcttctgcagggcatttggacagtttttctcgcccggggaagtcatctacaataagaccgaccgagccggctgccatttctacgcagtgtgcaatcagcactgtgacattgaccgcttccagggcgcctgtcccacctccccaccgccagtgtcctccgccccgctgtcctcgccctcccctgcccctggctgtgacaatgccatccctctccggcaggtgaatgagacctggaccctggagaactgcacggtggccaggtgcgtgggtgacaaccgtgtcgtcctgctggacccaaagcctgtggccaacgtcacctgcgtgaacaagcacctgcccatcaaagtgtcggacccgagccagccctgtgacttccactatgagtgcgagtgcatctgcagcatgtggggcggctcccactattccacctttgacggcacctcttacaccttccggggcaactgcacctatgtcctcatgagagagatccatgcacgctttgggaatctcagcctctacctggacaaccactactgcacggcctctgccactgccgctgccgcccgctgcccccgcgccctcagcatccactacaagtccatggatatcgtcctcactgtcaccatggtgcatgggaaggaggagggcctgatcctgtttgaccaaattccggtgagcagcggtttcagcaagaacggcgtgcttgtgtctgtgctggggaccaccaccatgcgtgtggacattcctgccctgggcgtgagcgtcaccttcaatggccaagtcttccaggcccggctgccctacagcctcttccacaacaacaccgagggccagtgcggcacctgcaccaacaaccagagggacgactgtctccagcgggacggaaccactgccgccagttgcaaggacatggccaagacgtggctggtccccgacagcagaaaggatggctgntgggccccgactggcacaccccccactgccagccccgcagccccggtgtctagcacacccacccccaccccatgcccaccacagctgctctgtgatctgatgctgagccaggtctttgctgagtgccacacccttctgcccccgggcccattcttcaacgcctgcatcagcgaccactgcaggggccgccttgaggtgccctgccagagcctggaggcttacgcagagctctgccgcgcccggggagtgtgcagtgactggcgaggtgcaaccggtggcctgtgcgacctcacctgcccacccaccaaagtgtacaagccatgcggccccatacagcctgccacctgcaactctaggaaccagagcccacagctggaggggatggcggagggctgcttctgccctgaggaccagatcctcttcaacgcacacatgggcatctgcgtgcaggcctgcccctgcgtgggacccgatgggtttcctaaatttcccggggagcggtgggtcagcaactgccagtcctgcgtgtgtgacgagggttcagtgtcggtgcagtgcaagcccctgccctgtgacgcccagggtcagcccccgccgtgcaaccgtcccggcttcgtaaccgtgaccaggccccgggccgagaacccctgctgccccgagacggtgtgcgtgtgcaacacaaccacctgcccccagagcctgcctgtgtgcccgccagggcaggagtccatctgcacccaggaggagggcgactgctgtcccaccttccgctgcagacctcagctgtgttcgtacaatggcaccttctacggggttggtgcaaccttcccaggcgcccttccctgccacatgtgtacctgcctctctggggacacccaggacccaacggtgcaatgtcaggaggatgcctgcaacaatactacctgtccccagggctttgagtacaagagagtggccgggcagtgctgtggggagtgcgtccagaccgcctgcctcacgcccgatggccagccagtccagctgaatgaaacctgggtcaacagccatgtggacaactgcaccgtgtacctctgtgaggctgagggtggagtccatttgctgaccccacagcctgcatcctgcccagatgtgtccagctgcagggggagcctcaggaaaaccggctgctgctactcctgtgaggaggactcctgtcaagtccgcatcaacacgaccatcctgtggcaccagggctgcgagaccgaggtcaacatcaccttctgcgagggctcctgccccggagcgtccaagtactcagcagaggcccaggccatgcagcaccagtgcacctgctgccaggagaggcgggtccacgaggagacggtgcccttgcactgtcctaacggctcagccatcctgcacacctacacccacgtggatgagtgtggctgcacgcccttctgtgtccctgcgcccatggctcccccacacacccgtggcttcccggcccaggaggccactgctgtctgagaacgttctgcctccatccccatgctctgtccacctggagccaggatgtgcattgtctgatcatgaaaaccttgggcctcctctgcggagccccccggcctgtgtgtggcaccccgcgctccgtgctcctgctgcccaccccgtgggtgaaaccggccccagaagggtgaggggccagcaggacccctttcgggagggcgccactcaggagtcctaccctgggagagcctgtggcccaccttggccttgcccctccctgatgtcactgggacgccctggaacaaactaagcatgtgcgggcctatgtgtccctgccacggccggagcgcccgcgcagcacggattccagctggccacgtccggccgctggggcagacaggctggtccaggcaaggccagctgctgccaggaagctgcgacaggcaaggcggccgcctgtccatgcctgctgcagggtaactcagggctgaggtcgcaacggccaggtcagagaggggtcagcatcccaaagccccctctgctcaacccagcccagttttgcaaataaaccctgagcattgagtacgtt

SEQ ID NO: 73519 - DNA, 3990 bp, Homo sapiens
  misc_feature (950)..(950): n is a, c, g, or t
  misc_feature (1913)..(1913): n is a, c, g, or t
aattcgagctccgtacacgcacggagtgcaatggctccacggtgaccccctcctccatcccggggaccacccacaccgccagagtgctgaccaccaccaccacaactgtggccactggttctatggcaacaccctcctctagcacacagaccagtggtactcccccatcactgaccaccacggccactacgatcacggccaccggctccaccaccaacccctcctcaactccagggacaacacccatccccccagtgctgaccagcacggccaccacacccgcagccaccagctccaaagccacttcctcctccagtccaaggactgcaaccacccttccagtgctgacaagcacagccacaaaatccacagctaccagctttacacccatcccctcctccaccctgtggaccacgtggaccgtcccagcacagaccaccacacccatgtccaccatgtccacaatccacacctcctctactccagagaccacccacacctccacagtgctgaccaccacagccaccatgacaagggccaccaattccacggccacaccctcctccactctggggacgacccggatcctcactgagctgaccacaacagccactacaactgcagccactggatccacggccaccctgtcctccaccccagggaccacctggatcctcacagagccgagcactatagccaccgtgatggtgcccaccggttccacggccaccgcctcctccactctgggaacagctcacacccccaaagtggtgaccaccatggccactatgcccacagccactgcctccacggttcccagctcgtccaccgtggggaccacccgcacccctgcagtgctccccagcagcctgccaaccttcagcgtgtccactgtgtcctcctcagtcctcaccaccctgagacccactggcttccccagctcccacttntctactccctgcttctgcagggcatttggacagtttttctcgcccggggaagtcatctacaataagaccgaccgagccggctgccatttctacgcagtgtgcaatcagcactgtgacattgaccgcttccagggcgcctgtcccacctccccaccgccagtgtcctccgccccgctgtcctcgccctcccctgcccctggctgtgacaatgccatccctctccggcaggtgaatgagacctggaccctggagaactgcacggtggccaggtgcgtgggtgacaaccgtgtcgtcctgctggacccaaagcctgtggccaacgtcacctgcgtgaacaagcacctgcccatcaaagtgtcggacccgagccagccctgtgacttccactatgagtgcgagtgcatctgcagcatgtggggcggctcccactattccacctttgacggcacctcttacaccttccggggcaactgcacctatgtcctcatgagagagatccatgcacgctttgggaatctcagcctctacctggacaaccactactgcacggcctctgccactgccgctgccgcccgctgcccccgcgccctcagcatccactacaagtccatggatatcgtcctcactgtcaccatggtgcatgggaaggaggagggcctgatcctgtttgaccaaattccggtgagcagcggtttcagcaagaacggcgtgcttgtgtctgtgctggggaccaccaccatgcgtgtggacattcctgccctgggcgtgagcgtcaccttcaatggccaagtcttccaggcccggctgccctacagcctcttccacaacaacaccgagggccagtgcggcacctgcaccaacaaccagagggacgactgtctccagcgggacggaaccactgccgccagttgcaaggacatggccaagacgtggctggtccccgacagcagaaaggatggctgntgggccccgactggcacaccccccactgccagccccgcagccccggtgtctagcacacccacccccaccccatgcccaccacagctgctctgtgatctgatgctgagccaggtctttgctgagtgccacacccttctgcccccgggcccattcttcaacgcctgcatcagcgaccactgcaggggccgccttgaggtgccctgccagagcctggaggcttacgcagagctctgccgcgcccggggagtgtgcagtgactggcgaggtgcaaccggtggcctgtgcgacctcacctgcccacccaccaaagtgtacaagccatgcggccccatacagcctgccacctgcaactctaggaaccagagcccacagctggaggggatggcggagggctgcttctgccctgaggaccagatcctcttcaacgcacacatgggcatctgcgtgcaggcctgcccctgcgtgggacccgatgggtttcctaaatttcccggggagcggtgggtcagcaactgccagtcctgcgtgtgtgacgagggttcagtgtcggtgcagtgcaagcccctgccctgtgacgcccagggtcagcccccgccgtgcaaccgtcccggcttcgtaaccgtgaccaggccccgggccgagaacccctgctgccccgagacggtgtgcgtgtgcaacacaaccacctgcccccagagcctgcctgtgtgcccgccagggcaggagtccatctgcacccaggaggagggcgactgctgtcccaccttccgctgcagacctcagctgtgttcgtacaatggcaccttctacggggttggtgcaaccttcccaggcgcccttccctgccacatgtgtacctgcctctctggggacacccaggacccaacggtgcaatgtcaggaggatgcctgcaacaatactacctgtccccagggctttgagtacaagagagtggccgggcagtgctgtggggagtgcgtccagaccgcctgcctcacgcccgatggccagccagtccagctgaatgaaacctgggtcaacagccatgtggacaactgcaccgtgtacctctgtgaggctgagggtggagtccatttgctgaccccacagcctgcatcctgcccagatgtgtccagctgcagggggagcctcaggaaaaccggctgctgctactcctgtgaggaggactcctgtcaagtccgcatcaacacgaccatcctgtggcaccagggctgcgagaccgaggtcaacatcaccttctgcgagggctcctgccccggagcgtccaagtactcagcagaggcccaggccatgcagcaccagtgcacctgctgccaggagaggcgggtccacgaggagacggtgcccttgcactgtcctaacggctcagccatcctgcacacctacacccacgtggatgagtgtggctgcacgcccttctgtgtccctgcgcccatggctcccccacacacccgtggcttcccggcccaggaggccactgctgtctgagaacgttctgcctccatccccatgctctgtccacctggagccaggatgtgcattgtctgatcatgaaaaccttgggcctcctctgcggagccccccggcctgtgtgtggcaccccgcgctccgtgctcctgctgcccaccccgtgggtgaaaccggccccagaagggtgaggggccagcaggacccctttcgggagggcgccactcaggagtcctaccctgggagagcctgtggcccaccttggccttgcccctccctgatgtcactgggacgccctggaacaaactaagcatgtgcgggcctatgtgtccctgccacggccggagcgcccgcgcagcacggattccagctggccacgtccggccgctggggcagacaggctggtccaggcaaggccagctgctgccaggaagctgcgacaggcaaggcggccgcctgtccatgcctgctgcagggtaactcagggctgaggtcgcaacggccaggtcagagaggggtcagcatcccaaagccccctctgctcaacccagcccagttttgcaaataaaccctgagcattgagtacgtt

SEQ ID NO: 73520 - DNA, 6154 bp, Homo sapiens
  misc_feature (35)..(35): n is a, c, g, or t
  misc_feature (97)..(97): n is a, c, g, or t
  misc_feature (126)..(126): n is a, c, g, or t
  misc_feature (150)..(150): n is a, c, g, or t
  misc_feature (384)..(384): n is a, c, g, or t
  misc_feature (412)..(412): n is a, c, g, or t
  misc_feature (846)..(846): n is a, c, g, or t
  misc_feature (4147)..(4147): n is a, c, g, or t
  misc_feature (5110)..(5110): n is a, c, g, or t
cccacatcggcccccataaccacggtggtgaccangggctgtgagccccagtgtgcctggtcagagtggctggactacagctaccccatgccggggncctctggcggggactttgacacctactcnaacatccgtgcggccggaggggcngtctgtgagcagcccctgggcctcgagtgccgtgcccaggcccagcctggtgtccccctgcgggagttgggccaggtcgtggaatgcagcctggactttggcctggtctgcaggaaccgtgagcaggtggggaagttcaagatgtgcttcaactatgaaatccgtgtgttctgctgcaactacggccactgccccagcaccccggccaccagctctacggccacgccctcctcnactccggggacgacctggatcctcacanagctgaccacaacagccactacgactgagtccactggatccacggccaccccgtcctccaccccagggaccacctggatcctcacagagccgagcactacagccaccgtgacggtgcccaccggatccacggccaccgcctcctccacccaggcaactgctggcaccccacatgtgagcaccacggccacgacacccacagtcaccagctccaaagccactcccttctccagtccagggactgcaaccgcccttccagcactgagaagcacagccaccacacccacagctaccagctttacagccatcccctcctcctccctgggcaccacctggacccgcctatcacagaccaccacacccacggccaccatgtccacagccacaccctcctccactccagagactgcccacacctccacagtgcttaccacnacggccaccacaaccagggccaccggctctgtggccaccccctcttccaccccaggaacagctcacactaccaaagtgccgactaccacaaccacgggcttcacagtcaccccctcctccagcccagggacggcacgcacgcctccagtgtggatcagcacaaccaccacacccacaaccagtggctccacggtgaccccctcctccatcccggggaccacccacacccccacagtgctgaccaccaccaccacaactgtggccactggttctatggcaacaccctcctctagcacacagaccagtggtactcccccatcactgatcaccacggccactacgatcacggccaccggctccaccaccaacccctcctcaactccagggacaacacctatccccccagtgctgaccaccaccgccaccacacctgcagccaccagcagcacagtgactccctcctctgccctagggaccacccacacacccccagtgccgaacaccacggccaccacacacgggcgatccctgtcccccagcagtccccacacggtgcgcacagcctggacttcggccacctcaggcaccttgggcaccacccacatcacagagccttccacggggacttcccacaccccagcagcaaccaccggtaccacccagcactcgactccagccctgtccagccctcaccctacgcagcaggaccaccgagtcacccccttccccagggacgaccaccccgggccacaccacggccacctccaggaccacggccacggccacacccagcaagacccgcacctcgaccctgctgcccagcagccccacatcggcccccataaccacggtggtgaccacgggctgtgagccccagtgtgcctggtcagagtggctggactacagctaccccatgccggggccctctggcggggactttgacacctactccaacatccgtgcggccggaggggccgtctgtgagcagcccctgggcctcgagtgccgtgcccaggcccagcctggtgtccccctgggggagttgggccaggtcgtggaatgcagcctggactttggcctggtctgcaggaaccgtgagcaggtggggaagttcaagatgtgcttcaactatgaaatccgtgtgttctgctgcaactacggccactgccccagcaccccggccaccagctctacggccatgccctcctccactccggggacgacctggatcctcacagagctgaccacaacagccactacgactgcatccactggatccacggccaccccgtcctccaccccgggaacagctccccctcccaaagtgctgaccagcccggccaccacacccacagccaccagttccaaagccacttcctcctccagtccaaggactgcaaccacccttccagtgctgacaagcacagccaccaaatccacagctaccagcgttacacccatcccctcctccacccttgggaccaccgggaccctcccagaacagaccaccacacccgtggccaccatgtccacaatccacccctcctccactccggagaccacccacacctccacagtgctgaccacgaaggccaccacgacaagggccaccagttccacgtccaccccctcctccactccggggacgacctggatcctcacagagctgaccacagcagccactacaactgcagccactggccccacggccaccccgtcctccaccccagggaccacctggatcctcacagagctgaccacaacagccactacgactgcgtccactggatccacggccaccctgtcctccaccccagggaccacctggatcctcacagagccgagcactacagccaccgtgacggtgcccaccggatccacggccaccgcctcctccacccaggcaactgctggcaccccacatgtgagcaccacggccacgacacccacagtcaccagctccaaagccactccctcctccagtccagggactgcaactgcccttccagcactgagaagcacagccaccacacccacagctaccagctttacagccatcccctcctcctccctgggcaccacctggacccgcctatcacagaccaccacacccacggccaccatgtccacagccacaccctcctccactccagagactgtccacacctccacagtgcttaccgccacggccaccacaaccggggccaccggctctgtggccaccccctcctccaccccaggaacagctcacactaccaaagtgccgactaccacaaccacgggcttcacagccaccccctcctccagcccagggacggcactcacgcctccagtgtggatcagcacaaccaccacacccacaaccaccacacccacaaccagtggctccacggtgaccccctcctccatcccggggaccacccacaccgccagagtgctgaccaccaccaccacaactgtggccactggttctatggcaacaccctcctctagcacacagaccagtggtactcccccatcactgaccaccacggccactacgatcacggccaccggctccaccaccaacccctcctcaactccagggacaacacccatccccccagtgctgaccagcacggccaccacacccgcagccaccagctccaaagccacttcctcctccagtccaaggactgcaaccacccttccagtgctgacaagcacagccacaaaatccacagctaccagctttacacccatcccctcctccaccctgtggaccacgtggaccgtcccagcacagaccaccacacccatgtccaccatgtccacaatccacacctcctctactccagagaccacccacacctccacagtgctgaccaccacagccaccatgacaagggccaccaattccacggccacaccctcctccactctggggacgacccggatcctcactgagctgaccacaacagccactacaactgcagccactggatccacggccaccctgtcctccaccccagggaccacctggatcctcacagagccgagcactatagccaccgtgatggtgcccaccggttccacggccaccgcctcctccactctgggaacagctcacacccccaaagtggtgaccaccatggccactatgcccacagccactgcctccacggttcccagctcgtccaccgtggggaccacccgcacccctgcagtgctccccagcagcctgccaaccttcagcgtgtccactgtgtcctcctcagtcctcaccaccctgagacccactggcttccccagctcccacttntctactccctgcttctgcagggcatttggacagtttttctcgcccggggaagtcatctacaataagaccgaccgagccggctgccatttctacgcagtgtgcaatcagcactgtgacattgaccgcttccagggcgcctgtcccacctccccaccgccagtgtcctccgccccgctgtcctcgccctcccctgcccctggctgtgacaatgccatccctctccggcaggtgaatgagacctggaccctggagaactgcacggtggccaggtgcgtgggtgacaaccgtgtcgtcctgctggacccaaagcctgtggccaacgtcacctgcgtgaacaagcacctgcccatcaaagtgtcggacccgagccagccctgtgacttccactatgagtgcgagtgcatctgcagcatgtggggcggctcccactattccacctttgacggcacctcttacaccttccggggcaactgcacctatgtcctcatgagagagatccatgcacgctttgggaatctcagcctctacctggacaaccactactgcacggcctctgccactgccgctgccgcccgctgcccccgcgccctcagcatccactacaagtccatggatatcgtcctcactgtcaccatggtgcatgggaaggaggagggcctgatcctgtttgaccaaattccggtgagcagcggtttcagcaagaacggcgtgcttgtgtctgtgctggggaccaccaccatgcgtgtggacattcctgccctgggcgtgagcgtcaccttcaatggccaagtcttccaggcccggctgccctacagcctcttccacaacaacaccgagggccagtgcggcacctgcaccaacaaccagagggacgactgtctccagcgggacggaaccactgccgccagttgcaaggacatggccaagacgtggctggtccccgacagcagaaaggatggctgntgggccccgactggcacaccccccactgccagccccgcagccccggtgtctagcacacccacccccaccccatgcccaccacagctgctctgtgatctgatgctgagccaggtctttgctgagtgccacacccttctgcccccgggcccattcttcaacgcctgcatcagcgaccactgcaggggccgccttgaggtgccctgccagagcctggaggcttacgcagagctctgccgcgcccggggagtgtgcagtgactggcgaggtgcaaccggtggcctgtgcgacctcacctgcccacccaccaaagtgtacaagccatgcggccccatacagcctgccacctgcaactctaggaaccagagcccacagctggaggggatggcggagggctgcttctgccctgaggaccagatcctcttcaacgcacacatgggcatctgcgtgcaggcctgcccctgcgtgggacccgatgggtttcctaaatttcccggggagcggtgggtcagcaactgccagtcctgcgtgtgtgacgagggttcagtgtcggtgcagtgcaagcccctgccctgtgacgcccagggtcagcccccgccgtgcaaccgtcccggcttcgtaaccgtgaccaggccccgggccgagaacccctgctgccccgagacggtgtgcgtgtgcaacacaaccacctgcccccagagcctgcctgtgtgcccgccagggcaggagtccatctgcacccaggaggagggcgactgctgtcccaccttccgctgcagacctcagctgtgttcgtacaatggcaccttctacggggttggtgcaaccttcccaggcgcccttccctgccacatgtgtacctgcctctctggggacacccaggacccaacggtgcaatgtcaggaggatgcctgcaacaatactacctgtccccagggctttgagtacaagagagtggccgggcagtgctgtggggagtgcgtccagaccgcctgcctcacgcccgatggccagccagtccaggtaacagcagaggcatgtgggggc

SEQ ID NO: 73521 - DNA, 296 bp, Homo sapiens
caggcagccaggttaaggcagtggtaagggcttgtggaaatcctcttctacctgttttttcttgggagatggggagattttgtgaggaagagaaggtatgaagcagtcaccctagagaatgggcagatgactgtgctagggaaatagagtggcattgctgggcagcaccaaaggcccacttgaggttcatggtataaactgatgagactaatgagcctggtcgtgtggttttctaccgcccatttagttgcctgggtaaaggtggagagctactgaatttaatatttatccctaag

SEQ ID NO: 73522 - DNA, 7499 bp, Homo sapiens
atgcccagtgatgccaaagacagtgttaatggtgaccttttgttaaattggacaagtcttaaaaatattttaagtggtcttaatgcttcttttcctcttcacaacaatactggctcaagcacagtcactacttcaaaatccatcaaagacccaagactgatgaggagagaagaaagtatgggagaacagagtagtactgcaggcttaaatgaggttttgcaatttgagaagagttcagataatgttaattcagaaataaaatcgacaccatctaattctgcctcctcctcagaagttgtccctggtgatcgtgctgttcttactaatggtttggataccccttgctttaaaacttctgttaatgattcacaatcttgggctcacaacatgggctctgaggactatgactgtatacctcccaataaagttaccatggcagggcaatgtaaggaccaaggtaatttttccttcccaatttctgtgtcaaatgtagtgtcagaggttgagaaccaaaaccacagtgaggagaaggctcagagagcccaacaggagtccggtaatgcttatacaaaagagtacagtagtcacatttttcaggactcgcagtcttctgatttaaaaacaatttatcagactggttgccaaacgtctacagtttttccactcaaaaagaaagtaagcattgatgaataccttcaaaatactggaaagatgaaaaacttcgctgacctggaagacagttccaaacatgaagaaaagcaaacttcatggaaagaaattgataatgatttcactaatgaaacaaaaatcagtccaatagataattacattgttttgcaccaagaatacaaagagagtgagagtcataattcttttgggaaaagctgtgataaaatattaattactcaagagttagaaataacaaaatcttctacatctaccataaaggataaggatgaactagatcatctagcattggaatggcaaattactccaagttttgagagcctgtcacaaaagcatcctcagcactctgtggagtatgagggtaacattcatacaagtttagccattgctcaaaagctaatggaactgaaattggggaaaataaatcaaaattatgctagcattataactgaagctttcccgaaaccaaaagacataccccaggccaaagaaatgttcattgatacagttatttcatcttataacatagaaacagctcatgacagttcaaattgcagcataactagagaacatatatgtgtccataggaaaaatgaaaatgaaccagtgtcattagagaacattcagagagactataaagaaactgcttatgttgaagataggggtcaggatcacaatctgttctgtaattcacagttaagcaatgatatatggctgaatgttaatttcaaaaaacaaacagatagagaaaaccaaaatgaggctaaagagaatagtgcttcatgtgtagaaaacaacatagagaacatatatggagacaaaaagcaggattctcatacaaacgaaaatttcagcaatatagatgaaaaggaggacaaaaattaccacaatatagaaattttgagttctgaagaattttctactaaatttaacttgatttgcagagaagataatgcagtgtcagcagcaactgcattattagagagtgaagaagataccattagtgccgtgaaacaaaaagatactgaaaatactggaagaagtgtagagcatttggcttccacgacatttcccaaaactgcaagttcttcagtgtgtgtagcctcaaatgctgcaatacagatagctagtgctactatgcctgcattaagcctaaataatgacgatcaccagatataccagtttaaagaaacttgttcttctgaaagtccagattttggtttgttagtaaaacatagggtttctgattgtgaaattgatacggataaaaataaatcacaagaatcatttcatcaatcaataaatgagaacttagttcttcagagcattgaattggaaagtgaaattgaaatagaattagaagattgtgatgatgcttttatatttcaacaagatacacatagccatgaaaacatgctttgtgaagaatttgtgacctcatataaggctctgaagtctcgtatcagttgggaaggtctgttagcacttgataacggggagatggaagttttggaaagcaccacaggaagggagaatagtgatcagcattattctaaggaaagtaactatttttattcctctacacaaaacaatgaaacagaacttaccagcccaattttacttccagatctacaaattaaaattactaatatatttaggccaggattcagcccgacagctgactcccttgcattgaaagatagtttttgcacacatgtaactgaagccacaaaaccggaaataaataaggaagatggagaaattctaggatttgacatttattcccagccttttggtgaaaatgcagattatccatgtgaagataaagttgataatataaggcaagaatcagggccagtgagtaactctgaaatctccctttcttttgacttgagtcgtaatacagatgtgaatcatacgtctgaaaatcagaacagtgaatctttgtttactgaaccttctaatgtcacaacaatagatgatggaagcagatgtttctttacaaaatcaaaaactgactataatgataccaaaaataaaaaggaggtagaatcaagaattagcaaaaggaagctacatatatcttccagggatcagaacataccacataaagatttaagacgacataaaatttatgggagaaagaggaggctaaccagtcaagactcatctgagtgtttctcttcattatcccaaggacgaattaaaacattttcacagtcagaaaagcacattaagagtgtcctaaatatcctaagtgatgaagcatctttatgtaaaagcaaatgtctttccagaaaactagacaaagcagttgttcacttaaaaaaagctcatagaagagttcacacatctttgcagcttataactaaagtaggagaagaaagaaagggcccattaccaaaatcatatgcagtaatatgcaataatttctgggaaagttgtgaccttcaaggttatagttctgtgtctcaaagaaaatattattctactaagcatttttcgtcaaaaagaaaatatgacaaacggagaaagaaaagagctccaaaagctgatatttctaaatcattaacccatgtgtcaaagcacaagtcttataaaacaagtggagagaaaaaatgcctttctaggaaaagtatggctagcagtgtctcaaaaagtcaccccaccaccagtcacatgggagaattttgtaatcaagaacatcctgaatcacagttgcctgtatcctccacatcccaaagtacaagtcagtcagtttattataatagcagtgtaagcaatccaagtttatcagaagaacatcagcccttttctggaaaaactgcatatctgttttccccagaccactcagatgagaaactaatagaaaaagaaaatcaaattgatacagcatttttatctagcactagtaaatatgaaaagcttgaaaaacattcagcaaatcataatgttaaagatgcaactaaagaaaacagttgtgacgctaatgaagtaataaatgaaagtaattctgtatctttaagttgcataaaagaaaacataaattctagtacaggcaacgattgtgatgcaacttgcataggtcacacaaaggcgaaaactgacgtacttatatcagtcttagattcaaatgtgaagcactttttaaatgatctctaccaacaaggtaaccttattttatctgattgtaaaagaaacctggaagtaaagtggacagatcctattgagagacccaaacaaagcattattacaggaaacttccttatgggcccattaaacctaactttgatagcaagtaaaaagtacagtattcctcaggtatcagccgctgcagtgacagatagtgagggagaatcttcaaaatcttacttggataagcagagaattcttactgtagattcttttgcagcatccagtactgtaccacactgtgagcagagctgtagagaaaaagagcttctaaagacagaacagtgctcttcagaaggaagattttacagctgaagagaaaagaaaaaatgaatattcatattgtaaaacctggggaaaataacaataaatttagtatttctacgatgttgcccccagtatcagagtgcataaacaaaaacatctcaaattcctctaaaaaacgaccgagcactgtagacaaatgtgaagactctcaggaacaacagcaagatactactgtttccagttgtaaaaagctaaaggtagacatgaaagatgtcacaaaaatcaacagagaaaaggcaacattcaagcatccaaggactacaggatctcatcccaaaagcgaaaacaaaatagtaccaagttcatgtgacagtctgaaaagaaatcatttaacgccaaaaaaggttgaaatgcaaagatcactacctggctcacttttacccttagagaacccaaaagacacttgcgcatcaaagtcggaaagcaaaatagacttaactgtttcatctgatcacttcagtggacaacaggaaaatttaaatagcatgaagaaaagaaatgtgaacttcagtgctgctgaaacaaaaagtgataagaaagattgtgctgcttttgcaatttgtgaccaaaaaagtgtacatggcacattttcaccagaccatgggacgcttttgcagaaatttcttaaaaattccccagatcccacccaaaaatcctgcctttctgatataaacccagaaactgatgtttctcttgtgcctgatgcgtcggtgctctcaaagccaattttctgttttgtgaaagatgtccatcctgatctagaaatgaatgacacagtctttgaacttcaagataatgatatagtaaattcatctattaaaaattcctcatgcatgacttctccagaacccatctgtatccagaacaaaattcctactctgcagataaacaaactacagcctacagaaactgagtcagaggacaaatacatgaaggatacattgaatcccaatactgtgcatacttttggagcatctgggcatataacccttaatgtgaatcaaggagcagagtactctctttctgaacaacagaatgacaaaaattcaaaagtcctaatgcagaatgctgccacatattggaatgaacttccacagtctgcatgtaacccaacatataattcttctgagcatttatttggaacttcatatccatactctgcttggtgtgtttatcagtacagcaacagcaatggcaatgccattacccagacataccaagggataacatcatatgaagtacagccatctccttctgggctgttgaccacagttgcaagtactgcccagggcacacattctaatcttctgtactctcaatattttacttattttgcgggggagccacaagcaaatggctttgtgccagtgaatgggtattttcaatctcaaatacctgcttctaattttcggcagccaattttttcacaatatgcttctcatcagccattaccacaagctacatacccttaccttcctaatcgatttgtgcctccagaagttccttgggtttatgctccatggcaccaagaatcctttcatccaggacactgaaaatagtcttctgtctattgaaataagacataacaagtttttccaaatattttttacttatatattttttaacatttagcgatttttaatgtttgtaaatgtggtaggaaatataaatcatatggtcctttgtaaaatatacaaataatctaacacatatcatataggacatcaatttctaacatctgatataccagaattatttccatgcaattataaggggagggtaatatgatcaaagttaagcaatagtggtaaaatctttaaaactagattcttgcttctgatatgtttcaatacattgttgatggcattgtgccatttgagctgaaagcaggattttttttcattagtcatcaaaccaagaattttataattcttgacactttattatataatttacaattctatgccagatatggcaaatttcttcaatttcagtattttatagtttctacttgtaaaatatttttaataagaaaaattggtttgcataatctcagtgtttccttgagtagagatgttttaaatgtttatgttggaagcaattgtagttaattatattggcaatgaagcactttcaatgcctttttctacaagagccatttccagaagattattttgtttttggatttcacaatttaaatagttattttaatgattttctagcaaataatagagaataatgtttatgcttatgcagttagtctttattacagtaatttaaacaatgtggcacaaacatagttttttcatgctcttgtcatagacttttctttttaaccttctgcaaaagtaaaaactctcttagtaataatcatcatagggcaacaggatatagtatgtaactgcagtcttgagctgtctcttttcatgtattacctttcttgctcaacagctattcctgttttctgtaagatcctagtcagacagagccctcacaactggatagacctttctcaagggttagccctaaaatgtgacaagagaattggtttggctgaatcacaacaaataactagcaaagcttcagtgcttttgcaaactttttatgtaagcaaactttttgtgttatctggcacaggcctttgaaaagactataattctactttgtttaatgtagagtaactaatttttcaatttagaaagacagtgagaatccccaggataagcctctttatactcacttaaaccaactgggatggaattcagaatacctaagctgcttctttaacatagagatctttaaaaagggaaggtcaagcaaagaactgtaaccgaaagaagtaagagatttgaaaagacgatagagttaaaacaatatttaaaaaacatttctatttggtccatgcagttttatttgaaaatagtctgtcaaaatcagaactcctgaacaactttgaaagcagtaatattaactggtattcaaaaatgaataacagccaaaaatgaataacagccatttgatttatgtttccctcagtcatttggtttatgtttggttatggcaagatgttacagcatttatagttaatactactactaatatgtaaaccaaaagttaaatattctagttaaggattgtttctttaaacaactttcagattctgttgacattgtctttgtggtatttttatttcatgggttttaatttctcttaaagacttacctaaatattcagttacatttttaaaaaatctgtacgtgacagaatattaaaacatggaatatttttgcttc

SEQ ID NO: 73523 - DNA, 10110 bp, Homo sapiens
atgcccagtgatgccaaagacagtgttaatggtgaccttttgttaaattggacaagtcttaaaaatattttaagtggtcttaatgcttcttttcctcttcacaacaatactggctcaagcacagtcactacttcaaaatccatcaaagacccaagactgatgaggagagaagaaagtatgggagaacagagtagtactgcaggcttaaatgaggttttgcaatttgagaagagttcagataatgttaattcagaaataaaatcgacaccatctaattctgcctcctcctcagaagttgtccctggtgatcgtgctgttcttactaatggtttggataccccttgctttaaaacttctgttaatgattcacaatcttgggctcacaacatgggctctgaggactatgactgtatacctcccaataaagttaccatggcagggcaatgtaaggaccaaggtaatttttccttcccaatttctgtgtcaaatgtagtgtcagaggttgagaaccaaaaccacagtgaggagaaggctcagagagcccaacaggagtccggtaatgcttatacaaaagagtacagtagtcacatttttcaggactcgcagtcttctgatttaaaaacaatttatcagactggttgccaaacgtctacagtttttccactcaaaaagaaagtaagcattgatgaataccttcaaaatactggaaagatgaaaaacttcgctgacctggaagacagttccaaacatgaagaaaagcaaacttcatggaaagaaattgataatgatttcactaatgaaacaaaaatcagtccaatagataattacattgttttgcaccaagaatacaaagagagtgagagtcataattcttttgggaaaagctgtgataaaatattaattactcaagagttagaaataacaaaatcttctacatctaccataaaggataaggatgaactagatcatctagcattggaatggcaaattactccaagttttgagagcctgtcacaaaagcatcctcagcactctgtggagtatgagggtaacattcatacaagtttagccattgctcaaaagctaatggaactgaaattggggaaaataaatcaaaattatgctagcattataactgaagctttcccgaaaccaaaagacataccccaggccaaagaaatgttcattgatacagttatttcatcttataacatagaaacagctcatgacagttcaaattgcagcataactagagaacatatatgtgtccataggaaaaatgaaaatgaaccagtgtcattagagaacattcagagagactataaagaaactgcttatgttgaagataggggtcaggatcacaatctgttctgtaattcacagttaagcaatgatatatggctgaatgttaatttcaaaaaacaaacagatagagaaaaccaaaatgaggctaaagagaatagtgcttcatgtgtagaaaacaacatagagaacatatatggagacaaaaagcaggattctcatacaaacgaaaatttcagcaatatagatgaaaaggaggacaaaaattaccacaatatagaaattttgagttctgaagaattttctactaaatttaacttgatttgcagagaagataatgcagtgtcagcagcaactgcattattagagagtgaagaagataccattagtgccgtgaaacaaaaagatactgaaaatactggaagaagtgtagagcatttggcttccacgacatttcccaaaactgcaagttcttcagtgtgtgtagcctcaaatgctgcaatacagatagctagtgctactatgcctgcattaagcctaaataatgacgatcaccagatataccagtttaaagaaacttgttcttctgaaagtccagattttggtttgttagtaaaacatagggtttctgattgtgaaattgatacggataaaaataaatcacaagaatcatttcatcaatcaataaatgagaacttagttcttcagagcattgaattggaaagtgaaattgaaatagaattagaagattgtgatgatgcttttatatttcaacaagatacacatagccatgaaaacatgctttgtgaagaatttgtgacctcatataaggctctgaagtctcgtatcagttgggaaggtctgttagcacttgataacggggagatggaagttttggaaagcaccacaggaagggagaatagtgatcagcattattctaaggaaagtaactatttttattcctctacacaaaacaatgaaacagaacttaccagcccaattttacttccagatctacaaattaaaattactaatatatttaggccaggattcagcccgacagctgactcccttgcattgaaagatagtttttgcacacatgtaactgaagccacaaaaccggaaataaataaggaagatggagaaattctaggatttgacatttattcccagccttttggtgaaaatgcagattatccatgtgaagataaagttgataatataaggcaagaatcagggccagtgagtaactctgaaatctccctttcttttgacttgagtcgtaatacagatgtgaatcatacgtctgaaaatcagaacagtgaatctttgtttactgaaccttctaatgtcacaacaatagatgatggaagcagatgtttctttacaaaatcaaaaactgactataatgataccaaaaataaaaaggaggtagaatcaagaattagcaaaaggaagctacatatatcttccagggatcagaacataccacataaagatttaagacgacataaaatttatgggagaaagaggaggctaaccagtcaagactcatctgagtgtttctcttcattatcccaaggacgaattaaaacattttcacagtcagaaaagcacattaagagtgtcctaaatatcctaagtgatgaagcatctttatgtaaaagcaaatgtctttccagaaaactagacaaagcagttgttcacttaaaaaaagctcatagaagagttcacacatctttgcagcttataactaaagtaggagaagaaagaaagggcccattaccaaaatcatatgcagtaatatgcaataatttctgggaaagttgtgaccttcaaggttatagttctgtgtctcaaagaaaatattattctactaagcatttttcgtcaaaaagaaaatatgacaaacggagaaagaaaagagctccaaaagctgatatttctaaatcattaacccatgtgtcaaagcacaagtcttataaaacaagtggagagaaaaaatgcctttctaggaaaagtatggctagcagtgtctcaaaaagtcaccccaccaccagtcacatgggagaattttgtaatcaagaacatcctgaatcacagttgcctgtatcctccacatcccaaagtacaagtcagtcagtttattataatagcagtgtaagcaatccaagtttatcagaagaacatcagcccttttctggaaaaactgcatatctgttttccccagaccactcagatgagaaactaatagaaaaagaaaatcaaattgatacagcatttttatctagcactagtaaatatgaaaagcttgaaaaacattcagcaaatcataatgttaaagatgcaactaaagaaaacagttgtgacgctaatgaagtaataaatgaaagtaattctgtatctttaagttgcataaaagaaaacataaattctagtacaggcaacgattgtgatgcaacttgcataggtcacacaaaggcgaaaactgacgtacttatatcagtcttagattcaaatgtgaagcactttttaaatgatctctaccaacaaggtaaccttattttatctgattgtaaaagaaacctggaagtaaagtggacagatcctattgagagacccaaacaaagcattattacaggaaacttccttatgggcccattaaacctaactttgatagcaagtaaaaagtacagtattcctcaggtatcagccgctgcagtgacagatagtgagggagaatcttcaaaatcttacttggataagcagagaattcttactgtagattcttttgcagcatccagtactgtaccacactgtgagcagagctgtagagaaaaagagcttctaaagacagaacagtgctcttcaggtaattgcctccatacagatgggaatgaaacaaatgtcactgagaattatgagttggatgtagcatcaggaactgaagaagataaaagttatggggaaaatatagtggaattatcttccagtgatagttctctgcttttaagagataatgtaaaaggctcctcttcagaaacatgtattgtgaagaaagacactgaggacagaataacgtggaaagttaaacaagcggaaaaagcaaaagattctgtttacaaaagaagcatgactgaaggatcaactgttaatactgagtacaaaaatcaaaagaatcagatctcagaagaatcctgcttaaatgagaaaattattacaactaacttgattgattcccatctgagcactaaaaatactaccactgagtcagtccctttgaagaacacagtttctaatccgcttaacaaaagagagaagaagggggaaattaaagttagtaaagactcgcagtctgacttgacattacattcagaaatagcctatatttccaaaccaggaattctaggagttaatcatacgcctattttacctgcccactctgaaacctgtaaagtccctactcttctgaagaaacctgcgtcatacgtgagtgattttaaagaaaaacattgctcagctaatcatacggcccttatagctaatctatctcaaattttgcagagggcagatgaagcatcatctttgcagattctacaggaagaaactaaggtttgtctaaatattctccctttatttgtggaagcttttgaaagaaagcaagaatgttcagttgaacaaatcctgatttcaagagaactgttggtagaccaaaacctgtggaataattgcaaacacacattaaaaccatgtgctgttgacactttggtagaacttcaaatgatgatggaaacaattcaattcattgaaaacaaaaaaaggcacttagaaggtgaaccaacattgcgaagcttgctttggtatgatgaaacactgtatgctgagcttcttggaaaaccacgtggatttcaacagcagtctaatttctatcctggtttccaaggaagattaaaatataatgcattctgtgagttacagacttaccatgatcaattagttgaattgcttgaagaaacaaaaagggaaaagaattcatactatgtattcttaaagtacaaacgacaggttaatgaatgtgaagccataatggagcattgttccgattgctttgatttttctctttctgttccatttacctgtggagttaactttggagatagtttagaagacctggaaatcttaagaaaaagtactttaaagttgatcaatgtatgtggggactctcctaaagttcattcgtatccaggaaaacaggaccatctgtggattatcatagaaatgatctcctcaaaggttaattttattaagaacaacgaggcagtacgtgttaaaatatctctttatggtctggaacatatcttttttgatgctgcaaaaaatcttgtttggaaagagagaacacaatccttcagcaaaaaatactcacaaaagaaggacgaagaaaggctactcagagtgaataaatgtgccttttctaagttgcagaagatatatgatactttgtctaaagatttaaacaatgaaccaatttcccctattgggcttgaggaggatactataattgcttccagaaagtcagatcatccaataaacgaagcaacaattagcatagaaaattctaaatttaacagtaatttgcttgcacacccagatatttgttgtattagtgagatattggatcaggctgaatttgcagaccttaaaaaattacaggatctcaccttgagatgtacagatcacttagaaattttaaaaaaatactttcagatgctacaagataataacatggataatatttttatcacagaagaaaatgttttagacgtggtgataaaccacagccatgaggctatcattttaaagcctgaagctattgaaatgtatattgaaatcgtcatggtctcagaaacaattcactttcttaaaaactcaatagcaaagaaactagacaaacagaggtttcgaggtatgctttggtttgatttgtcacttcttcctgagctggttcagtgccaagaaaaaatggcttctttttcatttcttaaagataactcaacagatgtttgcctttggaaagtgatagagactgctgtttccgaacttaagaaagatctggatattatctgcaaatataatgaagctgttaattgctcatatgctattcatttgctctcaagagaacttcaagaactttcagaaataaaaaagcttctgaagaagtccaagtattttatttccacatatattgactttgtgccatatatagcatccataaattatggaagcactgtgacagagttagaatacaactacaatcaattttctacactgctgaagaatgtaatgtctgcccctaggaaagatttaggaaaaatggcccacattaggaaagtcatgaaaacgattgaacatatgaagatgatatgtactaaaaatgctgaactaaccatttcctttttcctatgccaaatgctgtataacagaaggaagattttacagctgaagagaaaagaaaaaatgaatattcatattgtaaaacctggggaaaataacaataaatttagtatttctacgatgttgcccccagtatcagagtgcataaacaaaaacatctcaaattcctctaaaaaacgaccgagcactgtagacaaatgtgaagactctcaggaacaacagcaagatactactgtttccagttgtaaaaagctaaaggtagacatgaaagatgtcacaaaaatcaacagagaaaaggcaacattcaagcatccaaggactacaggatctcatcccaaaagcgaaaacaaaatagtaccaagttcatgtgacagtctgaaaagaaatcatttaacgccaaaaaaggttgaaatgcaaagatcactacctggctcacttttacccttagagaacccaaaagacacttgcgcatcaaagtcggaaagcaaaatagacttaactgtttcatctgatcacttcagtggacaacaggaaaatttaaatagcatgaagaaaagaaatgtgaacttcagtgctgctgaaacaaaaagtgataagaaagattgtgctgcttttgcaatttgtgaccaaaaaagtgtacatggcacattttcaccagaccatgggacgcttttgcagaaatttcttaaaaattccccagatcccacccaaaaatcctgcctttctgatataaacccagaaactgatgtttctcttgtgcctgatgcgtcggtgctctcaaagccaattttctgttttgtgaaagatgtccatcctgatctagaaatgaatgacacagtctttgaacttcaagataatgatatagtaaattcatctattaaaaattcctcatgcatgacttctccagaacccatctgtatccagaacaaaattcctactctgcagataaacaaactacagcctacagaaactgagtcagaggacaaatacatgaaggatacattgaatcccaatactgtgcatacttttggagcatctgggcatataacccttaatgtgaatcaaggagcagagtactctctttctgaacaacagaatgacaaaaattcaaaagtcctaatgcagaatgctgccacatattggaatgaacttccacagtctgcatgtaacccaacatataattcttctgagcatttatttggaacttcatatccatactctgcttggtgtgtttatcagtacagcaacagcaatggcaatgccattacccagacataccaagggataacatcatatgaagtacagccatctccttctgggctgttgaccacagttgcaagtactgcccagggcacacattctaatcttctgtactctcaatattttacttattttgcgggggagccacaagcaaatggctttgtgccagtgaatgggtattttcaatctcaaatacctgcttctaattttcggcagccaattttttcacaatatgcttctcatcagccattaccacaagctacatacccttaccttcctaatcgatttgtgcctccagaagttccttgggtttatgctccatggcaccaagaatcctttcatccaggacactgaaaatagtcttctgtctattgaaataagacataacaagtttttccaaatattttttacttatatattttttaacatttagcgatttttaatgtttgtaaatgtggtaggaaatataaatcatatggtcctttgtaaaatatacaaataatctaacacatatcatataggacatcaatttctaacatctgatataccagaattatttccatgcaattataaggggagggtaatatgatcaaagttaagcaatagtggtaaaatctttaaaactagattcttgcttctgatatgtttcaatacattgttgatggcattgtgccatttgagctgaaagcaggattttttttcattagtcatcaaaccaagaattttataattcttgacactttattatataatttacaattctatgccagatatggcaaatttcttcaatttcagtattttatagtttctacttgtaaaatatttttaataagaaaaattggtttgcataatctcagtgtttccttgagtagagatgttttaaatgtttatgttggaagcaattgtagttaattatattggcaatgaagcactttcaatgcctttttctacaagagccatttccagaagattattttgtttttggatttcacaatttaaatagttattttaatgattttctagcaaataatagagaataatgtttatgcttatgcagttagtctttattacagtaatttaaacaatgtggcacaaacatagttttttcatgctcttgtcatagacttttctttttaaccttctgcaaaagtaaaaactctcttagtaataatcatcatagggcaacaggatatagtatgtaactgcagtcttgagctgtctcttttcatgtattacctttcttgctcaacagctattcctgttttctgtaagatcctagtcagacagagccctcacaactggatagacctttctcaagggttagccctaaaatgtgacaagagaattggtttggctgaatcacaacaaataactagcaaagcttcagtgcttttgcaaactttttatgtaagcaaactttttgtgttatctggcacaggcctttgaaaagactataattctactttgtttaatgtagagtaactaatttttcaatttagaaagacagtgagaatccccaggataagcctctttatactcacttaaaccaactgggatggaattcagaatacctaagctgcttctttaacatagagatctttaaaaagggaaggtcaagcaaagaactgtaaccgaaagaagtaagagatttgaaaagacgatagagttaaaacaatatttaaaaaacatttctatttggtccatgcagttttatttgaaaatagtctgtcaaaatcagaactcctgaacaactttgaaagcagtaatattaactggtattcaaaaatgaataacagccaaaaatgaataacagccatttgatttatgtttccctcagtcatttggtttatgtttggttatggcaagatgttacagcatttatagttaatactactactaatatgtaaaccaaaagttaaatattctagttaaggattgtttctttaaacaactttcagattctgttgacattgtctttgtggtatttttatttcatgggttttaatttctcttaaagacttacctaaatattcagttacatttttaaaaaatctgtacgtgacagaatattaaaacatggaatatttttgcttc

SEQ ID NO: 73524 - DNA, 377 bp, Homo sapiens
ggttgggttgggataaatatgaacccaaacaggagcttgaatagatgagactgagacccactgtcgctcaaagaaaggtctaggagctggacacctagatgctgtcttcaaacattcattcaaaaacctttcccaggcacctactacgtccagtcacttcttttgaagtcctggaggttcagagatgaagaggatacagctattacaattctggagtttcctttgaagacaaagagtagtgaacagataagcacactgcaatgagttatgtgggctgatggagggaggcccagctgtggccagagtctagaggaagggcactcactgggcttcagagaaggaggttcaatgttggtttctcaggtgacaatatcctt

SEQ ID NO: 73525 - DNA, 369 bp, Homo sapiens
tcacaaatttagaactggagagctgatcgactgaaaactcctgtttcacatgcctaataaaattctttcattcaaaggaaaaaaaaatcataactaccagcgtaaaaagaaaacatctaaatcatgaaacaattatcaaagaaacaaaaattctcagaacatcgcaactgtaatatatagaaattcccatcaaataactcaggtgaaaaaaaaaaaaaatgggacaagcaccgttggctcaggcctgtaatcccagcacttcgagaagctgaggcgcaaggactgcctgaggccaggagttggagactagcctgagcaacatggtgagacccttgactctacaaaaataaaacaaaaaattagccaggt

SEQ ID NO: 73526 - DNA, 495 bp, Homo sapiens
ctatctcataggctagaaggaggcagccgatccagttaatgcccctgtttccacaaggactcacagttctagagcattcttcctggccccacattcagctagtgacactgctaactactctcccagtcctcacacattctgatcatgtgccccccagagtaaaaacagacaaataactcatttaacttgcccgagatatttttacttattgatatgcttaatgatataccagtatactaatgtatttctaaaatacacattcacgaaataaatctgaataggtgagataaaaataagtagaaaaagtcattttagattttttcctcatatctcaaattattgtccttcatgcatactttgggaggtatcaattcgggccaggcacagtggctcatgcctgtaattccagcactttgggagactgaggcgggcggatcacctgaggtcaggagttcgagaccagcctggccaacatggtgaaaccccatctctact

SEQ ID NO: 73527 - DNA, 354 bp, Homo sapiens
gaactcctgagctcaagtcatcttcccacctcagcctccttagtagctgggattataggcagaggccttgttttcatgagcctctaaattggatcttcttatttgatgtgatacccagtgacacagaattgttcaatttgaggaaatataaattcctcccctctcaaataagagctttggagttgcttttctctcagaatgggattttagagctttcaaaaatgtttagagaattttatgacagatttgtttcacactagacctataacaggttattttacattgacttctggtgatggagacatttgtggttgaaatgcttctcgtgtaattttctacatgagcttttcttta

SEQ ID NO: 73528 - DNA, 447 bp, Homo sapiens
cagttcaggtcatatatatatatatatacacacacatacatacatctttctgatttactcctacctgatctttcagttactaagaaaagtgtcttaaagtctgcaattataattgtctcttaacatttccaactataatgcagatatgtctatttttcctttcagttctatatatttttacctcatgtattttttttcttgagatggagtctcgctctgttgcccaggctggagtgcagtggtgcgatctggactcactgtaacttccacctcctgagttcaagccattcttctgccttagccttccaagtagctgggattacaggcgtgcactaccgcacctggctgatttttgtattgttaatagagacaggacttcatcatgttggtatggctggccttgaattcctgaccttgggtgatctgcctgcctcagcctcccaaagt

SEQ ID NO: 73529 - DNA, 1117 bp, Homo sapiens
aaggtatgaagaaaaggtgattgagaactaattaccaagggaaactggcaagacaactggatgcgtgtaatccgaatggtcataatgagacaacagctaacactgaatgcttgctgtgtgtttggcactctgctagacgttttactggtattaaccgatttaatcctcacaataacgaagtatgtactactataattgccagtttacagacgagaaaactaaggcacaaagtttaacttgccccaagcgacagagtggataagtaaaagggcgaggactgggaccctggtactctgaatgaagagcctgtgcctccctctctcccctaacagttttaaggagatacaatttacctgccacaaaatttacccattttaggtttatacttagatggttgttcagtaagtttatagagttgtgcaactatcacaaccaatgttagaacaactcaaaaaaaaaaaaatcttattccagtttgcaattaagccccatttccatttccacacagcaactgatcggctttctgtccttcaggtttgccatttctgaacatttcctataaatggaatcagacatggtcttttgtgtctggcttctttcactcagtaatgtttctgaagttcctccctgtagtggcatctatcagtaattgctttcctttttattgctgggctgaatgctgttccattgtatggctgtgtcagattttgtttgttcattcaccagttgatagacatgtagattgttttcatgctgctgtgaccatttgtgtacaagtgtttgtgcagacatatgtttaactttttaggaaattgccagactgttttccaaagaagctgcaccattttacatttgcaccagcaatgtaggagggttctgatatctccacgtcctcaccaacacttgtgattatgtgtcttttaaaattatagccatccttgtggatgtgaagtggtaactcattgtggctttgatttacatttccttgatagctaatgatgagcatttttcatgtgcttatgggccgtttatatacctttggtgaaatgtctatttaaatcttttgctcacttttcagttgggttttttttcttattaaatagtaagagttcttaat

SEQ ID NO: 73530 - DNA, 368 bp, Homo sapiens
tgtagggtacaagattaacagcaataggaatagtttgccattttccttaattgtggagagaaagagctactgaaatgtctgtgactgtaagctttccttggcctagtgctgttagcagagcactgttggctcatgagtgaacatactcatttttaaatgagtctaaaatgaatacatcagtagttggtgcctttaaggccactgactaaatgttgtggcatttttatttgatagtctcaatctgcagtatccagtatgggtccccactactcacatgtggcttttaaaattcggcattaggttaaaaataaaacttccatttctcagtcacaccagtcacattttaagcgcttggtagtcacatgtgg

SEQ ID NO: 73531 - DNA, 213 bp, Homo sapiens
cgcaacaccacaaaagcaggaagaaagacagttaggatgcgagcacatgtgtgaaggtggagtgtgaagagtagaacagtcagaatccctgtagctccagatacgagagtgcagccatgcacagcctcttccacaagcctgtttggtgctcacaggaaaaactgggtgggaccagcctggtcaacagtgtgagaccccatctctattaaaaat

SEQ ID NO: 73532 - DNA, 370 bp, Homo sapiens
cgtcgacatttcattgatggggggagaggtttaggaaatggctgggcgacagctttgtgtagaatataagcatgattgcatgacgtgaccttcaagctctgaaattctagaagtatttctctaaagttatgaattgtgcagcacttctagaggcatctgagagtagatgtgttagaaatgaagggcctcaaggcactgtctcccagcagcttgcacaaggtgacacccatagggtacccaagccacacagatcacactcatccttcttccacagtacaccattctgcactctgaacacagattcttcctcatcacaaaaataacataaaaaagaatctgaggcacacgcaatgtcaacctgagcttataa

SEQ ID NO: 73533 - DNA, 577 bp, Homo sapiens
gatcgctcatatatgcaaaagtactctgaaatcgcaagactgatataaagatatatgcttctatcaagtgcttataacagaaatgatttcattgctatacacacattcacacacatacaataatatgcaaaatttcttgcaaaacttgcaaacaaagcaggtaaagacataaataatcagtaattaagaattcaccggagaggacagatgagagattatgctgagtcaagaagctaaaatgcatatataaaatttatgcatgtgtggggtcattgcacctgtgccctcagtgaaccattcaatcaagaacaaactttctgttataagatgaaaaagtcctggagatcttatgtacattaaggtgactgtagttaatagtaaagcattgtatacttaaaagttgcttaaagagtagatcttaattgttctcactatagaataaaaggtaactatgaagtgatagaggcattagcttgttacattttataatccatgcatatatcaaaatatcacgtgtgtaccttaaatgtatacaattttcatttgtcaattatacctaaataaaactgaggaaaat

SEQ ID NO: 73534 - DNA, 348 bp, Homo sapiens
cacaggtgtcttggagcctaagttacaattgattaaataaactctttaggcaattatgaatcactgcagattctaggtatttgtgagcctgatgggagagaggctgggtgccgaagacctttctggatctctagcaagtggaaaaataaggaagactgcctgagagcttcttgaggcctgaggctgagggtatgacagcacccgtgatgcaaatgctaatatgaactagaaataacccaggctgagtcagagtcaaccttcccatacatctacagtttttcttctctcaaatcatggtgcaccactggggcttcattgcaatacattggttagttctatttttagtgc

SEQ ID NO: 73535 - DNA, 269 bp, Homo sapiens
cattcccagctctatgagcctttttgctcattcctttttttgtcttacaaggaaaatcaggtactcacacttcgccaagcattggccgttgttgtctcagggcttctcaaggccatgccaccagtgaatttgcccattccctatggtcttttacagggcattaaagccaatgtcctaagaaagtacccacaagtcaacaaattcagtcatacatcctgtctgtccttaatcaataccctttgaaattcaatcccaggagttctcttctg

SEQ ID NO: 73536 - DNA, 466 bp, Homo sapiens
aaattgagtacccaataaatgtgcgtcgagcagaactacacgagatggagaacaggggtttaggggtatgggggagagtcagcaattactggtgtcctccctccctcccccagctctgctcctacagatccaggacgcctagcgagggtaggaacctcttctgtgcttccgcaacgctctgaactgcacggcactgagcgcatctaattaaagtgatggtttcattagatagcaacacagcgagaccccgtttctacaaaaaataaaaataaaaaataaaagattagctgggcgtggttgctcgcgcctctagtcccagctacttgggtggaggctgaggaagaaggatcgcttgagcctaagagttcgaggttgctgtgagctatgatcgcgccactggactccagcctgggcgacagagcaagatcctctgtctaaaataaaaataaaaataaaatgatggttt

SEQ ID NO: 73537 - DNA, 330 bp, Homo sapiens
gcagatctctggtttctcttcataacgaataaatctttcgccttttactaaagatttccgtggagaaaaacaactatgagtttatggttaaattttttgaagtcttgcctaggcaaggctgaatgttctgttactaaagagagacgtgtgggtggggtgtttcatgctttgggaggttggggtagctccacaaatgtcacccaggttgtagcggagtggtgtggtcgcggctcactacaacctccatctcccatgctcaagcaatcctcccacctcagcctcataagcctgtctaattttgtgtactttttgtagtgcccggcctactgt

SEQ ID NO: 73538 - DNA, 464 bp, Homo sapiens
ttttttaactaattacaaaataaaattaggatttgtttacaaaatgtagagcattttgctcctcagcatatattttatagcttcttcaaattaggagaaaggatgatgataatctacccaaagagaaacatttgcaatctaaagcaaagctaataaaattggcctctcaacattttctaaaaatgttttcagtggtaacagtgccaacagcacgccaagagcatctatacttccaagcaatctaccaatgtccatggatggaatatgtaagagttcaatcagtattcaaaaaggaatcaaccctctccctattaaaaaataacaatcatcatgattagcacatgatctctgtgaaattcaatcacaaagatttgaaaagccatctagcagaaataacctgagatttgaaaagtcatctagcaaaaataaccaaatgaaagcataaatcatcatatcagaagtta

SEQ ID NO: 73539 - DNA, 155 bp, Homo sapiens
ttttactgccagagatgcaactgtctttattgcagtaaataacaagttcagagctttagtaaagaatacatataggccgggcatagtggctcacgcctgtaatcccagcactttgggaggccgaggtgggcggatcacgaggtcaggagatcgag

SEQ ID NO: 73540 - DNA, 391 bp, Homo sapiens
tgttgccaccaaggtgtcctgcatgatgtctggacaccggaccagcggcctctgacaggaagagtttgtgttgtgacagtgcatgccttggaatggttgttcctttttaaaaaaaatctgacaagttgctctagtaacccaaagaagtgaaggagaaaccagctaccccactggacagatactgatttgtgcagaatccgtttcaatgcctcatgaaacaataaaaccacgaacatcttccttaaaaaaataaagaccacctcaccttccccttccccaggtttagctttgtacaaaagactgaggaagccgctgactctgccgggttctccctgctctgccactccaggccttctccagacctggcctgcagagaagggcacgggggaca

SEQ ID NO: 73541 - DNA, 250 bp, Homo sapiens
gataataggcaataataactagtgtttattaaatatctactgtgtgttagaaatttgtctaggctccaaagagcctatatattaacatatacatatatatatatacacacacacacacacgtgtgtgtgtgtatatatatgtgtgtgtgtgtgtgtgtgtgtgtgtgtgtgtgtgtgtgtattcatataaaatatatatctctctatccaagctactttctaagcacctcaagctttcactccaaaagag

SEQ ID NO: 73542 - DNA, 742 bp, Homo sapiens
tgggttgtctctttatcaacagtttcctttgacgcacaaaagcctttaattttgatgaagtccagcttatccttcttttgttgttcatgcttttggtgtcatatctaagacagcattgccaaattcagtatcatggacattttcatctatgctttcttctaggagttttatagttttagctcttaaacataggccttcaatccatttttagttaatttttgtatacggtgtaaggtaaggatcctagtttattaatttgcatgtggctagtcagttgtcccagcaccatttgttgaagagactgttctttccatcacccattgattttgaaactttctagtggatagcattttagttaattattatatattgctttttgttgtgatttgatacatgtatgtcttatttctacaagtagagaggactccattcaagggaggggactggcttctgtcatgtttctggtattttatgtaagggctaaaatggttcccagagtgagcaaaaaggaatcaaagaggacgcaagcccttgacccaagaaaatcagagtattttatttaaagaacaacttttagttggttggtttttttttgttgttgttttttttttgaaatggagtctcactctgtcactcaggctgggacaggagaatggcttgaacccgggagttggaaggtgcagtgagctgagattgcaccactgcactccagcctgggtgacagagcaaggctccgtctcaa

SEQ ID NO: 73543 - DNA, 626 bp, Homo sapiens
ggttctgttgggaaggcgtatttggttttgaaatgtgagaaggacatgagattttggaggggccaggggtagaatgatatggtttgactctgtgtctccacccaaatctcatctccaattgtaatccccatgtgtcaagggagggacctgatgggaggtgactgaatcataggggcagtttcccccatgctgtttgcatgatagtgagggagttctcatgagatctggttttttggtaagtgtctggggcttcccccttttccctctctctcctactgccttgtgaagaaggtacttgcttctcctttgccttctgccatgattgtaagtttcctgaggtctccccagccattcagaactgtgagtcaattaaacctcttcctgcctattctcaggcagttctttatagcagtatgaaaatggactactacagaaagtgtttaactttaaactcagtagtatccaaagaagtaatgaaaatggagaaacgaacaacaaaatcatagtacaatatggtgtatgtactaggacaggaagagcccttttaagaagagatctatgtatttccatttgtttatctctgaaagaaagcaactttgccttgtattctgaaaaagaaaggaata

SEQ ID NO: 73544 - DNA, 250 bp, Homo sapiens
aagatttgaaatcttttggttgggggacaatgtgacttttcaaggaagaaaacagatttctagaattcggtcaatttatatatctagctagccatttggatcaaaacaccaaacacattctcatctgcagatactaaaagctagctagttatcaaagattccattcattatgagtaataaaagctaaagctaattaaaatattcccaacatcatctaaaatgacacgattctctgcatgaatccccaaaa

SEQ ID NO: 73545 - DNA, 312 bp, Homo sapiens
attaagaggaggtgattgtattattcctcttttcagataatggagagagagaagagaacagcagtagccgttgccagaaatattgagcaaggcggatttattagatgaagatatcaaaatactttccattgaggaaacaggttggaggtgggaggctgtaaccatgcttgattttgtaccaccctaacctttgcttgatccaggttccagtccaatatgcaccattcagcctggttgcagcatgttaagcagccctggaggcagcagatgagggatcctatgaagcaactttcagacattcagaaccaagac

SEQ ID NO: 73546 - DNA, 354 bp, Homo sapiens
cacagtggtgacgattttaatttctggtgtgaatctcaagtccacttttaggaagcaggagataaatccccatcaagaaaaatcattcattttctttgcatctctctctagcatatttgatatttgattgaaattttaacacctgaaacaactttttgttttgttttctctttggcaagtccatccttacaggtgtagttagatgggttagacagggatactaataattctcctcctccctcttcccatcttggatagaaaaatattgatctgatattatgtgaggctttctgaatgagagtgaattggacagtgaaaagcataagaaaaaataaagtaactaactcctttaaa

SEQ ID NO: 73547 - DNA, 416 bp, Homo sapiens
tttttttttttggagacggagtctcacgctgtactccagcctgggcgacagagtaagactctgtctcaaaaacaaacaacaaaaaaattagccaggtgtggtggggagagaggggaagaatagggacaaaagggaatacataaataaacacaaaggagaaaaggccctgcatggaccacttacatgtgtcatgaactcaggagtgttcatggtgggactacatggtgcacctgtagtcccagcttcttggggtggggggctgaggtgggaggatcgcttgggcccaggaggtcgaggctgcagtgagccctgattgtaccacagcactctggcctgggaaacagattgagacagggtctcaatctgtttccgtcgcaccggccgcaaatttagtagtagtagtagtagtagtaggc

SEQ ID NO: 73548 - DNA, 386 bp, Homo sapiens
atgaaatgaggtaattttctgggcccttggtacaatgcctgagatgtcatatatactcagctaattataagtgacattttgttctagaatccagtagctcaacttttagtccattgtgctgaacacaaatctatagatccttaaattgtatacttttattaatttaattttaaagagccagaaaaattgactacattggaaacattccagtccaccaacatattgagtagaaagaaggacaaaggccatattctctttcagatgctacaaattgtgtatattttcagtaagctgtgtctgcttaaggaggcattactgcattcggatagataaactcaaataaaaaggcctgagtgaagaggctctactgggtttagcgttttttt

SEQ ID NO: 73549 - DNA, 697 bp, Homo sapiens
cattttatgggggaaatcagcacaactgcaagccctcctcgcactgcttgctgctgccatttaagctagtcacctgtttaacaatagtaataatttgatttgatctcaaggacaattgagattgaaggaaggttgtgaatttgagtgcagtgtctaaaggatgacatccatgtttgtgcctcctcccccctcaaagctcttgtctgaaacaccactgttccagaacacctggggcttctttacctgagtattatgctattctcattaagcacaagaacatgcaacaattacgtagaagtgtgcgtgtggggaaaattgaacacatttcacaagggaatggtgagggagtgggtatacaaagccggctttgaacctgcaaacccgggccagccaacatgtcacaggtgagagcgtgttagtgagagggtgatgacagttctgggaccgttaattcatggatcctcagatacactcgggcaattgttctgggtttccgggaggtgcgagggcgttcctcctccagggcgcgtgcaggccacgctgagcagccctgctgaacgtctcccggtgtgccgtctctctgtttctctgttcccctttccgtcttctctcttatgttcctacttgtcctttcttcttgacttcctcctttgttccaatgtgatgattatggacgagttagaaagaggtagtaaaa

SEQ ID NO: 73550 - DNA, 567 bp, Homo sapiens
aagatgctaagaagttctgactggttgaggcatattgggaacagatggaaaggattttgcagttacacctccctgcttaatgtaattatttccctgataatcattctctgataaatgtatggttaatttggtgctgcatttgaaacagaaggtactaaagggcccactgtgggagatgtagaggtgaatgcagcctttgcctcaatctaagcacataactaaaatttgcagcagttggtgggaaagcacggggtttgtgtgtaaacccagcattttcagggttcttttcacattgacaagctggttccaattgatgttattcatttagcaagttggcaggggtgtcaagaagagccagaagagtgggctgctacaaaggcctgtcccacgctaacacccctccttgccaaatcattgtctttactcccgggatttggcacagtctctttccacctcccacagtaagaatgctcacctgcatctgtatttcctcatctgcatacaacctagcagggcctagaaccctggctcccacttttgaaagactgctgatctttgatgttatac

SEQ ID NO: 73551 - DNA, 388 bp, Homo sapiens
gagactgttgcccagtgaaaactgcatgaattatgtaatagttttatgcttgtttcccccactcaccattccaaaactgtaagacttcaagatagaacaggaggtatgaaattttaacagcacataaaaaaatagtgaacattctatccccgcacttcattgccattactaaggctaaggcaggactgagtttagaatgcagcaaagctttgaaatgtataagagataatatctctaatattcaaatacaccataaactcaaaacttagaatcaatcctatttttaaaatactgaatgtgacaagaaacgttataaaagttttcaagatatcagtatatgatagaaagagatgtattgctttagcacaaatcattctacaaaaaaaaa

SEQ ID NO: 73552 - DNA, 524 bp, Homo sapiens
ccggatttctttttcatggcattacaacattattttaaaatagcgctactaaacagttttatcaaaaaattccaacaaatgacatgtggcccagtggatgaaaaaaaattctgcaattattaatagatgtttttactgttcagagttttagctgttatttgtttagtaatgttggtgtttgtatgtaggctttgaggcaaggggactaattaggaattctctgtaataatttaagtgaagcttaaattattaaaaagagcaatcttgtaatcccagcactttgggaggccgaggcgggcggatcactaggtcaggagatcgagaccatcctggctaacatggtgaaaccccgtctttactaaaaatacaaaagattagcctgttgtggtggtgggcacctgtagtcccagctacttgggaggctgaggcaggagaatggtgtgaacctgggaggcgaaggttgcagtgagccgagatcgcgccactgcactccagcctgggtgacagagtgagactccatctcg

SEQ ID NO: 73553 - DNA, 397 bp, Homo sapiens
tagaatctctgggtgtagaactcaggtatttgcactttctaaacactgtttgcactttctaaacactgtttgcgaagcatggttgtgtgggcactcacaagtatggagccaagagagtagactctgaattccttcaaaaataataatactaataacaacaacaacaataataatagtgataataatgctatttcttgagtgccttctctgggttagacatttagctgtttccatgtgtgattatatttaatgttgacaactctacaagaactgtatgattttttaccttttacaaatgaggataaatctaaactcagagagataagtaacttgcctaaagtcatatagacagagagttgcaaatctgatgttcaaacctcatctgcctgttcatgtt

SEQ ID NO: 73554 - DNA, 256 bp, Homo sapiens
tttggctaagattcctacagccttttaatataactttgaatatttagtgaactataatatcttctagggcaagtagagagaaaaagtgtgattagggtctaaaagcaaataaaacttaatatcctctatgtgtgcctagaatattaatatattttcttttatttttctttttctaaaataatacatgaacataattgaaaatatgtaataaaaacaaaaaactggaaaaaactgtcatatatgtacttctagggtt

SEQ ID NO: 73555 - DNA, 502 bp, Homo sapiens
aatgaatatataattacaacaaaagaggtctaacactatagtagaaaagtttggggcactcatcccattcataattattttacatttaaattactgttcctacttaagtggtgagcttggtaaccattttcatatcaggtgatactgctgcagtaatcatagctgtttgaatcaggaataatcccaatcacattttctcttaatcgtttattatactgggcattggggttgcaagataatgcacagtccgagctcaatacatgtcttcatgtacctgtatgtaaatcccacttttattctaaaattctttgaatattttgtttcttggaacccaatgatcctaagaaaattatgtacttttacctgaaaattaaaaccaatatttataaaaagtgtatatgcagtatgataccacttttaaaaaaagataaatttatagaaaaaagtttatatgactgacaacaatgtctctgagtggtaggattacagttaatttttattt

SEQ ID NO: 73556 - DNA, 878 bp, Homo sapiens
gttaaatttgaattaattattattttgcataatattcattacaatgtatcatacattcttttttgaagaacagtcctatattagaatgttacttgtctcctcctcccaaagttatttgtaccccaagatatggtttttattgttggccttaaaaaaaaagtttgcttttttcctgtatatttttcttcatttagtacatatatattattgttttattctcctgtgcattttaggttttaccattacccaatgtgcctttaaatatagttttattatttaattgaaggtacacattccatccgtggaagaaattgcagccagctttaagattttaaatgtttttgtgtaaaaaacctttttattttgtaattaatatttattttaaaaacttgaaaatacagacaagtaaataaatataagacaaaaatcattcataatcttattcaggttcatccaggtttttttctgtgtatttttgcttatagtatatgcttacaaaaaagttgaatcgttttcgcttatattttttctttgcttttggaacttacacagcatcttttgcgagtcaataaattgtgtttctgctgtatttttaatagatacttagtctgtaatacaaaacatgagattcaacaaactgtaaatttaattaagcaaccctttgtggttgaagggcctagtttggtgtctggcatttagtatacactgctagcatctgtgtaaaagtgtgtgaacattttggaagcttcaataaatacattgtgtgaaattgtcctctggaagttacactgtattagctatatgtgagattgctcataaccctatattatgttaggtacactgtgttacccttaaaaaactttgctattctttctagt

SEQ ID NO: 73557 - DNA, 382 bp, Homo sapiens
ccacgcccagctaatttttgtatttttagtagagacggcgtttcaccatgctggtcaggctggtctcgaactcctgacctcgtaattcacccacctcggcctcccaaagtgctgggattacaggcatgagccaccgcgcccagcctgcttgattcttataccctgtcatccagcacacttccttccccaaactgaatgcaagccccccatgggcagagaatctatggtgcccattttcagtcacccgtgctgtgcctagcatagcttcctgcacccatcagcgctaaaatatcccacggatgctgtcttgatggcagaaggcacttttcaatcactgtgcaaatggcgccttctacccccatgatggcatgtgcacggcatg

SEQ ID NO: 73558 - DNA, 853 bp, Homo sapiens
agcagcggcggttttttttcccatggcgctctggggcgcgggcgatttgtaggtaatggcaggcgttcggtcactgaggtgtagcagaggatgcgctggcggctgtgagtgcggcgacaagggcaaatgcagcgactcctcgctgttgggcaagagactctccgaagactcgagccgccaccagctgttgcagaagtgggcgagcatgtggagctccatgagcgaagacgcgtcggtggccgacatggagagggcgcagctggaggaggaggcggcggctgcggaggagaggccgctggtgttcctgtgctccggctgccggcggccgctgggcgactcgctgagctgggtggccagccaggaggacaccaactgcatcctgcttcgctgtgtttcctgtaatgtttctgtggataaggaacagaagctatccaaacgtgaaaaggaaaatggttgcgtccttgagactttgtgctgcgcggggtgctcactcaatcttggctacgtgtacagatgcacgcccaagaatcttgattacaagagagacttgttttgcctcagtgttgaagccattgaaagttatgttttagggtcctctgaaaagcaaattgtgtcagaagataaagagctttttaatcttgaaagcagagttgaaatagaaaagtctctaacacagatggaagatgtcttgaaagcattacaaatgaagctgtgggaggccgaatccaaattgtcctttgccacttgtaaaagctgaactctagtctgtgtcctccattctgcccccgcccttcctccccttatttgttaaatgaagcaacatagtgagacgtcgtctctacaaaaaaaaaaa

SEQ ID NO: 73559 - DNA, 974 bp, Homo sapiens
agcagcggcggttttttttcccatggcgctctggggcgcgggcgatttgtaggtaatggcaggcgttcggtcactgaggtgtagcagaggatgcgctggcggctgtgagtgcggcgacaagggcaaatgcagcgactcctcgctgttgggcaagagactctccgaagactcgagccgccaccagctgttgcagaagtgggcgagcatgtggagctccatgagcgaagacgcgtcggtggccgacatggagagggcgcagctggaggaggaggcggcggctgcggaggagaggccgctggtgttcctgtgctccggctgccggcggccgctgggcgactcgctgagctgggtggccagccaggaggacaccaactgcatcctgcttcgctgtgtttcctgtaatgtttctgtggataaggaacagaagctatccaaacgtgaaaaggaaaatggttgcgtccttgagactttgtgctgcgcggggtgctcactcaatcttggctacgtgtacagatgcacgcccaagaatcttgattacaagagagacttgttttgcctcagtgttgaagccattgaaagttatgttttagggtcctctgaaaagcaaattgtgtcagaagataaagagctttttaatcttgaaagcagagttgaaatagaaaagtctctaacacagatggaagatgtcttgaaagcattacaaatgaagctgtgggaggccgaatccaaattgtcctttgccacttgtaaaagctgaactctagtctgtgtcctccattctgcccccgcccttcctccccttatttgttaaatgaagcaacatagtgagacgtcgtctctacaaaaaaaaaaaaaatcgggctttttttggggggggaaaggttttgaagggcggggcatagtgttcggaccggtttgtcaaggggaatcgggcccaaggggggttattgggtctgcgggagaaaagaaagggt

SEQ ID NO: 73560 - DNA, 756 bp, Homo sapiens
agcagcggcggttttttttcccatggcgctctggggcgcgggcgatttgtaggtaatggcaggcgttcggtcactgaggtgtagcagaggatgcgctggcggctgtgagtgcggcgacaagggcaaatgcagcgactcctcgctgttgggcaagagactctccgaagactcgagccgccaccagctgttgcagaagtgggcgagcatgtggagctccatgagcgaagacgcgtcggtggccgacatggagagggcgcagctggaggaggaggcggcggctgcggaggagaggccgctggtgttcctgtgctccggctgccggcggccgctgggcgactcgctgagctgggtggccagccaggaggacaccaactgcatcctgcttcgctgtgtttcctgtaatgtttctgtggataaggaacagaagctatccaaacgtgaaaaggaaaatggttgcgtccttgagactttgtgctgcgcggggtgctcactcaatcttggctacgtgtacagatgcacgcccaagaatcttgattacaagagagacttgttttgcctcagtgttgaagccattgaaagatggaagatgtcttgaaagcattacaaatgaagctgtgggaggccgaatccaaattgtcctttgccacttgtaaaagctgaactctagtctgtgtcctccattctgcccccgcccttcctccccttatttgttaaatgaagcaacatagtgagacgtcgtctctacaaaaaaaaaaa

SEQ ID NO: 73561 - DNA, 412 bp, Homo sapiens
tgatgattgtataaaagagatgtagattataggttgagaactactgttgatagaattatgctttatttttaaaaaatttatgcctctaaatagttttgttaaacactgaatatctaccttgtaatgtatgacatatccaaaattgcattaagtgtatatcttaattatatttaaccatgtataatttttaattatatgtgtgtttctttatttttttattttttaaattcaatagatggaagatgtcttgaaagcattacaaatgaagctgtgggaggccgaatccaaattgtcctttgccacttgtaaaagctgaactctagtctgtgtcctccattctgcccccgcccttcctccccttatttgttaaatgaagcaacatagtgagacgtcgtctctacaaaaaaaaaaa

SEQ ID NO: 73562 - DNA, 341 bp, Homo sapiens
taatgagttgctgcttcgtttcctaaagcaagacatttctttattgcagcgtccttgagactttgtgctgcgcggggtgctcactcaatcttggctacgtgtacagatgcacgcccaagaatcttgattacaagagagacttgttttgcctcagtgttgaagccattgaaagttatgttttagggtcctctgaaaagcaaattgtgtcagaagataaagagctttttaatcttgaaagcagagttgaaatagaaaagtctctaacacaggtaattttattctgtacattttatatctttgtatgaacagtttgtcagtgaagaagtgctcccccacaaacg

SEQ ID NO: 73563 - DNA, 1585 bp, Homo sapiens
agcagcggcggttttttttcccatggcgctctggggcgcgggcgatttgtaggtaatggcaggcgttcggtcactgaggtgtagcagaggatgcgctggcggctgtgagtgcggcgacaagggcaaatgcagcgactcctcgctgttgggcaagagactctccgaagactcgagccgccaccagctgttgcagaagtgggcgagcatgtggagctccatgagcgaagacgcgtcggtggccgacatggagagggcgcagctggaggaggaggcggcggctgcggaggagaggccgctggtgttcctgtgctccggctgccggcggccgctgggcgactcgctgagctgggtggccagccaggaggacaccaactgcatcctgcttcgctgtgtttcctgtaatgtttctgtggataaggaacagaagctatccaaacgtgaaaaggaaaatggttgcgtccttgagactttgtgctgcgcggggtgctcactcaatcttggctacgtgtacagatgcacgcccaagaatcttgattacaagagagacttgttttgcctcagtgttgaagccattgaaagttatgttttagggtcctctgaaaagcaaattgtgtcagaagataaagagctttttaatcttgaaagcagagttgaaatagaaaagtctctaacacagatggaagatgtcttgaaagcattacaaatgaagctgtgggaggccgaatccaaattgtcctttgccacttgtaaaagctgaactctagtctgtgtcctccattctgcccccgcccttcctccccttatttgttaaatgaagcaacatagtgagacgtcgtctctacaaaaaaaaaaagaaaaaaaaaattagccaggcatgcgaaacgctgaggtgggaggatcagatgagcttgggaggttgaggctgcagtgagccttggtcatgccactactgtgttctagtctgggcaacagagtgagaccttctctcaaaaaaaaaacccaaaattgtagaattacttctatagctatattttatgataaagaagtgattgtttctcaaaatcgcattttaaagacgttttatggtacttgttggaattgggacttaggagttttgattttgataagaaactgggataattttctgaactttttttcctctgtatcacatttatttactatttttaaaaactttgacatttaacacttgggacaacatttattataaatgataagaaaaatcttagaggtttgtctacccacagtgtcatggaatcttctctgaaaactaatccataaagttccctggagaaattggtcagaatgatctgtcagaaccatttgaaaacttgctcaagagcagttgcttatatatagtaggattttactttttcctgcttatgtactactatatgcttaaaaaacctggaggaatacttaccaaagaggagtaaccatctctgagggtgggattctgggggaatttttgtttttttctgttttctataatgtgaaacttttgtagtatgtatttttctaattgaagagaataaagattaaaacaaagtgctttaaaattgatttt

SEQ ID NO: 73564 - DNA, 1144 bp, Homo sapiens
tgatgattgtataaaagagatgtagattataggttgagaactactgttgatagaattatgctttatttttaaaaaatttatgcctctaaatagttttgttaaacactgaatatctaccttgtaatgtatgacatatccaaaattgcattaagtgtatatcttaattatatttaaccatgtataatttttaattatatgtgtgtttctttatttttttattttttaaattcaatagatggaagatgtcttgaaagcattacaaatgaagctgtgggaggccgaatccaaattgtcctttgccacttgtaaaagctgaactctagtctgtgtcctccattctgcccccgcccttcctccccttatttgttaaatgaagcaacatagtgagacgtcgtctctacaaaaaaaaaaagaaaaaaaaaattagccaggcatgcgaaacgctgaggtgggaggatcagatgagcttgggaggttgaggctgcagtgagccttggtcatgccactactgtgttctagtctgggcaacagagtgagaccttctctcaaaaaaaaaacccaaaattgtagaattacttctatagctatattttatgataaagaagtgattgtttctcaaaatcgcattttaaagacgttttatggtacttgttggaattgggacttaggagttttgattttgataagaaactgggataattttctgaactttttttcctctgtatcacatttatttactatttttaaaaactttgacatttaacacttgggacaacatttattataaatgataagaaaaatcttagaggtttgtctacccacagtgtcatggaatcttctctgaaaactaatccataaagttccctggagaaattggtcagaatgatctgtcagaaccatttgaaaacttgctcaagagcagttgcttatatatagtaggattttactttttcctgcttatgtactactatatgcttaaaaaacctggaggaatacttaccaaagaggagtaaccatctctgagggtgggattctgggggaatttttgtttttttctgttttctataatgtgaaacttttgtagtatgtatttttctaattgaagagaataaagattaaaacaaagtgctttaaaattgatttt

SEQ ID NO: 73565 - DNA, 758 bp, Homo sapiens
agaacctctcaacaaattacatcagcttatagacatctttttcttgtagcaaaacatactgttttgttggcaaaaggagaaaccaaaatttgactgtgtttttatggcttgtggaacactctcagatgctaaggacgttttgaggttgtgatacttgtctgacatgtagtatccaggagattcttctctaattattttaaggattgggggaaaatgaactagctgactttatatttggaaaactaaaactcaaaacctttttcattgttgattattcagaaggaataatagaacagaattatagctgaacagtgttcaatcagagttagaagaagtgaatacaaaataataatcagaactctacagaatataactgcaatggaacaaaaggtggcaagtacttgttattcttcaaacatgggatccattacttagtgcctctacatacctgatgataagttaagcaaagcagattcagaatttaaatattatgtattcccaaaagaggtagatgaatcttaaatatatatgagaatttaggtcaaaatattaaatagcaaccaaattatgaaatgtaattttatcctatctttgcaaatggttagttcttgcttgggaattagccatttaataagcttaccataattccaaaatttaaaaggtgatacctgtggtgatacctaggtgatttaatcagaattaattttgtataatgcctgttgtaatacacctaattttagttaataaataccgtgttt

SEQ ID NO: 73566 - DNA, 439 bp, Homo sapiens
tgtgttgcaatttaaaatttttaacaaaagttcatgatactcagagaattgaaacaggtgagatcattagacattcgcatgtttgagcacaagcgctgaaggacttagcaatgtggctgcagtggaataggagagatgcaaaataacagacaaacccagagaggtaagagagcagacctcttcatgagaggctgcctgataaactgatttgacactgaattgctgagaaggtaatgcaaatagtttttttctccaagaacaaagtagttcttggtcaagccgatttgatttgggctgtgggaatctgcacaaaccatttcactagctaagtctcaggttcctcaaatgaaaaagcagggactggaaatggcttttgaagtctcattctcttctaaaaatgtcaggctccaagacaaccaggtgaagtccaagagttagt

SEQ ID NO: 73567 - DNA, 1591 bp, Homo sapiens
  misc_feature (1496)..(1496): n is a, c, g, or t
ctagcttaacttcatttaaagaataaattaatcgtttttaaacttatgccagcagttgttaattcccagatggcaggtgaactctctaaacatttttttaaaacttttcatcaaatagtaattccattttaacccaaaaatagctttttgttttctttcttaaaacatgaccatgatgcatcgtcaatcaaaataaactgaagtatttattaattacagctgtattgatttctactctaaactgacttcctccgaaatctagtatgtttcatgtttcaagaattaatttcttgatggtactctgctgcactgtaatttagtcatggtggattgagtcaccagatattaagacagtcatgattgcaaatgacagatggcatccagtggctcaccattgtttgtacctcttggtacccatttctctgaagctacaagtacagccatgaggcagtggtaactgtcttagttggagtctcagagctcatgcttcatttattcccaaggcaaggcactaaaaagccatagttggagctggagcacttgccaacttgtatttctgccatttagaaggtgctcagtccctacatctaaaatttgaagggaaaggaaatcttccatatgaatgccacttttcgttattttccagaccatcacatcttacttttcctttcattcaacaatgataacttattcgccaacacttttcaagaatgtgtttacatgaaagcagagcaagcatgttaagagacccagactgcaaataactttggaacggcttcagtgtaattcaaagtgagtcatcctgcctcagttacagaatgagcagctctgattgacagaacttggaaaagctaacacagagcggcaaagggtattccccaaaccttaatttatttctgtttgagagcaaaaatattgggaaattatccatctacagcttaccttttcttactgtgtaatttgattttaatgctggaggatttaccgtttacataatttgatcttcaatgaaattactccttatgtccgacttttggttcagattatatctaaattaagagattaataattatttttaaaggtagtgaactagcgtagatcagatggtatgattcctgactacgaaaaggaatttatttgggcaaggattactggtatgtctattgcttttgttgcgtaaatgaattgatttccacctacgccataacagtgtatctcacatgcaacgactaagctggagttgcaggagctttcttgtctgccactgccctcagcctccattctcccttcctggtgccccagtacagcctctgttctcctttttcatagtttccagtgggagcatctccacttcccttctttttgaggggcctggtcatcttcacttccacacagcccacaaacttctcacttgtatctctcctggtacagtagccatgccataaaacaagatggatactgatcagttactcaggctagaaacttcaaagccatgnaacaggttcaagaagagagtactacaattagacttacgctttagaaaagtcagtcttttacctgagcagtattatatagtacaatgcttgttatg

SEQ ID NO: 73568 - DNA, 336 bp, Homo sapiens
gcagaatcctccgggaaatgtagtccagagcccgactgctcccctactaaaaatacaaaaattagccgggcctggtgggcgcctgtaatctcagcttcttggaaggctggggcagcagaatcgcttgaacctgggaggtggaggttgcagtgagccgggatcgcgccgttgcactccagcctgggtgacagagcgagactccgtctcaaaaaaaaaaaaaaaggtaagcagacatgtctgctgcccacatgaggtttacattctagtctggagaaaaaaaaagattttaaattaaaagtggaaaatgaagtaattttatattgtgataaatactat

SEQ ID NO: 73569 - DNA, 819 bp, Homo sapiens
ttccaggcagggcactggggcacagtaggaggaacccagaagatgctgcctctcctgatcatctgtctcctgcctgccattgaagggaagaactgcctccgctgctggccagaactgtctgccttgatagactatgacctgcagatcctctgggtgaccccagggccacccacagaactttctcaaaatcgtgaccatttggaagaagaaacagccaaattcttcactcaagtacaccaagccattaaaacgttacgagatgataaaacagtacttctggaagagatctacacgcacaagaatctctttactgagaggctgaataagatatctgatgggctgaaggagaaggacatacagtccacactgaaggtcaccagctgtgctgactgcaggactcacttcctctcctgcaatgaccccactttctgcccagccaggaaccggcggacctccctgtgggctgtgagtctcagcagtgctctactcctggccatagctggaggatgtttcttttactggcaaaggaagaaggaggcagtaaagcaggaacagggcagcccgcatgtcttccagaagtgaacagaggccgcagctaccaccgtcacaaagttcactcatctctgggtcccggtgaccccatccccccataccctccatcctgggtcctggggccccaaagctctgaggcctaggagactgcgctgtctcgtggtttgcctactcctacacctttgtaaagagtctcttcattaaaacccctcttcatagcctaaaaaaaaaaacaagaaccacatcgcaaccaacacacagaagggc

SEQ ID NO: 73570 - DNA, 698 bp, Homo sapiens
ttccaggcagggcactggggcacagtaggaggaacccagaagatgctgcctctcctgatcatctgtctcctgcctgccattgaagggaagaactgcctccgctgctggccagaactgtctgccttgatagactatgacctgcagatcctctgggtgaccccagggccacccacagaactttctcaaagtattcactccttgttcctagaggatcgtgaccatttggaagaagaaacagccaaattcttcactcaagtacaccaagccattaaaacgttacgagatgataaaacagtacttctggaagagatctacacgcacaagaatctctttactgagaggctgaataagatatctgatgggctgaaggagaaggccaggaaccggcggacctccctgtgggctgtgagtctcagcagtgctctactcctggccatagctggaggtgggtgagtgacctctccaagccccagcatccccagggaagacacacctattccctgactgactccaccctgtttcttggcccagatgtttcttttactggcaaaggaagaaggaggcagtaaaggtactgggaaaggagaccccgacccaattctagggctcccagagggaaaagctgggtgtgccctgggagtctcagggcctggaaccccagtgctgacctcctggggtctggcgtgcagaacagagtg

SEQ ID NO: 73571 - DNA, 464 bp, Homo sapiens
ttccaggcagggcactggggcacagtaggaggaacccagaagatgctgcctctcctgatcatctgtctcctgcctgccattgaagggaagaactgcctccgctgctggccagaactgtctgccttgatagactatgacctgcagatcctctgggtgaccccagggccacccacagaactttctcaaagtattcactccttgttcctagaggataataattttctcaaaccctggtaccttgatcgtgaccatttggaagaagaaacagccaaattcttcactcaagtacaccaagccattaaaacgttacgagatggtgaggaagccaagagccccagggccttggggcttgggttgacaaaggcccaccctccaaggcattctcagaggcccatgtggccatgggtgggaggtcttgtgaaggtgggagatgaatgcagtctgtctccgtgtgctctttggaa

SEQ ID NO: 73572 - DNA, 1166 bp, Homo sapiens
ttccaggcagggcactggggcacagtaggaggaacccagaagatgctgcctctcctgatcatctgtctcctgcctgccattgaagggaagaactgcctccgctgctggccagaactgtctgccttgatagactatgacctgcagatcctctgggtgaccccagggccacccacagaactttctcaaagtattcactccttgttcctagaggatcgtgaccatttggaagaagaaacagccaaattcttcactcaagtacaccaagccattaaaacgttacgagatgataaaacagtacttctggaagagatctacacgcacaagaatctctttactgagaggctgaataagatatctgatgggctgaaggagaagggtaaggggtggggacgatccctgcacacggcctagccctccacacctgccaagacccaaggcatgcagatttcactctgcagccccctcgatcatccccaggagccccacccctctccatgaatgccttcccggctccatctcctacttgcaccccagaaccccttggctctgtctgcctccccagcacctcagtttctctaccttctcaccctccctggcagcctgcaatgagtcctgtggtgagtatgcatggggactgggcctgggggagggatgaaaggcacctggcaccccctagcccctgtccctcccctcccatagacatacagtccacactgaaggtcaccagctgtgctgactgcaggactcacttcctctcctgcaatgaccccactttctgcccagccaggaaccggcggacctccctgtgggctgtgagtctcagcagtgctctactcctggccatagctggaggatgtttcttttactggcaaaggaagaaggaggcagtaaagcaggaacagggcagcccgcatgtcttccagaagtgaacagaggccgcagctaccaccgtcacaaagttcactcatctctgggtcccggtgaccccatccccccataccctccatcctgggtcctggggccccaaagctctgaggcctaggagactgcgctgtctcgtggtttgcctactcctacacctttgtaaagagtctcttcattaaaacccctcttcatagcctaaaaaaaaaaacaagaaccacatcgcaaccaacacacagaagggc

SEQ ID NO: 73573 - DNA, 749 bp, Homo sapiens
ttccaggcagggcactggggcacagtaggaggaacccagaagatgctgcctctcctgatcatctgtctcctgcctgccattgaagggaagaactgcctccgctgctggccagaactgtctgccttgatagactatgacctgcagatcctctgggtgaccccagggccacccacagaactttctcaaagtattcactccttgttcctagaggataataattttctcaaaccctggtaccttgatcgtgaccatttggaagaagaaacagccaaattcttcactcaagtacaccaagccattaaaacgttacgagatgataaaacagtacttctggaagagatctacacgcacaagaatctctttactgagaggctgaataagatatctgatgggctgaaggagaaggccaggaaccggcggacctccctgtgggctgtgagtctcagcagtgctctactcctggccatagctggaggcaggaacagggcagcccgcatgtcttccagaagtgaacagaggccgcagctaccaccgtcacaaagttcactcatctctgggtcccggtgaccccatccccccataccctccatcctgggtcctggggccccaaagctctgaggcctaggagactgcgctgtctcgtggtttgcctactcctacacctttgtaaagagtctcttcattaaaacccctcttcatagcctaaaaaaaaaaacaagaaccacatcgcaaccaacacacagaagggc

SEQ ID NO: 73574 - DNA, 844 bp, Homo sapiens
ttccaggcagggcactggggcacagtaggaggaacccagaagatgctgcctctcctgatcatctgtctcctgcctgccattgaagggaagaactgcctccgctgctggccagaactgtctgccttgatagactatgacctgcagatcctctgggtgaccccagggccacccacagaactttctcaaagtattcactccttgttcctagaggataataattttctcaaaccctggtaccttgatcgtgaccatttggaagaagaaacagccaaattcttcactcaagtacaccaagccattaaaacgttacgagatgataaaacagtacttctggaagagatctacacgcacaagaatctctttactgagaggctgaataagatatctgatgggctgaaggagaaggcacctcagtttctctaccttctcaccctccctggcagcctgcaatgagtcctgtgccaggaaccggcggacctccctgtgggctgtgagtctcagcagtgctctactcctggccatagctggaggatgtttcttttactggcaaaggaagaaggaggcagtaaagcaggaacagggcagcccgcatgtcttccagaagtgaacagaggccgcagctaccaccgtcacaaagttcactcatctctgggtcccggtgaccccatccccccataccctccatcctgggtcctggggccccaaagctctgaggcctaggagactgcgctgtctcgtggtttgcctactcctacacctttgtaaagagtctcttcattaaaacccctcttcatagcctaaaaaaaaaaacaagaaccacatcgcaaccaacacacagaagggc

SEQ ID NO: 73575 - DNA, 414 bp, Homo sapiens
ggaccattagcatggctgccttgccctctgctctgggttgggtttggccaggggagactcccaggaggaagttagagagacagggaggaggccagagtagtgggaggtcagggtagaaatgcccagcttcttctccctcagcaggaacagggcagcccgcatgtcttccagaagtgaacagaggccgcagctaccaccgtcacaaagttcactcatctctgggtcccggtgaccccatccccccataccctccatcctgggtcctggggccccaaagctctgaggcctaggagactgcgctgtctcgtggtttgcctactcctacacctttgtaaagagtctcttcattaaaacccctcttcatagcctaaaaaaaaaaacaagaaccacatcgcaaccaacacacagaagggc

SEQ ID NO: 73576 - DNA, 3708 bp, Homo sapiens
cggggcggggccgcaggagcagtaggtgttagcagcttggtcgcgacaggtgcgctaggtagagcgccgggacctgtgacagggctggtagcagcgcagaggaaaggcggcttttagccaggtatttcagtgtctgtagacaagatggaatcatctccatttaatagacggcaatggacctcactatcattgagggtaacagccaaagaactttctcttgtcaacaagaacaagtcatcggctattgtggaaatattctccaagtaccagaaagcagctgaagaaacaaacatggagaagaagagaagtaacaccgaaaatctctcccagcactttagaaaggggaccctgactgtgttaaagaagaagtgggagaacccagggctgggagcagagtctcacacagactctctacggaacagcagcactgagattaggcacagagcagaccatcctcctgctgaagtgacaagccacgctgcttctggagccaaagctgaccaagaagaacaaatccaccccagatctagactcaggtcacctcctgaagccctcgttcagggtcgatatccccacatcaaggacggtgaggatcttaaagaccactcaacagaaagtaaaaaaatggaaaattgtctaggagaatccaggcatgaagtagaaaaatcagaaatcagtgaaaacacagatgcttcgggcaaaatagagaaatataatgttccgctgaacaggcttaagatgatgtttgagaaaggtgaaccaactcaaactaagattctccgggcccaaagccgaagtgcaagtggaaggaagatctctgaaaacagctattctctagatgacctggaaataggcccaggtcagttgtcatcttctacatttgactcggagaaaaatgagagtagacgaaatctggaacttccacgcctctcagaaacctctataaaggatcgaatggccaagtaccaggcagctgtgtccaaacaaagcagctcaaccaactatacaaatgagctgaaagccagtggtggcgaaatcaaaattcataaaatggagcaaaaggagaatgtgcccccaggtcctgaggtctgcatcacccatcaggaaggggaaaagatttctgcaaatgagaatagcctggcagtccgttccacccctgccgaagatgactcccgtgactcccaggttaagagtgaggttcaacagcctgtccatcccaagccactaagtccagattccagagcctccagtctttctgaaagttctcctcccaaagcaatgaagaagtttcaggcacctgcaagagagacctgcgtggaatgtcagaagacagtctatccaatggagcgtctcttggccaaccagcaggtgtttcacatcagctgcttccgttgctcctattgcaacaacaaactcagtctaggaacatatgcatctttacatggaagaatctattgtaagcctcacttcaatcaactctttaaatctaagggcaactatgatgaaggctttgggcacagaccacacaaggatctatgggcaagcaaaaatgaaaacgaagagattttggagagaccagcccagcttgcaaatgcaagggagacccctcacagcccaggggtagaagatgcccctattgctaaggtgggtgtcctggctgcaagtatggaagccaaggcctcctctcagcaggagaaggaagacaagccagctgaaaccaagaagctgaggatcgcctggccaccccccactgaacttggaagttcaggaagtgccttggaggaagggatcaaaatgtcaaagcccaaatggcctcctgaagacgaaatcagcaagcccgaagttcctgaggatgtcgatctagatctgaagaagctaagacgatcttcttcactgaaggaaagaagccgcccattcactgtagcagcttcatttcaaagcacctctgtcaagagcccaaaaactgtgtccccacctatcaggaaaggctggagcatgtcagagcagagtgaagagtctgtgggtggaagagttgcagaaaggaaacaagtggaaaatgccaaggcttctaagaagaatgggaatgtgggaaaaacaacctggcaaaacaaagaatctaaaggagagacagggaagagaagtaaggaaggtcatagtttggagatggagaatgagaatcttgtagaaaatggtgcagactccgatgaagatgataacagcttcctcaaacaacaatctccacaagaacccaagtctctgaattggtcgagttttgtagacaacacctttgctgaagaattcactactcagaatcagaaatcccaggatgtggaactctgggagggagaagtggtcaaagagctctctgtggaagaacagataaagagaaatcggtattatgatgaggatgaggatgaagagtgacaaattgcaatgatgctgggccttaaattcatgttagtgttagcgagccactgccctttgtcaaaatgtgatgcacataagcaggtatcccagcatgaaatgtaatttacttggaagtaactttggaaaagaattccttcttaaaatcaaaaacaaaacaaaaaaacacaaaaaacacattctaaatactagagataactttacttaaattcttcattttagcagtgatgatatgcataagtgctgtaaggcttgtaactggggaaatattccacctgataatagcccagattctactgtattcccaaaaggcaatattaaggtagatagatgattagtagtatattgttacacactattttggaattagagaacatacagaaggaatttaggggcttaaacattacgactgaatgcactttagtataaagggcacagtttgtatatttttaaatgaataccaatttaattttttagtatttacctgttaagagattatttagtctttaaattttttaggttaattttcttgctgtgatatatatgaggaatttactactttatgtcctgctctctaaactacatcctgaactcgacgtcctgaggtataatacaacagagcactttttgaggcaattgaaaaaccaacctacactcttcggtgcttagagagatctgctgtctcccaaataagcttttgtatctgccagtgaatttactgtactccaaatgattgctttcttttctggtgatatctgtgcttctcataattactgaaagctgcaatattttagtaataccttcgggatcactgtcccccatcttccgtgttagagcaaagtgaagagtttaaaggaggaagaagaaagaactgtcttacaccacttgagctcagacctctaaaccctgtatttcccttatgatgtcccctttttgagacactaatttttaaatacttactagctctgaaatatattgatttttatcacagtattctcagggtgaaattaaaccaactataggcctttttcttgggatgattttctagtcttaaggtttggggacattataaacttgagtacatttgttgtacacagttgatattccaaattgtatggatgggagggagaggtgtcttaagctgtaggcttttctttgtactgcatttatagagatttagctttaatattttttagagatgtaaaacattctgctttcttagtcttacctagtctgaaacatttttattcaataaagattttaattaaaatttgaacttttcaa

SEQ ID NO: 73577 - DNA, 3966 bp, Homo sapiens
gtctggggacttctccagggttctacaaattgtttcaatccttgctgccactatccgtaattaatggtatagtttcagctatcctgcaactatcctgcatctttgtcttatttaaaagaagaaaaaaaaacccagcagaatttaccatgttattttatggcaggtaatgatgaactttgctgatgtgtagttacagtgtttcaagcacttgtattttgctttttctttcttgtttttttccccattaatctttgggtaaaaatctcttgtttcgcatgtaactatcattagagctgggtttgcctttcttctcattttgtccttataaggccatcctgttttatcacttcctgcttcagctcctgagtttttctctcttcccctctccctctccctctgccgggtggatgctttctccatgtggcaaggctgtaactgttcacagctgtctgaaacagcagtggaccaggagcagcttggagttttaactttcattttacaaagaacaacatgtttgaatgtttcagcaggcaagttataactggcatctacttcttgttcttctagaacaccgaaaatctctcccagcactttagaaaggggaccctgactgtgttaaagaagaagtgggagaacccagggctgggagcagagtctcacacagactctctacggaacagcagcactgagattaggcacagagcagaccatcctcctgctgaagtgacaagccacgctgcttctggagccaaagctgaccaagaagaacaaatccaccccagatctagactcaggtcacctcctgaagccctcgttcagggtcgatatccccacatcaaggacggtgaggatcttaaagaccactcaacagaaagtaaaaaaatggaaaattgtctaggagaatccaggcatgaagtagaaaaatcagaaatcagtgaaaacacagatgcttcgggcaaaatagagaaatataatgttccgctgaacaggcttaagatgatgtttgagaaaggtgaaccaactcaaactaagattctccgggcccaaagccgaagtgcaagtggaaggaagatctctgaaaacagctattctctagatgacctggaaataggcccaggtcagttgtcatcttctacatttgactcggagaaaaatgagagtagacgaaatctggaacttccacgcctctcagaaacctctataaaggatcgaatggccaagtaccaggcagctgtgtccaaacaaagcagctcaaccaactatacaaatgagctgaaagccagtggtggcgaaatcaaaattcataaaatggagcaaaaggagaatgtgcccccaggtcctgaggtctgcatcacccatcaggaaggggaaaagatttctgcaaatgagaatagcctggcagtccgttccacccctgccgaagatgactcccgtgactcccaggttaagagtgaggttcaacagcctgtccatcccaagccactaagtccagattccagagcctccagtctttctgaaagttctcctcccaaagcaatgaagaagtttcaggcacctgcaagagagacctgcgtggaatgtcagaagacagtctatccaatggagcgtctcttggccaaccagcaggtgtttcacatcagctgcttccgttgctcctattgcaacaacaaactcagtctaggaacatatgcatctttacatggaagaatctattgtaagcctcacttcaatcaactctttaaatctaagggcaactatgatgaaggctttgggcacagaccacacaaggatctatgggcaagcaaaaatgaaaacgaagagattttggagagaccagcccagcttgcaaatgcaagggagacccctcacagcccaggggtagaagatgcccctattgctaaggtgggtgtcctggctgcaagtatggaagccaaggcctcctctcagcaggagaaggaagacaagccagctgaaaccaagaagctgaggatcgcctggccaccccccactgaacttggaagttcaggaagtgccttggaggaagggatcaaaatgtcaaagcccaaatggcctcctgaagacgaaatcagcaagcccgaagttcctgaggatgtcgatctagatctgaagaagctaagacgatcttcttcactgaaggaaagaagccgcccattcactgtagcagcttcatttcaaagcacctctgtcaagagcccaaaaactgtgtccccacctatcaggaaaggctggagcatgtcagagcagagtgaagagtctgtgggtggaagagttgcagaaaggaaacaagtggaaaatgccaaggcttctaagaagaatgggaatgtgggaaaaacaacctggcaaaacaaagaatctaaaggagagacagggaagagaagtaaggaaggtcatagtttggagatggagaatgagaatcttgtagaaaatggtgcagactccgatgaagatgataacagcttcctcaaacaacaatctccacaagaacccaagtctctgaattggtcgagttttgtagacaacacctttgctgaagaattcactactcagaatcagaaatcccaggatgtggaactctgggagggagaagtggtcaaagagctctctgtggaagaacagataaagagaaatcggtattatgatgaggatgaggatgaagagtgacaaattgcaatgatgctgggccttaaattcatgttagtgttagcgagccactgccctttgtcaaaatgtgatgcacataagcaggtatcccagcatgaaatgtaatttacttggaagtaactttggaaaagaattccttcttaaaatcaaaaacaaaacaaaaaaacacaaaaaacacattctaaatactagagataactttacttaaattcttcattttagcagtgatgatatgcataagtgctgtaaggcttgtaactggggaaatattccacctgataatagcccagattctactgtattcccaaaaggcaatattaaggtagatagatgattagtagtatattgttacacactattttggaattagagaacatacagaaggaatttaggggcttaaacattacgactgaatgcactttagtataaagggcacagtttgtatatttttaaatgaataccaatttaattttttagtatttacctgttaagagattatttagtctttaaattttttaggttaattttcttgctgtgatatatatgaggaatttactactttatgtcctgctctctaaactacatcctgaactcgacgtcctgaggtataatacaacagagcactttttgaggcaattgaaaaaccaacctacactcttcggtgcttagagagatctgctgtctcccaaataagcttttgtatctgccagtgaatttactgtactccaaatgattgctttcttttctggtgatatctgtgcttctcataattactgaaagctgcaatattttagtaataccttcgggatcactgtcccccatcttccgtgttagagcaaagtgaagagtttaaaggaggaagaagaaagaactgtcttacaccacttgagctcagacctctaaaccctgtatttcccttatgatgtcccctttttgagacactaatttttaaatacttactagctctgaaatatattgatttttatcacagtattctcagggtgaaattaaaccaactataggcctttttcttgggatgattttctagtcttaaggtttggggacattataaacttgagtacatttgttgtacacagttgatattccaaattgtatggatgggagggagaggtgtcttaagctgtaggcttttctttgtactgcatttatagagatttagctttaatattttttagagatgtaaaacattctgctttcttagtcttacctagtctgaaacatttttattcaataaagattttaattaaaatttgaacttttcaa

SEQ ID NO: 73578 - DNA, 3349 bp, Homo sapiens
tccttattccttatgacaataaaatgcatgttcttttatgttgaggctctgttttgagaagtaaaataaattatgtctttagtacaatatatgaattgtatatggaaaaacatgctttttgaaagtcccaccaaaaaggtttctttatggtatcattaaatataatttcagtttttatatgtatacatcatccctgtctctctttccaggccgggcatttatatatgtatggtcagtatattttctattattggcacttggcatctcctttcccctgctccagaatggtcttttctgataaaactcacaagctttgcattaccacaagctctgctgctagaagagtgaatcacaagaatgttgtatgcttggggtgttctgtgtgcctgtgttgatgtgtctgtattctaatgagcaatccagttttacactagcatacagatatttaactctgaggtatgtgtccacaaagctgcttttgtcatttcactagtcagtgggttttgcttgtgagagttagggggttgatttgacccgaggcttcttagaagaattttttaacattccaagtttatctaatagatgtgctatgaagagaacagaatgatgggactttaaaaaaatttttacagttatttttattttgtagaatgagctgaaagccagtggtggcgaaatcaaaattcataaaatggagcaaaaggagaatgtgcccccaggtcctgaggtctgcatcacccatcaggaaggggaaaagatttctgcaaatgagaatagcctggcagtccgttccacccctgccgaagatgactcccgtgactcccaggttaagagtgaggttcaacagcctgtccatcccaagccactaagtccagattccagagcctccagtctttctgaaagttctcctcccaaagcaatgaagaagtttcaggcacctgcaagagagacctgcgtggaatgtcagaagacagtctatccaatggagcgtctcttggccaaccagcaggtgtttcacatcagctgcttccgttgctcctattgcaacaacaaactcagtctaggaacatatgcatctttacatggaagaatctattgtaagcctcacttcaatcaactctttaaatctaagggcaactatgatgaaggctttgggcacagaccacacaaggatctatgggcaagcaaaaatgaaaacgaagagattttggagagaccagcccagcttgcaaatgcaagggagacccctcacagcccaggggtagaagatgcccctattgctaaggtgggtgtcctggctgcaagtatggaagccaaggcctcctctcagcaggagaaggaagacaagccagctgaaaccaagaagctgaggatcgcctggccaccccccactgaacttggaagttcaggaagtgccttggaggaagggatcaaaatgtcaaagcccaaatggcctcctgaagacgaaatcagcaagcccgaagttcctgaggatgtcgatctagatctgaagaagctaagacgatcttcttcactgaaggaaagaagccgcccattcactgtagcagcttcatttcaaagcacctctgtcaagagcccaaaaactgtgtccccacctatcaggaaaggctggagcatgtcagagcagagtgaagagtctgtgggtggaagagttgcagaaaggaaacaagtggaaaatgccaaggcttctaagaagaatgggaatgtgggaaaaacaacctggcaaaacaaagaatctaaaggagagacagggaagagaagtaaggaaggtcatagtttggagatggagaatgagaatcttgtagaaaatggtgcagactccgatgaagatgataacagcttcctcaaacaacaatctccacaagaacccaagtctctgaattggtcgagttttgtagacaacacctttgctgaagaattcactactcagaatcagaaatcccaggatgtggaactctgggagggagaagtggtcaaagagctctctgtggaagaacagataaagagaaatcggtattatgatgaggatgaggatgaagagtgacaaattgcaatgatgctgggccttaaattcatgttagtgttagcgagccactgccctttgtcaaaatgtgatgcacataagcaggtatcccagcatgaaatgtaatttacttggaagtaactttggaaaagaattccttcttaaaatcaaaaacaaaacaaaaaaacacaaaaaacacattctaaatactagagataactttacttaaattcttcattttagcagtgatgatatgcataagtgctgtaaggcttgtaactggggaaatattccacctgataatagcccagattctactgtattcccaaaaggcaatattaaggtagatagatgattagtagtatattgttacacactattttggaattagagaacatacagaaggaatttaggggcttaaacattacgactgaatgcactttagtataaagggcacagtttgtatatttttaaatgaataccaatttaattttttagtatttacctgttaagagattatttagtctttaaattttttaggttaattttcttgctgtgatatatatgaggaatttactactttatgtcctgctctctaaactacatcctgaactcgacgtcctgaggtataatacaacagagcactttttgaggcaattgaaaaaccaacctacactcttcggtgcttagagagatctgctgtctcccaaataagcttttgtatctgccagtgaatttactgtactccaaatgattgctttcttttctggtgatatctgtgcttctcataattactgaaagctgcaatattttagtaataccttcgggatcactgtcccccatcttccgtgttagagcaaagtgaagagtttaaaggaggaagaagaaagaactgtcttacaccacttgagctcagacctctaaaccctgtatttcccttatgatgtcccctttttgagacactaatttttaaatacttactagctctgaaatatattgatttttatcacagtattctcagggtgaaattaaaccaactataggcctttttcttgggatgattttctagtcttaaggtttggggacattataaacttgagtacatttgttgtacacagttgatattccaaattgtatggatgggagggagaggtgtcttaagctgtaggcttttctttgtactgcatttatagagatttagctttaatattttttagagatgtaaaacattctgctttcttagtcttacctagtctgaaacatttttattcaataaagattttaattaaaatttgaacttttcaa

SEQ ID NO: 73579 - DNA, 486 bp, Homo sapiens
tctcataaagcagggactcctccctcattcatcttgcaagcaaatcccatttcttgaaaagcctatggagatctcggtatggtagacttggacatctctctggcttctgaagagcctgaagctggcctggaccattcctgtcccttagttaccatactgtcactggagtgatggtgtccttccctgccccaccacgcacgctcagtgcctttgggtttcaccttccctcgacttgaccctttcctcccccagcgtcagtttcactccctctgggtttttatcaaatttgccatgacatttcaatctgtcaatcataattatgattgacagattgtatggatgggagggagaggtgtcttaagctgtaggcttttctttgtactgcatttatagagatttagctttaatattttttagagatgtaaaacattctgctttcttagtcttacctagtctgtcactcatactggggatctctagagtcgc

SEQ ID NO: 73580 - DNA, 878 bp, Homo sapiens
aatgtacaggctcgttgaacctcactcttcacctggcagtcacctgcttgagttacaaaaggaagacatattacagtatctcatggaatgtctatggaaagtgttcttccgaaaagcaaagtatgggcactttacattaatgacagatccttccaacaccaggaaaaacactgcttatctgttgaagaatattcgaacactaacaactatggctcaggtcttctctggtcctgtcagaaatcaggttctcagtgacaagtctttcataccaaataatgatggtgtttggaacttcttggtgtattgatatgttaatttacatgttaggaccgaagcttaaataatatgagttgcaggtaaacccccctgtgacctaatttaatagaatgttttcccttggtatcacagaatcacaaagttaagaaatctcaagaggttacttgtttaagcccttacttgtcttaaccactgtataaatgataataatggcaataataatagcccctggagagcatgtctttttctctatgttgcctcactttatttctgagaaaatagttgttacatatcatttcttccaagtaactcaaagtgcaaatataaatgtgacaaatcggggaaacattccaaattaactcattttaatcatagagtcttacagaaggaagtaaccaagatgtcactttctccagctttcctttctgagcaatccttcctaaaatactcttgaaagatgttttggcatctgtgtgacatttctagctattagatagctctagctagacagcttctccaaacatgcagccaaagtgtacctcagtcacttccactcattagttcttctgctgcccactgtgttaatttttttctccaaagca

SEQ ID NO: 73581 - DNA, 900 bp, Homo sapiens
ccggagatggagtcttgctctgtcgttttataccccctttaacatttgtcactcttcagaatggttcgtaacttaagggaaaaaactttaaaaagataaaacttatcatcctgcaagagacaccaaatctcctaaagtcagcccaaaacaagccatctgtctataactggaactctagagggagtctttggcttttagagcactggtgctaaaagctactgtgctaatgatattctgttgaaggctcttgaataaagtaaaaagcatcatttagtgacaagtctttcataccaaataatgatggtgtttggaacttcttggtgtattgatatgttaatttacatgttaggaccgaagcttaaataatatgagttgcaggtaaacccccctgtgacctaatttaatagaatgttttcccttggtatcacagaatcacaaagttaagaaatctcaagaggttacttgtttaagcccttacttgtcttaaccactgtataaatgataataatggcaataataatagcccctggagagcatgtctttttctctatgttgcctcactttatttctgagaaaatagttgttacatatcatttcttccaagtaactcaaagtgcaaatataaatgtgacaaatcggggaaacattccaaattaactcattttaatcatagagtcttacagaaggaagtaaccaagatgtcactttctccagctttcctttctgagcaatccttcctaaaatactcttgaaagatgttttggcatctgtgtgacatttctagctattagatagctctagctagacagcttctccaaacatgcagccaaagtgtacctcagtcacttccactcattagttcttctgctgcccactgtgttaatttttttctccaaagca

SEQ ID NO: 73582 - DNA, 3683 bp, Homo sapiens
cggggcggggccgcaggagcagtaggtgttagcagcttggtcgcgacaggtgcgctaggtagagcgccgggacctgtgacagggctggtagcagcgcagaggaaaggcggcttttagccaggtatttcagtgtctgtagacaagatggaatcatctccatttaatagacggcaatggacctcactatcattgagggtaacagccaaagaactttctcttgtcaacaagaacaagtcatcggctattgtggaaatattctccaagtaccagaaagcagctgaagaaacaaacatggagaagaagagaagtaacaccgaaaatctctcccagcactttagaaaggggaccctgactgtgttaaagaagaagtgggagaacccagggctgggagcagagtctcacacagactctctacggaacagcagcactgagattaggcacagagcagaccatcctcctgctgaagtgacaagccacgctgcttctggagccaaagctgaccaagaagaacaaatccaccccagatctagactcaggtcacctcctgaagccctcgttcagggtcgatatccccacatcaaggacggtgaggatcttaaagaccactcaacagaaagtaaaaaaatggaaaattgtctaggagaatccaggcatgaagtagaaaaatcagaaatcagtgaaaacacagatgcttcgggcaaaatagagaaatataatgttccgctgaacaggcttaagatgatgtttgagaaaggtgaaccaactcaaactaagattctccgggcccaaagccgaagtgcaagtggaaggaagatctctgaaaacagctattctctagatgacctggaaataggcccaggtcagttgtcatcttctacatttgactcggagaaaaatgagagtagacgaaatctggaacttccacgcctctcagaaacctctataaaggatcgaatggccaagtaccaggcagctgtgtccaaacaaagcagctcaaccaactatacaaatgagctgaaagccagtggtggcgaaatcaaaattcataaaatggagcaaaaggagaatgtgcccccaggtcctgaggtctgcatcacccatcaggaaggggaaaagatttctgcaaatgagaatagcctggcagtccgttccacccctgccgaagatgactcccgtgactcccaggttaagagtgaggttcaacagcctgtccatcccaagccactaagtccagattccagagcctccagtctttctgaaagttctcctcccaaagcaatgaagaagtttcaggcacctgcaagagagacctgcgtggaatgtcagaagacagtctatccaatggagcgtctcttggccaaccagcaggtgtttcacatcagctgcttccgttgctcctattgcaacaacaaactcagtctaggaacatatgcatctttacatggaagaatctattgtaagcctcacttcaatcaactctttaaatctaagggcaactatgatgaaggctttgggcacagaccacacaaggatctatgggcaagcaaaaatgaaaacgaagagattttggagagaccagcccagcttgcaaatgcaagggagacccctcacagcccaggggtagaagatgcccctattgctaaggtgggtgtcctggctgcaagtatggaagccaaggcctcctctcagcaggagaaggaagacaagccagctgaaaccaagaagctgaggatcgcctggccaccccccactgaacttggaagttcaggaagtgccttggaggaagggatcaaaatgtcaaagcccaaatggcctcctgaagacgaaatcagcaagcccgaagttcctgaggatgtcgatctagatctgaagaagctaagacgatcttcttcactgaaggaaagaagccgcccattcactgtagcagcttcatttcaaagcacctctgtcaagagcccaaaaactgtgtccccacctatcaggaaaggctggagcatgtcagagcagagtgaagagtctgtgggtggaagagttgcagaaaggaaacaagtggaaaatgccaaggcttctaagaagaatgggaatgtgggaaaaacaacctggcaaaacaaagaatctaaaggagagacagggaagagaagtaaggaaggtcatagtttggagatggagaatgagaatcttgtagaaaatggtgcagactccgatgaagatgataacagcttcctcaaacaacaatctccacaagaacccaagtctctgaattggtcgagttttgtagacaacacctttgctgaagaattcactactcagaatcagaaatcccaggatgtggaactctgggagggagaagtggtcaaagagctctctgtggaagaacagataaagagaaatcggtattatgatgaggatgaggatgaagagtgacaaattgcaatgatgctgggccttaaattcatgttagtgttagcgagccactgccctttgtcaaaatgtgatgcacataagcaggtatcccagcatgaaatgtaatttacttggaagtaactttggaaaagaattccttcttaaaatcaaaaacaaaacaaaaaaacacaaaaaacacattctaaatactagagataactttacttaaattcttcattttagcagtgatgatatgcataagtgctgtaaggcttgtaactggggaaatattccacctgataatagcccagattctactgtattcccaaaaggcaatattaaggtagatagatgattagtagtatattgttacacactattttggaattagagaacatacagaaggaatttaggggcttaaacattacgactgaatgcactttagtataaagggcacagtttgtatatttttaaatgaataccaatttaattttttagtatttacctgttaagagattatttagtctttaaattttttaggttaattttcttgctgtgatatatatgaggaatttactactttatgtcctgctctctaaactacatcctgaactcgacgtcctgaggtataatacaacagagcactttttgaggcaattgaaaaaccaacctacactcttcggtgcttagagagatctgctgtctcccaaataagtgtactccaaatgattgctttcttttctggtgatatctgtgcttctcataattactgaaagctgcaatattttagtaataccttcgggatcactgtcccccatcttccgtgttagagcaaagtgaagagtttaaaggaggaagaagaaagaactgtcttacaccacttgagctcagacctctaaaccctgtatttcccttatgatgtcccctttttgagacactaatttttaaatacttactagctctgaaatatattgatttttatcacagtattctcagggtgaaattaaaccaactataggcctttttcttgggatgattttctagtcttaaggtttggggacattataaacttgagtacatttgttgtacacagttgatattccaaattgtatggatgggagggagaggtgtcttaagctgtaggcttttctttgtactgcatttatagagatttagctttaatattttttagagatgtaaaacattctgctttcttagtcttacctagtctgaaacatttttattcaataaagattttaattaaaatttgaacttttcaa

SEQ ID NO: 73583 - DNA, 3030 bp, Homo sapiens
gggacagagtaaacagggagaagaaataagaagataaggttagaatgaggggactagatatgatggtggataaaggtgaatgaaggtaaaactataattctccgggcccaaagccgaagtgcaagtggaaggaagatctctgaaaacagctattctctagatgacctggaaataggcccaggtcagttgtcatcttctacatttgactcggagaaaaatgagagtagacgaaatctggaacttccacgcctctcagaaacctctataaaggatcgaatggccaagtaccaggcagctgtgtccaaacaaagcagctcaaccaactatacaaatgagctgaaagccagtggtggcgaaatcaaaattcataaaatggagcaaaaggagaatgtgcccccaggtcctgaggtctgcatcacccatcaggaaggggaaaagatttctgcaaatgagaatagcctggcagtccgttccacccctgccgaagatgactcccgtgactcccaggttaagagtgaggttcaacagcctgtccatcccaagccactaagtccagattccagagcctccagtctttctgaaagttctcctcccaaagcaatgaagaagtttcaggcacctgcaagagagacctgcgtggaatgtcagaagacagtctatccaatggagcgtctcttggccaaccagcaggtgtttcacatcagctgcttccgttgctcctattgcaacaacaaactcagtctaggaacatatgcatctttacatggaagaatctattgtaagcctcacttcaatcaactctttaaatctaagggcaactatgatgaaggctttgggcacagaccacacaaggatctatgggcaagcaaaaatgaaaacgaagagattttggagagaccagcccagcttgcaaatgcaagggagacccctcacagcccaggggtagaagatgcccctattgctaaggtgggtgtcctggctgcaagtatggaagccaaggcctcctctcagcaggagaaggaagacaagccagctgaaaccaagaagctgaggatcgcctggccaccccccactgaacttggaagttcaggaagtgccttggaggaagggatcaaaatgtcaaagcccaaatggcctcctgaagacgaaatcagcaagcccgaagttcctgaggatgtcgatctagatctgaagaagctaagacgatcttcttcactgaaggaaagaagccgcccattcactgtagcagcttcatttcaaagcacctctgtcaagagcccaaaaactgtgtccccacctatcaggaaaggctggagcatgtcagagcagagtgaagagtctgtgggtggaagagttgcagaaaggaaacaagtggaaaatgccaaggcttctaagaagaatgggaatgtgggaaaaacaacctggcaaaacaaagaatctaaaggagagacagggaagagaagtaaggaaggtcatagtttggagatggagaatgagaatcttgtagaaaatggtgcagactccgatgaagatgataacagcttcctcaaacaacaatctccacaagaacccaagtctctgaattggtcgagttttgtagacaacacctttgctgaagaattcactactcagaatcagaaatcccaggatgtggaactctgggagggagaagtggtcaaagagctctctgtggaagaacagataaagagaaatcggtattatgatgaggatgaggatgaagagtgacaaattgcaatgatgctgggccttaaattcatgttagtgttagcgagccactgccctttgtcaaaatgtgatgcacataagcaggtatcccagcatgaaatgtaatttacttggaagtaactttggaaaagaattccttcttaaaatcaaaaacaaaacaaaaaaacacaaaaaacacattctaaatactagagataactttacttaaattcttcattttagcagtgatgatatgcataagtgctgtaaggcttgtaactggggaaatattccacctgataatagcccagattctactgtattcccaaaaggcaatattaaggtagatagatgattagtagtatattgttacacactattttggaattagagaacatacagaaggaatttaggggcttaaacattacgactgaatgcactttagtataaagggcacagtttgtatatttttaaatgaataccaatttaattttttagtatttacctgttaagagattatttagtctttaaattttttaggttaattttcttgctgtgatatatatgaggaatttactactttatgtcctgctctctaaactacatcctgaactcgacgtcctgaggtataatacaacagagcactttttgaggcaattgaaaaaccaacctacactcttcggtgcttagagagatctgctgtctcccaaataagcttttgtatctgccagtgaatttactgtactccaaatgattgctttcttttctggtgatatctgtgcttctcataattactgaaagctgcaatattttagtaataccttcgggatcactgtcccccatcttccgtgttagagcaaagtgaagagtttaaaggaggaagaagaaagaactgtcttacaccacttgagctcagacctctaaaccctgtatttcccttatgatgtcccctttttgagacactaatttttaaatacttactagctctgaaatatattgatttttatcacagtattctcagggtgaaattaaaccaactataggcctttttcttgggatgattttctagtcttaaggtttggggacattataaacttgagtacatttgttgtacacagttgatattccaaattgtatggatgggagggagaggtgtcttaagctgtaggcttttctttgtactgcatttatagagatttagctttaatattttttagagatgtaaaacattctgctttcttagtcttacctagtctgaaacatttttattcaataaagattttaattaaaatttgaacttttcaa

SEQ ID NO: 73584 - DNA, 2787 bp, Homo sapiens
ttaggctaggtacgaggctcgggtgttaatcggccgaggccagtccaggcagcctgtgtcaaacaaagcagctcaaccaactatacaaatgagctgaaagccagtggtggcgaaatcaaaattcataaaatggagcaaaaggagaatgtgcccccaggtcctgaggtctgcatcacccatcaggaaggggaaaagatttctgcaaatgagaatagcctggcagtccgttccacccctgccgaagatgactcccgtgactcccaggttaagagtgaggttcaacagcctgtccatcccaagccactaagtccagattccagagcctccagtctttctgaaagttctcctcccaaagcaatgaagaagtttcaggcacctgcaagagagacctgcgtggaatgtcagaagacagtctatccaatggagcgtctcttggccaaccagcaggtgtttcacatcagctgcttccgttgctcctattgcaacaacaaactcagtctaggaacatatgcatctttacatggaagaatctattgtaagcctcacttcaatcaactctttaaatctaagggcaactatgatgaaggctttgggcacagaccacacaaggatctatgggcaagcaaaaatgaaaacgaagagattttggagagaccagcccagcttgcaaatgcaagggagacccctcacagcccaggggtagaagatgcccctattgctaaggtgggtgtcctggctgcaagtatggaagccaaggcctcctctcagcaggagaaggaagacaagccagctgaaaccaagaagctgaggatcgcctggccaccccccactgaacttggaagttcaggaagtgccttggaggaagggatcaaaatgtcaaagcccaaatggcctcctgaagacgaaatcagcaagcccgaagttcctgaggatgtcgatctagatctgaagaagctaagacgatcttcttcactgaaggaaagaagccgcccattcactgtagcagcttcatttcaaagcacctctgtcaagagcccaaaaactgtgtccccacctatcaggaaaggctggagcatgtcagagcagagtgaagagtctgtgggtggaagagttgcagaaaggaaacaagtggaaaatgccaaggcttctaagaagaatgggaatgtgggaaaaacaacctggcaaaacaaagaatctaaaggagagacagggaagagaagtaaggaaggtcatagtttggagatggagaatgagaatcttgtagaaaatggtgcagactccgatgaagatgataacagcttcctcaaacaacaatctccacaagaacccaagtctctgaattggtcgagttttgtagacaacacctttgctgaagaattcactactcagaatcagaaatcccaggatgtggaactctgggagggagaagtggtcaaagagctctctgtggaagaacagataaagagaaatcggtattatgatgaggatgaggatgaagagtgacaaattgcaatgatgctgggccttaaattcatgttagtgttagcgagccactgccctttgtcaaaatgtgatgcacataagcaggtatcccagcatgaaatgtaatttacttggaagtaactttggaaaagaattccttcttaaaatcaaaaacaaaacaaaaaaacacaaaaaacacattctaaatactagagataactttacttaaattcttcattttagcagtgatgatatgcataagtgctgtaaggcttgtaactggggaaatattccacctgataatagcccagattctactgtattcccaaaaggcaatattaaggtagatagatgattagtagtatattgttacacactattttggaattagagaacatacagaaggaatttaggggcttaaacattacgactgaatgcactttagtataaagggcacagtttgtatatttttaaatgaataccaatttaattttttagtatttacctgttaagagattatttagtctttaaattttttaggttaattttcttgctgtgatatatatgaggaatttactactttatgtcctgctctctaaactacatcctgaactcgacgtcctgaggtataatacaacagagcactttttgaggcaattgaaaaaccaacctacactcttcggtgcttagagagatctgctgtctcccaaataagcttttgtatctgccagtgaatttactgtactccaaatgattgctttcttttctggtgatatctgtgcttctcataattactgaaagctgcaatattttagtaataccttcgggatcactgtcccccatcttccgtgttagagcaaagtgaagagtttaaaggaggaagaagaaagaactgtcttacaccacttgagctcagacctctaaaccctgtatttcccttatgatgtcccctttttgagacactaatttttaaatacttactagctctgaaatatattgatttttatcacagtattctcagggtgaaattaaaccaactataggcctttttcttgggatgattttctagtcttaaggtttggggacattataaacttgagtacatttgttgtacacagttgatattccaaattgtatggatgggagggagaggtgtcttaagctgtaggcttttctttgtactgcatttatagagatttagctttaatattttttagagatgtaaaacattctgctttcttagtcttacctagtctgaaacatttttattcaataaagattttaattaaaatttgaacttttcaa

SEQ ID NO: 73585 - DNA, 3988 bp, Homo sapiens
cggggcggggccgcaggagcagtaggtgttagcagcttggtcgcgacaggtgcgctaggtagagcgccgggacctgtgacagggctggtagcagcgcagaggaaaggcggcttttagccaggtatttcagtgtctgtagacaagatggaatcatctccatttaatagacggcaatggacctcactatcattgagggtaacagccaaagaactttctcttgtcaacaagaacaagtcatcggctattgtggaaatattctccaagtaccagaaagcagctgaagaaacaaacatggagaagaagagaagtaacaccgaaaatctctcccagcactttagaaaggggaccctgactgtgttaaagaagaagtgggagaacccagggctgggagcagagtctcacacagactctctacggaacagcagcactgagattaggcacagagcagaccatcctcctgctgaagtgacaagccacgctgcttctggagccaaagctgaccaagaagaacaaatccaccccagatctagactcaggtcacctcctgaagccctcgttcagggtcgatatccccacatcaaggacggtgaggatcttaaagaccactcaacagaaagtaaaaaaatggaaaattgtctaggagaatccaggcatgaagtagaaaaatcagaaatcagtgaaaacacagatgcttcgggcaaaatagagaaatataatgttccgctgaacaggcttaagatgatgtttgagaaaggtgaaccaactcaaactaagattctccgggcccaaagccgaagtgcaagtggaaggaagatctctgaaaacagctattctctagatgacctggaaataggcccaggtcagttgtcatcttctacatttgactcggagaaaaatgagagtagacgaaatctggaacttccacgcctctcagaaacctctataaaggatcgaatggccaagtaccaggcagctgtgtccaaacaaagcagctcaaccaactatacaaatgagctgaaagccagtggtggcgaaatcaaaattcataaaatggagcaaaaggagaatgtgcccccaggtcctgaggtctgcatcacccatcaggaaggggaaaagatttctgcaaatgagaatagcctggcagtccgttccacccctgccgaagatgactcccgtgactcccaggttaagagtgaggttcaacagcctgtccatcccaagccactaagtccagattccagagcctccagtctttctgaaagttctcctcccaaagcaatgaagaagtttcaggcacctgcaagagagacctgcgtggaatgtcagaagacagtctatccaatggagcgtctcttggccaaccagcaggtgtttcacatcagctgcttccgttgctcctattgcaacaacaaactcagtctaggaacatatgcatctttacatggaagaatctattgtaagcctcacttcaatcaactctttaaatctaagggcaactatgatgaaggctttgggcacagaccacacaaggatctatgggcaagcaaaaatgaaaacgaagagattttggagagaccagcccagcttgcaaatgcaagggagacccctcacagcccaggggtagaagatgcccctattgctaaggtgggtgtcctggctgcaagtatggaagccaaggcctcctctcagcaggagaaggaagacaagccagctgaaaccaagaagctgaggatcgcctggccaccccccactgaacttggaagttcaggaagtgccttggaggaagggatcaaaatgtcaaagcccaaatggcctcctgaagacgaaatcagcaagcccgaagttcctgaggatgtcgatctagatctgaagaagctaagacgatcttcttcactgaaggaaagaagccgcccattcactgtagcagcttcatttcaaagcacctctgtcaagagcccaaaaactgtgtccccacctatcaggaaaggctggagcatgtcagagcagagtgaagagtctgtgggtggaagagttgcagaaaggaaacaagtggaaaatgccaaggcttctaagaagaatgggaatgtgggaaaaacaacctggcaaaacaaagaatctaaaggagagacagggaagagaagtaaggaaggtcatagtttggagatggagaatgagaatcttgtagaaaatggtgcagactccgatgaagatgataacagcttcctcaaacaacaatctccacaagaacccaagtctctgaattggtcgagttttgtagacaacacctttgctgaagaattcactactcagaatcagaaatcccaggatgtggaactctgggagggagaagtggtcaaagagctctctgtggaagaacagataaagagaaatcggtattatgatgaggatgaggatgaagagtgacaaattgcaatgatgctgggccttaaattcatgttagtgttagcgagccactgccctttgtcaaaatgtgatgcacataagcaggtatcccagcatgaaatgtaatttacttggaagtaactttggaaaagaattccttcttaaaatcaaaaacaaaacaaaaaaacacaaaaaacacattctaaatactagagataactttacttaaattcttcattttagcagtgatgatatgcataagtgctgtaaggcttgtaactggggaaatattccacctgataatagcccagattctactgtattcccaaaaggcaatattaaggtagatagatgattagtagtatattgttacacactattttggaattagagaacatacagaaggaatttaggggcttaaacattacgactgaatgcactttagtataaagggcacagtttgtatatttttaaatgaataccaatttaattttttagtatttacctgttaagagattatttagtctttaaattttttaggttaattttcttgctgtgatatatatgaggaatttactactttatgtcctgctctctaaactacatcctgaactcgacgtcctgaggtataatacaacagagcactttttgaggcaattgaaaaaccaacctacactcttcggtgcttagagagatctgctgtctcccaaataagcttttgtatctgccagtgaatttactgtactccaaatgattgctttcttttctggtgatatctgtgcttctcataattactgaaagctgcaatattttagtaataccttcgggatcactgtcccccatcttccgtgttagagcaaagtgaagagtttaaaggaggaagaagaaagaactgtcttacaccacttgagctcagacctctaaaccctgtatttcccttatgatgtcccctttttgagacactaatttttaaatacttactagctctgaaatatattgatttttatcacagtattctcagggtgaaattaaaccaactataggcctttttcttgggatgattttctagtcttaaggtttggggacattataaacttgagtacatttgttgtacacagttgatattccaaattgtatggatgggagggagaggtgtcttaagctgtaggcttttctttgtactgcatttatagagatttagctttaatattttttagagatgtaaaacattctgctttcttagtcttacctagtctgaaacatttttattcaataaagattttaattaaaatttgaacttttcaaaaaaaaaacaaaacaaaaaacttttgggcgcgccgccaccagaaaaaaggtctcaacacaccttgcgtagggaggccgggaccccatcgagctcagtcacagcggccaaagcggccccaacaaaccggggaacgaacaggtgtggtcccccataaaaagcccgggagcgagcgctggaacatccaatggtcggggcaaccggttcaaagaggccaggatataaccaccgcagctgacacacacgtcaccgacgcgccacacacccggcgcccggcaagga

SEQ ID NO: 73586 - DNA, 2502 bp, Homo sapiens
cgacctagaggatcccaattcaggcttcattccagagcctccagtctttctgaaagttctcctcccaaagcaatgaagaagtttcaggcacctgcaagagagacctgcgtggaatgtcagaagacagtctatccaatggagcgtctcttggccaaccagcaggtgtttcacatcagctgcttccgttgctcctattgcaacaacaaactcagtctaggaacatatgcatctttacatggaagaatctattgtaagcctcacttcaatcaactctttaaatctaagggcaactatgatgaaggctttgggcacagaccacacaaggatctatgggcaagcaaaaatgaaaacgaagagattttggagagaccagcccagcttgcaaatgcaagggagacccctcacagcccaggggtagaagatgcccctattgctaaggtgggtgtcctggctgcaagtatggaagccaaggcctcctctcagcaggagaaggaagacaagccagctgaaaccaagaagctgaggatcgcctggccaccccccactgaacttggaagttcaggaagtgccttggaggaagggatcaaaatgtcaaagcccaaatggcctcctgaagacgaaatcagcaagcccgaagttcctgaggatgtcgatctagatctgaagaagctaagacgatcttcttcactgaaggaaagaagccgcccattcactgtagcagcttcatttcaaagcacctctgtcaagagcccaaaaactgtgtccccacctatcaggaaaggctggagcatgtcagagcagagtgaagagtctgtgggtggaagagttgcagaaaggaaacaagtggaaaatgccaaggcttctaagaagaatgggaatgtgggaaaaacaacctggcaaaacaaagaatctaaaggagagacagggaagagaagtaaggaaggtcatagtttggagatggagaatgagaatcttgtagaaaatggtgcagactccgatgaagatgataacagcttcctcaaacaacaatctccacaagaacccaagtctctgaattggtcgagttttgtagacaacacctttgctgaagaattcactactcagaatcagaaatcccaggatgtggaactctgggagggagaagtggtcaaagagctctctgtggaagaacagataaagagaaatcggtattatgatgaggatgaggatgaagagtgacaaattgcaatgatgctgggccttaaattcatgttagtgttagcgagccactgccctttgtcaaaatgtgatgcacataagcaggtatcccagcatgaaatgtaatttacttggaagtaactttggaaaagaattccttcttaaaatcaaaaacaaaacaaaaaaacacaaaaaacacattctaaatactagagataactttacttaaattcttcattttagcagtgatgatatgcataagtgctgtaaggcttgtaactggggaaatattccacctgataatagcccagattctactgtattcccaaaaggcaatattaaggtagatagatgattagtagtatattgttacacactattttggaattagagaacatacagaaggaatttaggggcttaaacattacgactgaatgcactttagtataaagggcacagtttgtatatttttaaatgaataccaatttaattttttagtatttacctgttaagagattatttagtctttaaattttttaggttaattttcttgctgtgatatatatgaggaatttactactttatgtcctgctctctaaactacatcctgaactcgacgtcctgaggtataatacaacagagcactttttgaggcaattgaaaaaccaacctacactcttcggtgcttagagagatctgctgtctcccaaataagcttttgtatctgccagtgaatttactgtactccaaatgattgctttcttttctggtgatatctgtgcttctcataattactgaaagctgcaatattttagtaataccttcgggatcactgtcccccatcttccgtgttagagcaaagtgaagagtttaaaggaggaagaagaaagaactgtcttacaccacttgagctcagacctctaaaccctgtatttcccttatgatgtcccctttttgagacactaatttttaaatacttactagctctgaaatatattgatttttatcacagtattctcagggtgaaattaaaccaactataggcctttttcttgggatgattttctagtcttaaggtttggggacattataaacttgagtacatttgttgtacacagttgatattccaaattgtatggatgggagggagaggtgtcttaagctgtaggcttttctttgtactgcatttatagagatttagctttaatattttttagagatgtaaaacattctgctttcttagtcttacctagtctgaaacatttttattcaataaagattttaattaaaatttgaacttttcaa

SEQ ID NO: 73587 - DNA, 2709 bp, Homo sapiens
atgtgggtcgtgacttgtctaagccattctttgtaatccagacgtagctccacctatccttggtggctgctacatttagagcagccacacagtttgggaagggaatatcaagagagcctcttggctttaaagagtcagctgatagaattgtagcaggtttagtgctccatgagaattgactgaccagctaagggagcccttagacaaagtaaattctagggtccatctcaagacagtgctaactcatcgctgcccatgctaaagttgtctttttgtttttcctagaagtttcaggcacctgcaagagagacctgcgtggaatgtcagaagacagtctatccaatggagcgtctcttggccaaccagcaggtgtttcacatcagctgcttccgttgctcctattgcaacaacaaactcagtctaggaacatatgcatctttacatggaagaatctattgtaagcctcacttcaatcaactctttaaatctaagggcaactatgatgaaggctttgggcacagaccacacaaggatctatgggcaagcaaaaatgaaaacgaagagattttggagagaccagcccagcttgcaaatgcaagggagacccctcacagcccaggggtagaagatgcccctattgctaaggtgggtgtcctggctgcaagtatggaagccaaggcctcctctcagcaggagaaggaagacaagccagctgaaaccaagaagctgaggatcgcctggccaccccccactgaacttggaagttcaggaagtgccttggaggaagggatcaaaatgtcaaagcccaaatggcctcctgaagacgaaatcagcaagcccgaagttcctgaggatgtcgatctagatctgaagaagctaagacgatcttcttcactgaaggaaagaagccgcccattcactgtagcagcttcatttcaaagcacctctgtcaagagcccaaaaactgtgtccccacctatcaggaaaggctggagcatgtcagagcagagtgaagagtctgtgggtggaagagttgcagaaaggaaacaagtggaaaatgccaaggcttctaagaagaatgggaatgtgggaaaaacaacctggcaaaacaaagaatctaaaggagagacagggaagagaagtaaggaaggtcatagtttggagatggagaatgagaatcttgtagaaaatggtgcagactccgatgaagatgataacagcttcctcaaacaacaatctccacaagaacccaagtctctgaattggtcgagttttgtagacaacacctttgctgaagaattcactactcagaatcagaaatcccaggatgtggaactctgggagggagaagtggtcaaagagctctctgtggaagaacagataaagagaaatcggtattatgatgaggatgaggatgaagagtgacaaattgcaatgatgctgggccttaaattcatgttagtgttagcgagccactgccctttgtcaaaatgtgatgcacataagcaggtatcccagcatgaaatgtaatttacttggaagtaactttggaaaagaattccttcttaaaatcaaaaacaaaacaaaaaaacacaaaaaacacattctaaatactagagataactttacttaaattcttcattttagcagtgatgatatgcataagtgctgtaaggcttgtaactggggaaatattccacctgataatagcccagattctactgtattcccaaaaggcaatattaaggtagatagatgattagtagtatattgttacacactattttggaattagagaacatacagaaggaatttaggggcttaaacattacgactgaatgcactttagtataaagggcacagtttgtatatttttaaatgaataccaatttaattttttagtatttacctgttaagagattatttagtctttaaattttttaggttaattttcttgctgtgatatatatgaggaatttactactttatgtcctgctctctaaactacatcctgaactcgacgtcctgaggtataatacaacagagcactttttgaggcaattgaaaaaccaacctacactcttcggtgcttagagagatctgctgtctcccaaataagcttttgtatctgccagtgaatttactgtactccaaatgattgctttcttttctggtgatatctgtgcttctcataattactgaaagctgcaatattttagtaataccttcgggatcactgtcccccatcttccgtgttagagcaaagtgaagagtttaaaggaggaagaagaaagaactgtcttacaccacttgagctcagacctctaaaccctgtatttcccttatgatgtcccctttttgagacactaatttttaaatacttactagctctgaaatatattgatttttatcacagtattctcagggtgaaattaaaccaactataggcctttttcttgggatgattttctagtcttaaggtttggggacattataaacttgagtacatttgttgtacacagttgatattccaaattgtatggatgggagggagaggtgtcttaagctgtaggcttttctttgtactgcatttatagagatttagctttaatattttttagagatgtaaaacattctgctttcttagtcttacctagtctgaaacatttttattcaataaagattttaattaaaatttgaacttttcaa

SEQ ID NO: 73588 - DNA, 2431 bp, Homo sapiens
cctggtcactgaagggcttttaaagatctttttcttacttggcatcttctgaaaatactggaattgccagattttagcctcctggtataagtgagaatgtgaagatttgctaagtttatgctttttttcttttaatgacagtctaggaacatatgcatctttacatggaagaatctattgtaagcctcacttcaatcaactctttaaatctaagggcaactatgatgaaggctttgggcacagaccacacaaggatctatgggcaagcaaaaatgaaaacgaagagattttggagagaccagcccagcttgcaaatgcaagggagacccctcacagcccaggggtagaagatgcccctattgctaaggtgggtgtcctggctgcaagtatggaagccaaggcctcctctcagcaggagaaggaagacaagccagctgaaaccaagaagctgaggatcgcctggccaccccccactgaacttggaagttcaggaagtgccttggaggaagggatcaaaatgtcaaagcccaaatggcctcctgaagacgaaatcagcaagcccgaagttcctgaggatgtcgatctagatctgaagaagctaagacgatcttcttcactgaaggaaagaagccgcccattcactgtagcagcttcatttcaaagcacctctgtcaagagcccaaaaactgtgtccccacctatcaggaaaggctggagcatgtcagagcagagtgaagagtctgtgggtggaagagttgcagaaaggaaacaagtggaaaatgccaaggcttctaagaagaatgggaatgtgggaaaaacaacctggcaaaacaaagaatctaaaggagagacagggaagagaagtaaggaaggtcatagtttggagatggagaatgagaatcttgtagaaaatggtgcagactccgatgaagatgataacagcttcctcaaacaacaatctccacaagaacccaagtctctgaattggtcgagttttgtagacaacacctttgctgaagaattcactactcagaatcagaaatcccaggatgtggaactctgggagggagaagtggtcaaagagctctctgtggaagaacagataaagagaaatcggtattatgatgaggatgaggatgaagagtgacaaattgcaatgatgctgggccttaaattcatgttagtgttagcgagccactgccctttgtcaaaatgtgatgcacataagcaggtatcccagcatgaaatgtaatttacttggaagtaactttggaaaagaattccttcttaaaatcaaaaacaaaacaaaaaaacacaaaaaacacattctaaatactagagataactttacttaaattcttcattttagcagtgatgatatgcataagtgctgtaaggcttgtaactggggaaatattccacctgataatagcccagattctactgtattcccaaaaggcaatattaaggtagatagatgattagtagtatattgttacacactattttggaattagagaacatacagaaggaatttaggggcttaaacattacgactgaatgcactttagtataaagggcacagtttgtatatttttaaatgaataccaatttaattttttagtatttacctgttaagagattatttagtctttaaattttttaggttaattttcttgctgtgatatatatgaggaatttactactttatgtcctgctctctaaactacatcctgaactcgacgtcctgaggtataatacaacagagcactttttgaggcaattgaaaaaccaacctacactcttcggtgcttagagagatctgctgtctcccaaataagcttttgtatctgccagtgaatttactgtactccaaatgattgctttcttttctggtgatatctgtgcttctcataattactgaaagctgcaatattttagtaataccttcgggatcactgtcccccatcttccgtgttagagcaaagtgaagagtttaaaggaggaagaagaaagaactgtcttacaccacttgagctcagacctctaaaccctgtatttcccttatgatgtcccctttttgagacactaatttttaaatacttactagctctgaaatatattgatttttatcacagtattctcagggtgaaattaaaccaactataggcctttttcttgggatgattttctagtcttaaggtttggggacattataaacttgagtacatttgttgtacacagttgatattccaaattgtatggatgggagggagaggtgtcttaagctgtaggcttttctttgtactgcatttatagagatttagctttaatattttttagagatgtaaaacattctgctttcttagtcttacctagtctgaaacatttttattcaataaagattttaattaaaatttgaacttttcaa

SEQ ID NO: 73589 - DNA, 2070 bp, Homo sapiens
gtagtgtctcgaggatctcttcggatacttggagcaagagcctcctctcagcaggagaaggaagacaagccagctgaaaccaagaagctgaggatcgcctggccaccccccactgaacttggaagttcaggaagtgccttggaggaagggatcaaaatgtcaaagcccaaatggcctcctgaagacgaaatcagcaagcccgaagttcctgaggatgtcgatctagatctgaagaagctaagacgatcttcttcactgaaggaaagaagccgcccattcactgtagcagcttcatttcaaagcacctctgtcaagagcccaaaaactgtgtccccacctatcaggaaaggctggagcatgtcagagcagagtgaagagtctgtgggtggaagagttgcagaaaggaaacaagtggaaaatgccaaggcttctaagaagaatgggaatgtgggaaaaacaacctggcaaaacaaagaatctaaaggagagacagggaagagaagtaaggaaggtcatagtttggagatggagaatgagaatcttgtagaaaatggtgcagactccgatgaagatgataacagcttcctcaaacaacaatctccacaagaacccaagtctctgaattggtcgagttttgtagacaacacctttgctgaagaattcactactcagaatcagaaatcccaggatgtggaactctgggagggagaagtggtcaaagagctctctgtggaagaacagataaagagaaatcggtattatgatgaggatgaggatgaagagtgacaaattgcaatgatgctgggccttaaattcatgttagtgttagcgagccactgccctttgtcaaaatgtgatgcacataagcaggtatcccagcatgaaatgtaatttacttggaagtaactttggaaaagaattccttcttaaaatcaaaaacaaaacaaaaaaacacaaaaaacacattctaaatactagagataactttacttaaattcttcattttagcagtgatgatatgcataagtgctgtaaggcttgtaactggggaaatattccacctgataatagcccagattctactgtattcccaaaaggcaatattaaggtagatagatgattagtagtatattgttacacactattttggaattagagaacatacagaaggaatttaggggcttaaacattacgactgaatgcactttagtataaagggcacagtttgtatatttttaaatgaataccaatttaattttttagtatttacctgttaagagattatttagtctttaaattttttaggttaattttcttgctgtgatatatatgaggaatttactactttatgtcctgctctctaaactacatcctgaactcgacgtcctgaggtataatacaacagagcactttttgaggcaattgaaaaaccaacctacactcttcggtgcttagagagatctgctgtctcccaaataagcttttgtatctgccagtgaatttactgtactccaaatgattgctttcttttctggtgatatctgtgcttctcataattactgaaagctgcaatattttagtaataccttcgggatcactgtcccccatcttccgtgttagagcaaagtgaagagtttaaaggaggaagaagaaagaactgtcttacaccacttgagctcagacctctaaaccctgtatttcccttatgatgtcccctttttgagacactaatttttaaatacttactagctctgaaatatattgatttttatcacagtattctcagggtgaaattaaaccaactataggcctttttcttgggatgattttctagtcttaaggtttggggacattataaacttgagtacatttgttgtacacagttgatattccaaattgtatggatgggagggagaggtgtcttaagctgtaggcttttctttgtactgcatttatagagatttagctttaatattttttagagatgtaaaacattctgctttcttagtcttacctagtctgaaacatttttattcaataaagattttaattaaaatttgaacttttcaa

SEQ ID NO: 73590 - DNA, 1547 bp, Homo sapiens
aatcgagctcggtaccgaatctcgaaaatggtgcagactccgatgaagatgataacagcttcctcaaacaacaatctccacaagaacccaagtctctgaattggtcgagttttgtagacaacacctttgctgaagaattcactactcagaatcagaaatcccaggatgtggaactctgggagggagaagtggtcaaagagctctctgtggaagaacagataaagagaaatcggtattatgatgaggatgaggatgaagagtgacaaattgcaatgatgctgggccttaaattcatgttagtgttagcgagccactgccctttgtcaaaatgtgatgcacataagcaggtatcccagcatgaaatgtaatttacttggaagtaactttggaaaagaattccttcttaaaatcaaaaacaaaacaaaaaaacacaaaaaacacattctaaatactagagataactttacttaaattcttcattttagcagtgatgatatgcataagtgctgtaaggcttgtaactggggaaatattccacctgataatagcccagattctactgtattcccaaaaggcaatattaaggtagatagatgattagtagtatattgttacacactattttggaattagagaacatacagaaggaatttaggggcttaaacattacgactgaatgcactttagtataaagggcacagtttgtatatttttaaatgaataccaatttaattttttagtatttacctgttaagagattatttagtctttaaattttttaggttaattttcttgctgtgatatatatgaggaatttactactttatgtcctgctctctaaactacatcctgaactcgacgtcctgaggtataatacaacagagcactttttgaggcaattgaaaaaccaacctacactcttcggtgcttagagagatctgctgtctcccaaataagcttttgtatctgccagtgaatttactgtactccaaatgattgctttcttttctggtgatatctgtgcttctcataattactgaaagctgcaatattttagtaataccttcgggatcactgtcccccatcttccgtgttagagcaaagtgaagagtttaaaggaggaagaagaaagaactgtcttacaccacttgagctcagacctctaaaccctgtatttcccttatgatgtcccctttttgagacactaatttttaaatacttactagctctgaaatatattgatttttatcacagtattctcagggtgaaattaaaccaactataggcctttttcttgggatgattttctagtcttaaggtttggggacattataaacttgagtacatttgttgtacacagttgatattccaaattgtatggatgggagggagaggtgtcttaagctgtaggcttttctttgtactgcatttatagagatttagctttaatattttttagagatgtaaaacattctgctttcttagtcttacctagtctgaaacatttttattcaataaagattttaattaaaatttgaacttttcaa

SEQ ID NO: 73591 - DNA, 1296 bp, Homo sapiens
gcggcccaggcaatagcaggaatgatgctgggccttaaattcatgttagtgttagcgagccactgccctttgtcaaaatgtgatgcacataagcaggtatcccagcatgaaatgtaatttacttggaagtaactttggaaaagaattccttcttaaaatcaaaaacaaaacaaaaaaacacaaaaaacacattctaaatactagagataactttacttaaattcttcattttagcagtgatgatatgcataagtgctgtaaggcttgtaactggggaaatattccacctgataatagcccagattctactgtattcccaaaaggcaatattaaggtagatagatgattagtagtatattgttacacactattttggaattagagaacatacagaaggaatttaggggcttaaacattacgactgaatgcactttagtataaagggcacagtttgtatatttttaaatgaataccaatttaattttttagtatttacctgttaagagattatttagtctttaaattttttaggttaattttcttgctgtgatatatatgaggaatttactactttatgtcctgctctctaaactacatcctgaactcgacgtcctgaggtataatacaacagagcactttttgaggcaattgaaaaaccaacctacactcttcggtgcttagagagatctgctgtctcccaaataagcttttgtatctgccagtgaatttactgtactccaaatgattgctttcttttctggtgatatctgtgcttctcataattactgaaagctgcaatattttagtaataccttcgggatcactgtcccccatcttccgtgttagagcaaagtgaagagtttaaaggaggaagaagaaagaactgtcttacaccacttgagctcagacctctaaaccctgtatttcccttatgatgtcccctttttgagacactaatttttaaatacttactagctctgaaatatattgatttttatcacagtattctcagggtgaaattaaaccaactataggcctttttcttgggatgattttctagtcttaaggtttggggacattataaacttgagtacatttgttgtacacagttgatattccaaattgtatggatgggagggagaggtgtcttaagctgtaggcttttctttgtactgcatttatagagatttagctttaatattttttagagatgtaaaacattctgctttcttagtcttacctagtctgaaacatttttattcaataaagattttaattaaaatttgaacttttcaa

SEQ ID NO: 73592 - DNA, 864 bp, Homo sapiens
gagctgtttaaagactaaataatctcttaacaggtaaataccaatttaattttttagtatttacctgttaagagattatttagtctttaaattttttaggttaattttcttgctgtgatatatatgaggaatttactactttatgtcctgctctctaaactacatcctgaactcgacgtcctgaggtataatacaacagagcactttttgaggcaattgaaaaaccaacctacactcttcggtgcttagagagatctgctgtctcccaaataagcttttgtatctgccagtgaatttactgtactccaaatgattgctttcttttctggtgatatctgtgcttctcataattactgaaagctgcaatattttagtaataccttcgggatcactgtcccccatcttccgtgttagagcaaagtgaagagtttaaaggaggaagaagaaagaactgtcttacaccacttgagctcagacctctaaaccctgtatttcccttatgatgtcccctttttgagacactaatttttaaatacttactagctctgaaatatattgatttttatcacagtattctcagggtgaaattaaaccaactataggcctttttcttgggatgattttctagtcttaaggtttggggacattataaacttgagtacatttgttgtacacagttgatattccaaattgtatggatgggagggagaggtgtcttaagctgtaggcttttctttgtactgcatttatagagatttagctttaatattttttagagatgtaaaacattctgctttcttagtcttacctagtctgaaacatttttattcaataaagattttaattaaaatttgaacttttcaa

SEQ ID NO: 73593 - DNA, 2184 bp, Homo sapiens
cggggcggggccgcaggagcagtaggtgttagcagcttggtcgcgacaggtgcgctaggtagagcgccgggacctgtgacagggctggtagcagcgcagaggaaaggcggcttttagccaggtatttcagtgtctgtagacaagatggaatcatctccatttaatagacggcaatggacctcactatcattgagggtaacagccaaagaactttctcttgtcaacaagaacaagtcatcggctattgtggaaatattctccaagtaccagaaagcagctgaagaaacaaacatggagaagaagagaagtaacaccgaaaatctctcccagcactttagaaaggggaccctgactgtgttaaagaagaagtgggagaacccagggctgggagcagagtctcacacagactctctacggaacagcagcactgagattaggcacagagcagaccatcctcctgctgaagtgacaagccacgctgcttctggagccaaagctgaccaagaagaacaaatccaccccagatctagactcaggtcacctcctgaagccctcgttcagggtcgatatccccacatcaaggacggtgaggatcttaaagaccactcaacagaaagtaaaaaaatggaaaattgtctaggagaatccaggcatgaagtagaaaaatcagaaatcagtgaaaacacagatgcttcgggcaaaatagagaaatataatgttccgctgaacaggcttaagatgatgtttgagaaaggtgaaccaactcaaactaagattctccgggcccaaagccgaagtgcaagtggaaggaagatctctgaaaacagctattctctagatgacctggaaataggcccaggtcagttgtcatcttctacatttgactcggagaaaaatgagagtagacgaaatctggaacttccacgcctctcagaaacctctataaaggatcgaatggccaagtaccaggcagctgtgtccaaacaaagcagctcaaccaactatacaaatgagctgaaagccagtggtggcgaaatcaaaattcataaaatggagcaaaaggagaatgtgcccccaggtcctgaggtctgcatcacccatcaggaaggggaaaagatttctgcaaatgagaatagcctggcagtccgttccacccctgccgaagatgactcccgtgactcccaggttaagagtgaggttcaacagcctgtccatcccaagccactaagtccagattccagagcctccagtctttctgaaagttctcctcccaaagcaatgaagaagtttcaggcacctgcaagagagacctgcgtggaatgtcagaagacagtctatccaatggagcgtctcttggccaaccagcaggtgtttcacatcagctgcttccgttgctcctattgcaacaacaaactcagaagtcagcccaaaacaagccatctgtctataactggaactctagagggagtctttggcttttagagcactggtgctaaaagctactgtgctaatgatattctgttgaaggctcttgaataaagtaaaaagcatcatttagtgacaagtctttcataccaaataatgatggtgtttggaacttcttggtgtattgatatgttaatttacatgttaggaccgaagcttaaataatatgagttgcaggtaaacccccctgtgacctaatttaatagaatgttttcccttggtatcacagaatcacaaagttaagaaatctcaagaggttacttgtttaagcccttacttgtcttaaccactgtataaatgataataatggcaataataatagcccctggagagcatgtctttttctctatgttgcctcactttatttctgagaaaatagttgttacatatcatttcttccaagtaactcaaagtgcaaatataaatgtgacaaatcggggaaacattccaaattaactcattttaatcatagagtcttacagaaggaagtaaccaagatgtcactttctccagctttcctttctgagcaatccttcctaaaatactcttgaaagatgttttggcatctgtgtgacatttctagctattagatagctctagctagacagcttctccaaacatgcagccaaagtgtacctcagtcacttccactcattagttcttctgctgcccactgtgttaatttttttctccaaagca

SEQ ID NO: 73594 - DNA, 1395 bp, Homo sapiens
cggggcggggccgcaggagcagtaggtgttagcagcttggtcgcgacaggtgcgctaggtagagcgccgggacctgtgacagggctggtagcagcgcagaggaaaggcggcttttagccaggtatttcagtgtctgtagacaagatggaatcatctccatttaatagacggcaatggacctcactatcattgagggtaacagccaaagaactttctcttgtcaacaagaacaagtcatcggctattgtggaaatattctccaagtaccagaaagcagctgaagaaacaaacatggagaagaagagaagtaacaccgaaaatctctcccagcactttagaaaggggaccctgactgtgttaaagaagaagtgggagaacccagggctgggagcagagtctcacacagactctctacggaacagcagcactgagattaggcacagagcagaccatcctcctgctgaagtgacaagccacgctgcttctggagccaaagctgaccaagaagaacaaatccaccccagatctagactcaggtcacctcctgaagccctcgttcagggtcgatatccccacatcaaggacggtgaggatcttaaagaccactcaacagaaagtaaaaaaatggaaaattgtctaggagaatccaggcatgaagtagaaaaatcagaaatcagtgaaaacacagatgcttcgggcaaaatagagaaatataatgttccgctgaacaggcttaagatgatgtttgagaaaggtgaaccaactcaaactaagattctccgggcccaaagccgaagtgcaagtggaaggaagatctctgaaaacagctattctctagatgacctggaaataggcccaggtcagttgtcatcttctacatttgactcggagaaaaatgagagtagacgaaatctggaacttccacgcctctcagaaacctctataaaggatcgaatggccaagtaccaggcagctgtgtccaaacaaagcagctcaaccaactatacaaatgagctgaaagccagtggtggcgaaatcaaaattcataaaatggagcaaaaggagaatgtgcccccaggtcctgaggtctgcatcacccatcaggaaggggaaaagatttctgcaaatgagaatagcctggcagtccgttccacccctgccgaagatgactcccgtaagcattctttcttagatctggaggatgaggttcttgttttctatctgtatttggttcaggggtgttcccattactgtcagtgctgagaaaataacatagtaaatcctctacttgaatttaagggctaatgcttgaatgtcctttacacacttcatggcttaaggagaagttaaattcaattgaatatagttaacttgggacaaactgaatacttgtaa

SEQ ID NO: 73595 - DNA, 1465 bp, Homo sapiens
cggggcggggccgcaggagcagtaggtgttagcagcttggtcgcgacaggtgcgctaggtagagcgccgggacctgtgacagggctggtagcagcgcagaggaaaggcggcttttagccaggtatttcagtgtctgtagacaagatggaatcatctccatttaatagacggcaatggacctcactatcattgagggtaacagccaaagaactttctcttgtcaacaagaacaagtcatcggctattgtggaaatattctccaagtaccagaaagcagctgaagaaacaaacatggagaagaagagaagtaacaccgaaaatctctcccagcactttagaaaggggaccctgactgtgttaaagaagaagtgggagaacccagggctgggagcagagtctcacacagactctctacggaacagcagcactgagattaggcacagagcagaccatcctcctgctgaagtgacaagccacgctgcttctggagccaaagctgaccaagaagaacaaatccaccccagatctagactcaggtcacctcctgaagccctcgttcagggtcgatatccccacatcaaggacggtgaggatcttaaagaccactcaacagaaagtaaaaaaatggaaaattgtctaggagaatccaggcatgaagtagaaaaatcagaaatcagtgaaaacacagatgcttcgggcaaaatagagaaatataatgttccgctgaacaggcttaagatgatgtttgagaaaggtgaaccaactcaaactaagattctccgggcccaaagccgaagtgcaagtggaaggaagatctctgaaaacagctattctctagatgacctggaaataggcccaggtcagttgtcatcttctacatttgactcggagaaaaatgagagtagacgaaatctggaacttccacgcctctcagaaacctctataaaggatcgaatggccaagtaccaggcagctgtgtccaaacaaagcagctcaaccaactatacagtatgtgttctgcatcattcattcattcattcattccatcatccagcagatggtcactgagtactggaattaggaaatgtcaccagacccttgtatctgagccctggtcccctagctgttctcttttcacatgaaccctaccctcgctggatttgcagttcttaccatggtctaatcctgactttgctttcttagtcctggttcccaccccactcactttttttgtgatgttaccagtgagtatcattgagagtttccctggctcttctacttaatctttgtgttgttaaagaagtagtattttattagttttaatataactcttattttatcttggttgttgagggaagaaggaagaagactgaagagcttattttggcttttgagggaagaaagaagaagactggagagaaatatcagctgtgttcattaacgagggttttttttgtgatttttt

SEQ ID NO: 73596 - DNA, 1185 bp, Homo sapiens
atgtgggtcgtgacttgtctaagccattctttgtaatccagacgtagctccacctatccttggtggctgctacatttagagcagccacacagtttgggaagggaatatcaagagagcctcttggctttaaagagtcagctgatagaattgtagcaggtttagtgctccatgagaattgactgaccagctaagggagcccttagacaaagtaaattctagggtccatctcaagacagtgctaactcatcgctgcccatgctaaagttgtctttttgtttttcctagaagtttcaggcacctgcaagagagacctgcgtggaatgtcagaagacagtctatccaatggagcgtctcttggccaaccagcaggtgtttcacatcagctgcttccgttgctcctattgcaacaacaaactcagaagtcagcccaaaacaagccatctgtctataactggaactctagagggagtctttggcttttagagcactggtgctaaaagctactgtgctaatgatattctgttgaaggctcttgaataaagtaaaaagcatcatttagtgacaagtctttcataccaaataatgatggtgtttggaacttcttggtgtattgatatgttaatttacatgttaggaccgaagcttaaataatatgagttgcaggtaaacccccctgtgacctaatttaatagaatgttttcccttggtatcacagaatcacaaagttaagaaatctcaagaggttacttgtttaagcccttacttgtcttaaccactgtataaatgataataatggcaataataatagcccctggagagcatgtctttttctctatgttgcctcactttatttctgagaaaatagttgttacatatcatttcttccaagtaactcaaagtgcaaatataaatgtgacaaatcggggaaacattccaaattaactcattttaatcatagagtcttacagaaggaagtaaccaagatgtcactttctccagctttcctttctgagcaatccttcctaaaatactcttgaaagatgttttggcatctgtgtgacatttctagctattagatagctctagctagacagcttctccaaacatgcagccaaagtgtacctcagtcacttccactcattagttcttctgctgcccactgtgttaatttttttctccaaagca

SEQ ID NO: 73597 - DNA, 489 bp, Homo sapiens
gtaagcagagagttccatgtgtatgaggtcctttaggaagtactcactagtagtaacatcttttggactcgaagccaatgcttttaaaggaagagtggcacaaattaaaaggaagtctgcctattagatgcaagccattctcaaatctcattgctctcgataaatagctttttttttttttttttttttgagacggaagttgacgtgctcccaaagtgctgggattacaggcatgagccgtcatgcccggctgcttttttcatatttttaatccacccttgttagtggtaacctatggtaagcaaagggtactttgaggagctataagtaaagtgctacgatcagttttgcctccagtcatctggggtttgagggcttcagtagatgggctgtgtcccctatcaggtttggttaccctgtattaccagtgataacataacactttgagagtggaattatgttttaaaggggacatatacaggcacttca

SEQ ID NO: 73598 - DNA, 445 bp, Homo sapiens
ggtagagcgccgggacctgtgacagggctggtagcagcgcagaggaaaggcggcttttagccaggtaagggccttctctctccacaaccggagagtgcgggaagaccccggcttctctccacaccctctttctccttcgacttttggggcggggggagtgcaaggagtgtgagtccctccccctcgagataaggggtcgagggacgctgatcctccgttctttcctcacttctggggcctgcgctgggtggggagtgcttatgtcgggctgagcctttgctgcccaagggcgggagctgcaaataccccgtcctctcccaccgagaacactgcattctaactgtatactttctggtgtggtggaggaaggtgacaattcattaaaactccaaataccctccttccagggaaatactgtaatattcaactgttctttttccttcat

SEQ ID NO: 73599 - DNA, 3366 bp, Homo sapiens
actgaaggcaggtggatggagtcagtcctcagttgcccctgctggccttcctggtgcttaccatcagcccaatctttgcacagtccttgttgttcttacttctctgcatgcattccttcagaagatcagtcatcaactttttcttaattcctctgtgacacacaatgggaattcaaaggaagagatcttaaaagtcacaacagttctttatcttaataatcccctccccattcaccttactacatgcagactcacctcacacccttacaacttgaagctgaaaatttaaaagtaatttccctttttgcagcttttcctcaggttaaggctttgatctgcctgagagtaactctaaaaggagggaagataaatatgggataaaatccacaaagtgtagcttctaattcctttggaagtttaaaaaatttccacatatctgatgcttcttttgtcaggtgcagaagcacaaaaacatattccgaagccaactgatagggaatttggggattattgtcagtttggagaatttgctgtgttatttcttcatttccatggatagctcatagttggctctttctgggtgagtaattatgtgtaatatagatcaaatcttttactaaggttacagctacatgttaggggaggctatgaaaatactatattattataatttcagtgcagtgattgttgtgagaaataactttcatggtaaccctaggaaaatgggcacctgccaccatcctgagaagtcctcacacaatgccctttctctcttacacacacacacacacacatacacacacacacacccccgtcactaattcatagagttccttagcaggcatagtcaaggatcctctgggtaatgtcagctgcttagtgataaaacagagccaaaactagtgcatcctgttgaaagtaatgcagaaacagtacctgggtccagatatgctttcctgcggcgctttcctctgttacctcgtttcatcctcacagcagcatggacggtaggtggggtcgcttctacaatcatttctgatgatagcttgggaatagagataggggcagtgacttgcctgatgtcgcacagccctccggctgtcctgctttcccatatggagcagtggtggtgtgggcacctgtgatgcaggagactttaaaaatgtcgtgaggtcacgtgctgcccctcctggtacgtgtggaatgcccctggccagcaaggggtgcttttttatcagagttggcagctggcatgtgggaaccgagcaagtgctgcgtaccaagttacttgttttaaggagaccaagtgctcagcgccaggtggttttcttttttgtcatagttacttgctataactcagcttgacttctgtcatgaatcagtgctctctgggaggatgcaatactctgtttgggcattaattggtagcaggttgtctcaaccaaaaagacaggaaacagcaaaagcctctctgaaattaagaggaaagttactctccccacacccatcagagtctttattggagccaccaggtgagctgtgcagcctggacaggcctgcagctataggccaccttcccagtttaggtcctcagcacaggggagcccaagtcactgggtgccttccgagggctgtcactgggcaggccatatacaagtcagtgtgtgcgtgggcactgcagtgtgtgcatgccgtaggtgttgatgggtgctaggaggggtgtcgtgtgcatgcgcgttgaagaggatctgtattgccgtgacctctgttcatggatgagtgcattgtaatttgttctcaggctgtgctgtgagggccgccttaacccttgctcccttcccttctagagctgccttaagttctccagaacttttcttctgtaaaggatatcttgcctggaagggatatcttgccctgtttctcaaggttttgtgagagttttgactggatgtggccctgcatgaccctccttctcctgtacttcctctttcctttccaaatgggaattagaactgtggggcagcaacagtctcagagccagtgagaggccagcttagagaatgcttctgagttagtgggactctgtgtcacaagtaagcaaatgaatatatgaaagaaattatggagataagttagattcttggtaatacttaaatgtcttgctttctactaaccttttgttactaaaggtaaagggtataactcaaactttttgtggacattcttttcaaaattttttaagaaccctgtactataaaaggttgagtaaaaacaggaaagcgtgctataagttcaaatctgttgtattaccctaaattagataaaccaacctgaattatagtagatttctcaatagatgaggaactgaaaaatactatgtaaaatatcttccaaaatgctttttatactttttttatttgtaatttggtctatctaaaatgttcgttagcttaacttaatgggcgttattggattcatatgactaacgtttcctcagtattgtaatgcttgaaatatttgaaagaaaaaatgttgttttttagttgaaactggtatatataattcagtgcttggcaggttagtatatttttatgcatttttcagagtcagcagtttcaaatcttattgttatcatgttataaaattttagcccacatttcaggctccgtaaatcatttgagccattattttttcccaacaaatggtgaattttttctttaaatgtggatatatatgtcgtaatttatgattcctggttatgtattttgtgggatcctgcaggtaaaattgacttttttgtgtctttgggagatttaaattgcgctaacagtgttgcgcaaaaatgagttcatgccatttaacatattgtattttaattattaactgtattaatttactatgaaatggacatccttttaactaaaatggaattgaacattgcagttttcaaatatttttccttgttgggtctggaaaaggaattctactttgatctgcatagaaaattttgatacaattttttgaaagttcttaggtgaaacatttacccattaaaaaggaagcagaaatactgagacatgaaaggcattatcaactaactctagactctagaacccattctagcatatctcacgtgcaatttttaaaaataagttaataattcatctcatatcaacaaaagcctttgaaacatgggttttcactagatatcacctagtgctaagataaaaaccaaaacaatatcagaattacatttatgctctaaatttgtagttgtccattgttgtgcttagtaaatgtgtgtcattaatgctgtattctcctagctattatggaaacttgtttaaataaagatatggatataaa

SEQ ID NO: 73600 - DNA, 3045 bp, Homo sapiens
  misc_feature (2950)..(2950): n is a, c, g, or t
  misc_feature (2956)..(2956): n is a, c, g, or t
actgaaggcaggtggatggagtcagtcctcagttgcccctgctggccttcctggtgcttaccatcagcccaatctttgcacagtccttgttgttcttacttctctgcatgcattccttcagaagatcagtcatcaactttttcttaattcctctgtgacacacaatgggaattcaaaggaagagatcttaaaagtcacaacagttctttatcttaataatcccctccccattcaccttactacatgcagactcacctcacacccttacaacttgaagctgaaaatttaaaagtaatttccctttttgcagcttttcctcaggttaaggctttgatctgcctgagagtaactctaaaaggagggaagataaatatgggataaaatccacaaagtgtagcttctaattcctttggaagtttaaaaaatttccacatatctgatgcttcttttgtcaggtgcagaagcacaaaaacatattccgaagccaactgatagggaatttggggattattgtcagtttggagaatttgctgtgttatttcttcatttccatggatagctcatagttggctctttctgggtgagtaattatgtgtaatatagatcaaatcttttactaaggttacagctacatgttaggggaggctatgaaaatactatattattataatttcagtgcagtgattgttgtgagaaataactttcatggtaaccctaggaaaatgggcacctgccaccatcctgagaagtcctcacacaatgccctttctctcttacacacacacacacacacatacacacacacacacccccgtcactaattcatagagttccttagcaggcatagtcaaggatcctctgggtaatgtcagctgcttagtgataaaacagagccaaaactagtgcatcctgttgaaagtaatgcagaaacagtacctgggtccagatatgctttcctgcggcgctttcctctgttacctcgtttcatcctcacagcagcatggacggtaggtggggtcgcttctacaatcatttctgatgatagcttgggaatagagataggggcagtgacttgcctgatgtcgcacagccctccggctgtcctgctttcccatatggagcagtggtggtgtgggcacctgtgatgcaggagactttaaaaatgtcgtgaggtcacgtgctgcccctcctggtacgtgtggaatgcccctggccagcaaggggtgcttttttatcagagttggcagctggcatgtgggaaccgagcaagtgctgcgtaccaagttacttgttttaaggagaccaagtgctcagcgccaggtggttttcttttttgtcatagttacttgctataactcagcttgacttctgtcatgaatcagtgctctctgggaggatgcaatactctgtttgggcattaattggtagcaggttgtctcaaccaaaaagacaggaaacagcaaaagcctctctgaaattaagaggaaagttactctccccacacccatcagagtctttattggagccaccaggtgagctgtgcagcctggacaggcctgcagctataggccaccttcccagtttaggtcctcagcacaggggagcccaagtcactgggtgccttccgagggctgtcactgggcaggccatatacaagtcagtgtgtgcgtgggcactgcagtgtgtgcatgccgtaggtgttgatgggtgctaggaggggtgtcgtgtgcatgcgcgttgaagaggatctgtattgccgtgacctctgttcatggatgagtgcattgtaatttgttctcaggctgtgctgtgagggccgccttaacccttgctcccttcccttctagagctgccttaagttctccagaacttttcttctgtaaaggatatcttgcctggaagggatatcttgccctgtttctcaaggttttgtgagagttttgactggatgtggccctgcatgaccctccttctcctgtacttcctctttcctttccaaatgggaattagaactgtggggcagcaacagtctcagagccagtgagaggccagcttagagaatgcttctgagttagtgggactctgtgtcacaagtaagcaaatgaatatatgaaagaaattatggagataagttagattcttggtaatacttaaatgtcttgctttctactaaccttttgttactaaaggtaaagggtataactcaaactttttgtggacattcttttcaaaattttttaagaaccctgtactataaaaggttgagtaaaaacaggaaagcgtgctataagttcaaatctgttgtattaccctaaattagataaaccaacctgaattatagtagatttctcaatagatgaggaactgaaaaatactatgtaaaatatcttccaaaatgctttttatactttttttatttgtaatttggtctatctaaaatgttcgttagcttaacttaatgggcgttattggattcatatgactaacgtttcctcagtattgtaatgcttgaaatatttgaaagaaaaaatgttgttttttagttgaaactggtatatataattcagtgcttggcaggttagtatatttttatgcatttttcagagtcagcagtttcaaatcttattgttatcatgttataaaattttagcccacatttcaggctccgtaaatcatttgagccattattttttcccaacaaatggtgaattttttctttaaatgtggatatatatgtcgtaatttatgattcctggttatgtattttgtgggatcctgcaggtaaaattgacttttttgtgtctttgggagatttaaattgcgctaacagtgttgcgcaaaaatgagttcatgccatttaacatattgtattttaattattaactgtattaatttactatgaaatggacatccttttaactaaaatggaattgaacattgcagttcaaantttccntgggtcggaaagacacattgcggcgtaaaatggcaccttggggtttgggatcccttagggaaataaaagagtattaaaacattcgtgaa

SEQ ID NO: 73601 - DNA, 520 bp, Homo sapiens
ataggttgagcagtttctccccagaactcatatccctgcccacagtgatggcctcagcactagcccactggcccacattgattctggcaataaagctcactgtagtgcaccactaccatcgtcagcgaatggtttagttggacgcataactgtgctgaatatattgaaaagcaattagcttcctgagggtcagtagctgacattccatttcaaaacactgaatgttgtcagatataatcatgagaattcatcagactctacagagtttataagcaataatttgacaggaggtggtttgctttgaatctgggagtactgaaaatgttaaatgatgaatagaggtggataaaccaactatcaactggttcatttttttcataggcttgtttgtcatttttttctgctgatttttttcttcctgtagcttgttgtcatttgaagtctcacttcttatcgctattgagatgactgttttcctttgtgcataattttgtgtgaaataaagaatgtttggaatttc

SEQ ID NO: 73602 - DNA, 211 bp, Homo sapiens
attagatggcacttggtgatatgataagaactcaaaaaatatttgaggaataaaggaaagaagaggccagacgtggtggcttatgcctgtaatcccagcactttgggaggctgaggcaggcggatcacttgtggtcaggagttcgagaccagcttggctaacatggtgaaaacccatctctactaaagatacaaaaattaaccggggatga

SEQ ID NO: 73603 - DNA, 205 bp, Homo sapiens
gacaaaatacccatgaagaggtgattttttttcatttccaagatgaacaatttctcccttttcccctcatttcaataaagcaaaaattttacatgcccttcagggcacactctgaccccacctctgctacccacatccttgcccctgacaagaaatcttagaacagtttttatttcttcttttctctcaccccaatctcaacccc

SEQ ID NO: 73604 - DNA, 580 bp, Homo sapiens
tcacttagaatctttggctgaatactgatctgggcatctatgaagtgacatgaggctctgaaaaattagggtccccaccagccagagaagagaaatccccaccagcaggtagagttctcacaagagtgtcacaccttagtaatcaggctaaatcagcactaaagactaaacttgtcctaacaaagtttaacaacaaacatttgatccttggaaaggatcaaatctatcccaagtgtctcaactatgtgctagaacaaaatccaacactctacaatgtaaattcacactgtctggtttccaatccgaaattaccaggaatataaacaggcaggaaaatacaacccataatcagaagaaaaaccagtgtaaacagagccagaagtgacaaaaatgaaagaattaaggtcctagcagacacggaccaaaaacagcttttgtaaatatgctccatatgatcaagaataaatcatggcccaggcacagtggctcacgcctgcaatcccagcactgaggcgggtggatcacttgaggtcaggagtttgagaccagtctggccaacgtatgaaaccctgtctctact

SEQ ID NO: 73605 - DNA, 470 bp, Homo sapiens
  misc_feature (93)..(93): n is a, c, g, or t
agtgctgtggtgtggtcatagctcactgcagccctgaactcctgggctcaagtgattctcctgcctcagtctcccaagtagctggggattacnggcgtacaccactatactccagcctgggcaacaaagagagagtctgtctcaaaaaaaatgggtaaagtggctctgggcactgtgactcactcctgtaatcccagcactctgagaggccaagctgggaggattgtttgagcccagggggttgagtctgcagtgaactgtgtttgtgccatagcattccaggctgggcgacagagccataccctgtcttaagaaaaaaaaaaaagcctggtccataaggtttgagacacacacacacacacacacacacacacgtgcgcatatacatgcatatagttagtgggagatacaattcccccccccccacctgagatataatccttatcctctttattttttcctttatttct

SEQ ID NO: 73606 - DNA, 746 bp, Homo sapiens
gcggccgccggagccggcgccgcggtcacctccgccgctgcctcggcggggccgggagaggattcgtctgacagcgaagcggagcaagagggaccccagaaactgatccgcaaagtgtctacctcggggcagatccggaccaagggtttcatcatgttggccaggctggtcacttctgagctcaagtgatccgcccacctggcctcccaaagtgctgggattacaggtgtgagccaccgcgcccggccgaaaacaatacaattgtgaagcagttctacaccatgttcgtagcagcgttattcataggagccaaaaagtggaagcaacccaactgttcactgatggatgaatggataaacaaaatgtggcacacacatataataatggggacattattcagccttgaactggagggaaattctgacaggtcactgtgaggtgaaaggtcgcattttcaggtgtcagggaatctttactgcaatttgctgacattattgaacaccaccacatttagcatattttcacataacaaaaaacactacatgtatgtacttaacattttatagggtcgatcttccttattcatggtttcagtatttgctaatttacctactcactaacatttatttgtgactccaaaatcaatacttgtatgtaatttttcacatgtgaaaaattggagttgcccaatgtgcacattcgcagctaaggttgaacctggctgtgctctgtcttcttgttttagc

SEQ ID NO: 73607 - DNA, 542 bp, Homo sapiens
gcggccgccggagccggcgccgcggtcacctccgccgctgcctcggcggggccgggagaggattcgtctgacagcgaagcggagcaagagggaccccagaaactgatccgcaaagtgtctacctcggggcagatccggaccaagaccagtattaaagagggacagctattgaagcaaaccagttctttccaaaggtggaaaaagcgatacttcaaacttcgaggccgcaccctttactatgcaaaggactcaaagtctctgatatttgatgaagttgacctctcagatgctagtgtagctgaagcaagcacgaaaaatgctaacaacagcttcacggtagatacccagtggtgagattgctgtgtcaaatggtagtacaatttttagttctttgagaaatctctatactgttttccatagatgttgtactaatttacattcacaccaacagtgtacaagcattccctttgctccacattcttgctaatacctgttgttttttgactttttaatgactgctctaagatggtgtctcattgtgg

SEQ ID NO: 73608 - DNA, 616 bp, Homo sapiens
agctgaaaggggccttcaagaagagagttctcagagcagactcagctttaggtgctgaaatgaatttctcaagatcatcactccattcagaaggctaatgctgtgtgctgagaacagaaaggagatggaggattggatcagctcactgaagtctgtacagaccagagaaccctacgaggtggcccagtttaatgtggaacatttctcagggatgcacaactggtacgcctgctcccacgcccgacccaccttctgtaacgtgtgcagagagagtctttctggagtcacctcccatggcctgtcctgcgaagtgtgtaaattcaaggctcacaaaagatgtgcagtgagagcaacaaataactgtaaatggactaccctggcctccatcgggaaggacattatagaagatgaagatggcgtcgcgatgcctcaccagtggcttgagggcaacctgcctgtaagtgccaagtgtgctgtctgcgacaaaacatgtggcagtgttctccgtctacaggattggaaatgcctttggtgtaagacaatggtacacactgcctgcaaagatttataccatccaatatgtccacttggtcaatgtaaagtatctatcatacct

SEQ ID NO: 73609 - DNA, 879 bp, Homo sapiens
gcggccgccggagccggcgccgcggtcacctccgccgctgcctcggcggggccgggagaggattcgtctgacagcgaagcggagcaagagggaccccagaaactgatccgcaaagtgtctacctcggggcagatccggaccaagaccagtattaaagagggacagctattgaagcaaaccagttctttccaaaggtggaaaaagcgatacttcaaacttcgaggccgcaccctttactatgcaaaggactcaaagtctctgatatttgatgaagttgacctctcagatgctagtgtagctgaagcaagcacgaaaaatgctaacaacagcttcacgatcatcactccattcagaaggctaatgctgtgtgctgagaacagaaaggagatggaggattggatcagctcactgaagtctgtacagaccagagaaccctacgaggtggcccagtttaatgtggaacatttctcagggatgcacaactggtacgcctgctcccacgcccgacccaccttctgtaacgtgtgcagagagagtctttctggagtcacctcccatggcctgtcctgcgaagtgtgtaaattcaaggctcacaaaagatgtgcagtgagagcaacaaataactgtaaatggactaccctggcctccatcgggaaggacattatagaagatgaagatggcgtcgcgatgcctcaccagtggcttgagggcaacctgcctgtaagtgccaagtgtgctgtctgcgacaaaacatgtggcagtgttctccgtctacaggattggaaatgcctttggtgtaagacaatggtacacactgcctgcaaagatttataccatccaatatgtccacttggtcaatgtaaagtatctatcatacct

SEQ ID NO: 73610 - DNA, 1229 bp, Homo sapiens
agctgaaaggggccttcaagaagagagttctcagagcagactcagctttaggtgctgaaatgaatttctcaaggccttttacagactccaaatagatggtcctgagctgatactgtcattgtcaccatgatcctggagacacagcctgtagctgtgtggaagtaaacttctaaaacctgtctcttctgagagttactgcatgaaaacaggcaaggatgggtcaagttttggaccagcagcccaagttccaccaaccactctgttatacagaggcttctaagctatgcagagtgctatgaagggtttattcttcttttgcccacctgactgatatactgatgtactttttgaagaagggcaatggaatttacctagacgtcactgtggtcttgatgtggctgaagtgttttgttgaaggctctttagtcctgtactcatttagattgactctcacttctggtccctttttgtggtgcagactaaagcctcaaactctgtaaaagacaatggcttgtctcatgaagagaagtgaccaactgttaataagctttatccaaagagggtcgtggaaaacaagaaaatgcaaaagtgaggttctcttcaatttcatatgcaattaacaaatatccagagctgactgattggtgctcctcttccatgtgacttttggctggctgtatttaaggatcatcactccattcagaaggctaatgctgtgtgctgagaacagaaaggagatggaggattggatcagctcactgaagtctgtacagaccagagaaccctacgaggtggcccagtttaatgtggaacatttctcagggatgcacaactggtacgcctgctcccacgcccgacccaccttctgtaacgtgtgcagagagagtctttctggagtcacctcccatggcctgtcctgcgaagtgtgtaaattcaaggctcacaaaagatgtgcagtgagagcaacaaataactgtaaatggactaccctggcctccatcgggaaggacattatagaagatgaagatggcgtcgcgatgcctcaccagtggcttgagggcaacctgcctgtaagtgccaagtgtgctgtctgcgacaaaacatgtggcagtgttctccgtctacaggattggaaatgcctttggtgtaagacaatggtacacactgcctgcaaagatttataccatccaatatgtccacttggtcaatgtaaagtatctatcatacct

SEQ ID NO: 73611 - DNA, 302 bp, Homo sapiens
tggcctccatcgggaaggacattatagaagatgaagatggcgtaagctgctgctctgtctctgctctcttcccactaactcctcttttatgttctgctcttgtggaagctgagaaagataagtaggaatgcttattattaggatttaatagaaggtttggttgattctgagtttttatttttaattcaatccttcatagcttctttagctcttagattttgaaggaaatctgttgtgaatagggcttagaagtggccgttgtgctgggctgttgttgtcgacctctgatgaactctgagatg

SEQ ID NO: 73612 - DNA, 355 bp, Homo sapiens
aatctgtcctcacatctcatttctaggtggcccagtttaatgtggaacatttctcagggatgcacaactggtacgcctgctcccacgcccgacccaccttctgtaacgtgtgcagagagagtctttctggagtcacctcccatggcctgtcctgcgaaggtactgtagcacctagcatgtgttttctcccaacagtaaccatactgtagacatgctgccactggttttattgtagcttaaaattgagctctccacacataggactagcttggaaaatatttttgctcaggaaaaaaaaacatagtcatttaaaggaaacatacatcaaaatacagcatttcacccccaagaaact

SEQ ID NO: 73613 - DNA, 802 bp, Homo sapiens
tgattgatgaattgtgagaggaagactttaccctgtacatagctgttcttgttattactataaacttacaaaaggacaaggtgttgaaacacttaaagtattagacttatgtccatggggtattcaggacactgttccaggaagtgtggatatcaacacaattagagatggagcatgaaaactttcaactgtacagacatggaagaagtttcaaatttcacatacttgtaaaaagttcctgtttgcttagcccagtttttatctggttgccttgtcaccagtgtttgtacagctcctgaaactgttgagaagtagagtgatctgtggttttaacagatggctaacttggtaagtttcagccatctcaattttatcatcaagctgcataggtccttcctagtttcctgtgagcaaggtctcagcctctgtggaaactgcatgcttgaattcatctccctacatagtcttagtggtctccttgcatagaagcagaatttaaaaatgaaaacatgttataaattaaatctcttgttcatggaatttcaagccacattgtttatatttgtgatagacatattttatatgcttgttacggtatactttttaattctatttttaacatttgttttttccagttttaatgatatacttgtaaaataagctgctccttctttatgcgtggctgaagttgttatgaattttatgtactgtgacataaaagaccctcagttattaaataataaagttgaattttatttgttgttattatttatttatttattttattttttgtgatggagtc

SEQ ID NO: 73614 - DNA, 841 bp, Homo sapiens
ccgagatggcgccattgcactccagcctgggcaacacagcgagactctgtctcaaaaaaaaaaaaaaaaaaaaaaaaaaaaaaaataagttattctgctctaagattctgttaaaaatgcttgataagatttgattaaatattgattcaggagatttcaagttctaaaattgacaccacaaaagcaagctgtcttctctcctcccaccaacagaagccaaaaacaaatatacagggccacgattattaccagcaatatcccagaactcaaacatgaggaggaaatagttcctaagaccgcaaaggtgaaaaaattctaagcagacaataagagaattagatatccatatccaagatgcccctttctccaatctgcctggcaccaagcatacaattttttattgtgattcagtttctagaatgggaaagtgagatcaaggtggacagctggcttccctgccaacttggattccctggcaggagacctgtccctgcctcaacccatgggaagtactgggagtgcctataggaagaaatatccctgacaacagccaaaaagaggaggcaaaactaccattcccagccctgaaattctgctttgtaacttggccaaaggagacaccacatcagagtgcctattcagcagcaccatgctgtaggaggttcgttccacaggtcacctggacatgaactcctacctagccttctcacactaccaagatatcccctttgggatgtaccccatccagaatgcgtacttgactatttactagaaccaaggcaaacctaggcttaaggttctatatagtgctgcaaaggatgtaatgactgagtggagaaaa

SEQ ID NO: 73615 - DNA, 545 bp, Homo sapiens
attagacagtgactatttggtgacataaacagatccagcaactggctgtcatgtgacagccattaacatgtgacaatggattgggccagtcaggtgcctcttttggggacaaactttctctttccaaaatgtgttgaatcatcaagagtctgagtgaaataaccgactagctgcacccagtgcacaggcacacctatgggtgctgctacctcgtttcccctggttctccctctggagaagtgctcctttcctccccaccctggggagcacttgcaactgtgtgggactgtttttcaggagtcaaggtgatggtgatagatactggtatttaatgggcaaagcagtgttgctaagtgttttgtgatgtgtgggaggagtctaccctaaatgcccaaaactcctctactgacaaacaatggagggtacatgatatcttggaagatcacatcttctttggctgttttcctgaagtcttcacctgtaaaacacatccgcttcagaacaggactataccatagctgtgatatttgctgttaagtacgtcg

SEQ ID NO: 73616 - DNA, 197 bp, Homo sapiens
  misc_feature (35)..(35): n is a, c, g, or t
ggtcgacgtttgtcagtagaggagttttgggcatntagggtagactcctcccacacatcacaaaacaatggagggtacatgatatcttggaagatcacatcttctttggctgttttcctgaagtcttcacctgtaaaacacatccgcttcagaacaggactataccatagctgtgatatttgctgttaagtacgtcg

SEQ ID NO: 73617 - DNA, 792 bp, Homo sapiens
cacaggaagaacttgtctgttacctagattcttatatttatttaaaatttttgagcataatggtcttagtaagcctggccatcatctgagttaaacagcctagtatattaggaagaaactggactagaatttggaacaaccctggtgcaaatcccagctctgctactaacaagtggtgtaccgttaagcaagtgccctaacccttctggatctcagtttcttatcccaaaatgggtttaaagtctcagccatatatcacaaaatttttgtgaggattcaatgaaatacgatattgtagatggtggcttttaaaaaaattactcatttgggcgaaatcctatcaaaaataaaactcctagccagagggtcagaactagaggtggtggagtgaacgccgcaccaggcaatggaagaagcactggcctagaccaagcttgagcgtgcaccactgtcacctggagggcttgttccaacacggatggctggactcacccccagaatttcagatttattaggtctgcactgggccctgagaatgtttatttaaaacaaattcctggatgctactggttcagttgccacactctgagacccgctggctttgagcttagaagatgtgggtttgattcctggattccacagtttactagctgtgagttagagaatttaaattacttacctgagtcttggtttcttatttgcaaactgaactgtaaactatttgttctacccattttataagacttttgtaaggataaaataaaagaatacatatgcaaattactgaaaaac

SEQ ID NO: 73618 - DNA, 758 bp, Homo sapiens
cacaggaagaacttgtctgttacctagattcttatatttatttaaaatttttgagcataatggtcttagtaagcctggccatcatctgagttaaacagcctagtatattaggaagaaactggactagaatttggaacaaccctggtgcaaatcccagctctgctactaacaagtggtgtaccgttaagcaagtgccctaacccttctggatctcagtttcttatcccaaaatgggtttaaagtctcagccatatatcacaaaatttttgtgaggattcaatgaaatacgatattgtagatggtggcttttaaaaaaattactcatttggagggtcagaactagaggtggtggagtgaacgccgcaccaggcaatggaagaagcactggcctagaccaagcttgagcgtgcaccactgtcacctggagggcttgttccaacacggatggctggactcacccccagaatttcagatttattaggtctgcactgggccctgagaatgtttatttaaaacaaattcctggatgctactggttcagttgccacactctgagacccgctggctttgagcttagaagatgtgggtttgattcctggattccacagtttactagctgtgagttagagaatttaaattacttacctgagtcttggtttcttatttgcaaactgaactgtaaactatttgttctacccattttataagacttttgtaaggataaaataaaagaatacatatgcaaattactgaaaaac

SEQ ID NO: 73619 - DNA, 483 bp, Homo sapiens
tcattgtattatatatatttgtatatttattgttatattttatcttttctatgaagggtcagaactagaggtggtggagtgaacgccgcaccaggcaatggaagaagcactggcctagaccaagcttgagcgtgcaccactgtcacctggagggcttgttccaacacggatggctggactcacccccagaatttcagatttattaggtctgcactgggccctgagaatgtttatttaaaacaaattcctggatgctactggttcagttgccacactctgagacccgctggctttgagcttagaagatgtgggtttgattcctggattccacagtttactagctgtgagttagagaatttaaattacttacctgagtcttggtttcttatttgcaaactgaactgtaaactatttgttctacccattttataagacttttgtaaggataaaataaaagaatacatatgcaaattactgaaaaac

SEQ ID NO: 73620 - DNA, 511 bp, Homo sapiens
ttttcctgagtaacactcttactccagatacatatacaggtcactcaactccttcaatttgtaaatctctggttaaatagaaaggtagcagatcagccctccttgatctctgccaacttaatatttgaacagagatttaaaggaaaaaatattacagaagtgggaatcctcaaaatactttctaaaactagctttggctgggattataggcataagctactgcacccatctcagaatttgtctatgtttacaatattatcaatgggtagacagctaattgcacagaatataaatgaggagaggtagatttttattaatgtgtacattttccttaattcctgatttactcaggcccaggcttctttgtttctggtcttggatctatgggcctgtgtaaatctttgtcacttagctaaaaggatttcttgaaaatccttgtagttgtttattgagcatttactgtgtactaggcactattgtaggtactagggatacagcagtgaaaaagaaa

SEQ ID NO: 73621 - DNA, 442 bp, Homo sapiens
aatattttgatgaacagaatttcttctttttatttttaaaaatatagagacaaggttttgctatgttgcccaggttgttcttgaacgcctggtctcaagtgatcctcccaccttggcctcccaaagtgctgggattataggcataagctactgcacccatctcagaatttgtctatgtttacaatattatcaatgggtagacagctaattgcacagaatataaatgaggagaggtagatttttattaatgtgtacattttccttaattcctgatttactcaggcccaggcttctttgtttctggtcttggatctatgggcctgtgtaaatctttgtcacttagctaaaaggatttcttgaaaatccttgtagttgtttattgagcatttactgtgtactaggcactattgtaggtactagggatacagcagtgaaaaagaaa

SEQ ID NO: 73622 - DNA, 423 bp, Homo sapiens
atcgcctgaggcagaagttttccagcctgggcgacagagcaagactccgtctcaaaaacaaccctaaaaccaaaaaacaaatctgtagcttgtccattgattcacaccgctgggattataggcataagctactgcacccatctcagaatttgtctatgtttacaatattatcaatgggtagacagctaattgcacagaatataaatgaggagaggtagatttttattaatgtgtacattttccttaattcctgatttactcaggcccaggcttctttgtttctggtcttggatctatgggcctgtgtaaatctttgtcacttagctaaaaggatttcttgaaaatccttgtagttgtttattgagcatttactgtgtactaggcactattgtaggtactagggatacagcagtgaaaaagaaa

SEQ ID NO: 73623 - DNA, 394 bp, Homo sapiens
ctcatctcagcgcaccaactcctgatttttttcagtgggaaatgtggtggtcatagggtagataccgatgtctgccctgctctttcatctctgaaagcctgtttgcagaatgaggccctggctctaccctcatctcaggctcttctaaagagcttttgtattctaaagaggatttttccatcagagaggtaggagctgtaggaaccccgagggcagataagcagccctcactctagataaggtatgctgggggagcttactgagggaatcctgtacacagcccacatcaaaggaaggctgagaatggcctgtggctcctgcttcccttccttgtgtttctccaacctggaagaaaaggggaagctagaaattcacatttattgagcacctgtgt

SEQ ID NO: 73624 - DNA, 739 bp, Homo sapiens
tgggtggatcacgagtcaggagttcaagaccagcctgaccaacatggtgaaatcctgtctctactaaaaataccaaaataataataataataataatgtatttggatgatatatttgtatgtgaagatgtattcaacaatatctctgcccttgaagagcttgtatttactaacagagaacaaagatgtgtttaaggtataacatggaggtttaagaaattcttacgtatagtttgagctaagcaaattctcagtcgttttgctttcagttttcatattaaatacacacatactttatttcctctactgtttgtatatctccatcttttattgacctgacataaattgctaaccatagcttcatttaaaaatcaaacaaaatttcctgtgtactttagataatattatttcatttgtctgttatcattacaatatattagtaaaagttgcctgtatatcagtattatggaaaaactcaatctttaaatatcagaaaatgaaagatgtattttgtttcctttagtgtagggtatgtaatacccattagcaagcaggcaattcatttgtttaattcaaagattatatttaactctgttgtgacatcagaagccttctttgtcattgtgaatagtcagtggattattttggcctgaatgctgtcatatatgtaacatgttagtaaatcttcctttttacttttctcttttgtatgatgatgatgggtcaacaaaatgagaata

SEQ ID NO: 73625 - DNA, 1241 bp, Homo sapiens
agaattgcttgaacccatgagtcagtggttgtagtgagccaagaccacattactgcactccagcctcggtgacggagccagactctgtttcataaaaaacaaaaacaactcatgtaccccataaatacatacacctactatgtatctacaaagattaaaaattaaaattaaaaattttaaaaaagaaatcttatcccaccatgcaaagcaaagaaccactctattctacaattaccaagcccagtatgagactttaagcaacatctcataaaacccactgaccgtgggtcaaagaccagacctctagtagttgcaagagatagatagagcttgtccagttcagctataaatcaattttatttccacagagggtcacacagccctttcaaaaacaaccatattggatcaaacacaaaattcgtaaaaaatattcctcctgttcccccaacctcaaaatatatgttgaaggtcatatggccaggggcaatgcagattcaaagccactattgtgagctgcattgactataccaccatgtaattcataatgtgttgaaaatcaaatgctcatgataaatgatcattgattagggcccctagttgtgagtgtacctatattttttcattctataaaagcaaatattaaatcaacatgaagagtaaataattacccatattatattgagagggtgaaattggtttatattccatatggagttcaattgatcattattttcatccttgacacttgggtttatccattctccaaaccaccactttggaagagcaagttaatatacaattactgctaaaaaaggtacatacctccaattttgtgttgtgttgacaattccacttgtttgttctgtccttctgattgggagtattattttcctaggtctgttttaacaaagttccataaattgagacactgaatgagtctcaataaatgtgcattctcacatttctagagaccagaagtctgaaatcaaggtgcggtccgagccacactccctctgaaggctcagcctggccaacatggtgaaaccccatctctactaaacatacaaaatttatctgggcatggtggtgcgcacctgtagtccaagctacttgggagactgagacaggagaatcacttgaacccaggaggcagaggttgcagggaacagatatcgtgccactgcactccagcctggatgactgagcaagactccatctcaaaaacaaaaacaaaaacaaat

SEQ ID NO: 73626 - DNA, 400 bp, Homo sapiens
ctgcatatttagacaatgactactcaaaggcaaagactttaccttatttatacatatattttcagtgcatgaaaaataagtaagcaggaaataaatgtttggttagttaaattaagacagttaaggtaattctttaaaaataaaaataaaaaacaaaaagagaaagaaaaaaaaagaagaaaggaagaaagaaaaagagttaaggtattctttagactcatcacattgactacataatcctgcctgacaagagctctataagagaagcagatgatatataatttattgaaccaggcctaagacatttttggagaataataactttccgtactaaaaacactgcttcaatactttacaattattgtcacatttaaccataacaaccaatatgaaacagctt

SEQ ID NO: 73627 - DNA, 380 bp, Homo sapiens
tgcctgagccctctcactgtttttgtgcctgcctttgttgtagaattctagatggcagcatgcttgcaacttgggaaggatgaggcccttgtctggagacattatccctatgagctctgaggtcttgtctccttctgtagcatccccaccaatgtggccaaagccaagggccctcatctgatcagtcctcctgattctggtccagccactgagccctaggtctactcaatttcatggcaggatacccagaaggagggaaatggcctcagccattctcattcctatttagagaagtgcattcttcaccatcatccttcctaccttttcttcttacccactgcccaaggacttcagcaatgaaaaagtagcttcccttctca

SEQ ID NO: 73628 - DNA, 414 bp, Homo sapiens
tttttttggaattagatggatgagtcacactagccatactctggagcctggcaatgtgaggttttgaaaaagcattcttcagtttagctgataccaaaaatgtttgtgttttgtgcggttactgggaatttgcctgcagccactaatcagctgaatctttaatcaccattttgctctttattgttagaatgtggaggtaaaatatcaagtgtatgatacccctatcctctgacttgaatatcaccattatccgtttccaaatagcatttctaaaagtaagttttctgtttgtaaatataatacataatcatcatagaaaatgccaatacagaaaccaaaaaatcaacactttaaatcctactaaagatagccacttaatttagtaaacattccagatacatttctacacgcacc

SEQ ID NO: 73629 - DNA, 1568 bp, Homo sapiens
acccacgcgtccgtcgacccacgcgtcgcccacgcgtccgcggacgcgtcgggtgagcgggagcggagagcggaccccagagagccctgagcagccccaccgccgccgccggcctagttaccatcacaccccgggaggagccgcagctgccgcagccggccccagtcaccatcaccgcaaccatgagcagcgaggccgagacccagcagccgcccgccgccccccccgccgcccccgccctcagcgccgccgacaccaagcccggcactacgggcagcggcgcagggagcggtggcccgggcggcctcacatcggcggcgcctgccggcggggacaagaaggtcatcgcaacgaaggttttgggaacagtaaaatggttcaatgtaaggaacggatatggtttcatcaacaggaatgacaccaaggaagatgtatttgtacaccagactgccataaagaagaataaccccaggaagtaccttcgcagtgtaggagatggagagactgtggagtttgatgttgttgaaggagaaaagggtgcggaggcagcaaatgttacaggtcctggtggtgttccagttcaaggcagtaaatatgcagcagaccgtaaccattatagacgctatccacgtcgtaggggtcctccacgcaattaccagcaaaattaccagaatagtgagagtggggaaaagaacgagggatcggagagtgctcccgaaggccaggcccaacaacgccggccctaccgcaggcgaaggttcccaccttactacatgcggagaccctatgggcgtcgaccacagtattccaaccctcctgtgcagggagaagtgatggagggtgctgacaaccagggtgcaggagaacaaggtagaccagtgaggcagaatatgtatcggggatatagaccacgattccgcaggggccctcctcgccaaagacagcctagagaggacggcaatgaagaagataaagaaaatcaaggagatgagacccaaggtcagcagccacctcaacgtcggtaccgccgcaacttcaattaccgacgcagacgcccagaaaaccctaaaccacaagatggcaaagagacaaaagcagccgatccaccagctgagaattcgtccgctcccgaggctgagcagggcggggctgagtaaatgccggcttaccatctctaccatcatccggtttagtcatccaacaagaagaaatatgaaattccagcaataagaaatgaacaaaagattggagctgaagacctaaagtgcttgctttttgcccgttgaccagataaatagaactatctgcattatctatgcagcatggggtttttattatttttacctaaagacgtctctttttggtaataacaaacgtgttttttaaaaaagcctggtttttctcaatacgcctttaaaggtttttaaattgtttcatatctggtcaagttgagatttttaagaacttcatttttaatttgtaataaaagtttacaacttgattttttcaaaaaagtcaacaaactgcaagcacctgttaataaaggtcttaaataattgtctttgtgt

SEQ ID NO: 73630 - DNA, 1735 bp, Homo sapiens
  misc_feature (913)..(913): n is a, c, g, or t
atccttaattaaattaatcccccccccccagcgggagcggagagcggaccccagagagccctgagcagccccaccgccgccgccggcctagttaccatcacaccccgggaggagccgcagctgccgcagccggccccagtcaccatcaccgcaaccatgagcagcgaggccgagacccagcagccgcccgccgccccccccgccgcccccgccctcagcgccgccgacaccaagcccggcactacgggcagcggcgcagggagcggtggcccgggcggcctcacatcggcggcgcctgccggcggggacaagaaggtcatcgcaacgaaggttttgggaacagtaaaatggttcaatgtaaggaacggatatggtttcatcaacaggaatgacaccaaggaagatgtatttgtacaccagactgccataaagaagaataaccccaggaagtaccttcgcagtgtaggagatggagagactgtggagtttgatgttgttgaaggagaaaagggtgcggaggcagcaaatgttacaggtcctggtggtgttccagttcaaggcagtaaatatgcagcagaccgtaaccattatagacgctatccacgtcgtaggggtcctccacgcaattaccagcaaaattaccagaatagtgagagtggggaaaagaacgagggatcggagagtgctcccgaaggccaggcccaacaacgccggccctaccgcaggcgaaggttcccaccttactactgcgaaccattggggtgacacagattcatcccccgtccgcaagtgcgtcggtgctcacccggcgcgcaacaggcaccagcgcccatgctcgctatacctctcgtgcctcgcaagcagggcggaaaacactgtttgggagaaaactgccctgcggccaagtgctacnatcgcctgatacctcccttccgggcattgaatagaaccgacaacagaacaccatgaacagcacaaccacggctacagcatcaccagtcatgacgatgccaaacacaccaccagagagaggggggtggagaggaaggagcagaggagcgcgagcaggacaggacgcgcgggagggcaagcgcggagagaggcgggcggaagcggcaggcaagcgccgccgccgggccagggcgcgcgcggacgtcacggccaggagcgggggaggagaaacgagagcgcaggacgcgagccgcgcgcaccgcacaggcacagacgcgcgcggcggcgcggcggccgcaccaccggcggcacagccaccaaagctgcaagcccgccgagcacgcgcggagaccagcccaccacccagcgccaccgcccaagcccagcaggaacagacgagagcggaagacgagcagcaggagaaggagcgcgacagcgcgacgggcaggaggaagacgcagacgggggcagcacagacgcgcacgccgagacggacacgagagaagagaaggagaacacagatcacacgagcacccagccccacgcgcccaaccagcaagacgacgcagcgcgagagacgcgcacacgagacacacgggcaggcaacgacagcagacgcgaacgcgcacgaaggcaagaacggaggcagcacgtacacgaacaagacagcagagcgggggcggcccaagcgcggcggccgaacacaacgcgaggcggcggcgcggaagagacgaggccaccacgacgcgagagagcacgaagcggacggcagagcagaccacgc

SEQ ID NO: 73631 - DNA, 780 bp, Homo sapiens
  misc_feature (28)..(28): n is a, c, g, or t
aaattacggtcctaggtacgaggctggngttcgggagcggagagcggaccccagagagccctgagcagccccaccgccgccgccggcctagttaccatcacaccccgggaggagccgcagctgccgcagccggccccagtcaccatcaccgcaaccatgagcagcgaggccgagacccagcagccgccccggaaagaatgaccaccgtaatattagagacagcatgtaaataaaagacacgtatcagtacgagtaaagagaatgaaaagaaaagataaaaagggaaagaaaagataatagaatgagaaatgaaagaaagaggaaatagcaaagtaatagaaagaaaaggataagagaaaaagaaaaatagttactagaaggggaagaggaaagaggagaaagaggggacggagtaaagatagggaaagtggaacagcgagagggagagaattagaggaaggagagacggacgaaaggaagtaggcgagtagaaagagaggagaataaacccacaggcgaacggcaagctataaagaagaggataggagttagttagattaatcgaagagcaaaaaaaaagaaaataggaaagaaagacagaaagacaaagaagataggagaacgtagcaagaaaaaattgtaagaagagaaagtgaaagaggggagagaggaaagaaaaaaagagtaaaaaaaaataaagaggaagaaaaagaaaaaagaataaagaaagaaagaaaactagataagaaaggagaagaagacagaagcaaggtagagaag

SEQ ID NO: 73632 - DNA, 1535 bp, Homo sapiens
  misc_feature (126)..(126): n is a, c, g, or t
  misc_feature (133)..(133): n is a, c, g, or t
  misc_feature (162)..(162): n is a, c, g, or t
cgcgtgtgcgacggggtcccctccccgccgaccggcctcgtgcgctcgggcccgcacgccgttgttcgcgtcacccccacccagctcccttccgcgtgtgctcggagggcgcggcgcaccgcctangcaggcnggagcggcttccccttccctcacgtgctntccgtccgcggcctgcgcacacacccatcctggggcccgcgccccgggcctgccctggagcgccccgcgcttcagactcacccacgtgtgcggcggcggcggcgactgcgtggccccgcacccgggcggtggagagaaagggctgtcaggtggccgcggcggccggcgtgcgagggaccggatgcccaagccgggcggatttggaaaaggatagctggaatgacaccaaggaagatgtatttgtacaccagactgccataaagaagaataaccccaggaagtaccttcgcagtgtaggagatggagagactgtggagtttgatgttgttgaaggagaaaagggtgcggaggcagcaaatgttacaggtcctggtggtgttccagttcaaggcagtaaatatgcagcagaccgtaaccattatagacgctatccacgtcgtaggggtcctccacgcaattaccagcaaaattaccagaatagtgagagtggggaaaagaacgagggatcggagagtgctcccgaaggccaggcccaacaacgccggccctaccgcaggcgaaggttcccaccttactacatgcggagaccctatgggcgtcgaccacagtattccaaccctcctgtgcagggagaagtgatggagggtgctgacaaccagggtgcaggagaacaaggtagaccagtgaggcagaatatgtatcggggatatagaccacgattccgcaggggccctcctcgccaaagacagcctagagaggacggcaatgaagaagataaagaaaatcaaggagatgagacccaaggtcagcagccacctcaacgtcggtaccgccgcaacttcaattaccgacgcagacgcccagaaaaccctaaaccacaagatggcaaagagacaaaagcagccgatccaccagctgagaattcgtccgctcccgaggctgagcagggcggggctgagtaaatgccggcttaccatctctaccatcatccggtttagtcatccaacaagaagaaatatgaaattccagcaataagaaatgaacaaaagattggagctgaagacctaaagtgcttgctttttgcccgttgaccagataaatagaactatctgcattatctatgcagcatggggtttttattatttttacctaaagacgtctctttttggtaataacaaacgtgttttttaaaaaagcctggtttttctcaatacgcctttaaaggtttttaaattgtttcatatctggtcaagttgagatttttaagaacttcatttttaatttgtaataaaagtttacaacttgattttttcaaaaaagtcaacaaactgcaagcacctgttaataaaggtcttaaataattgtctttgtgt

SEQ ID NO: 73633 - DNA, 1754 bp, Homo sapiens
ctctaattctagttccggtctctatggcggccggcggaggcaggaacggttgtaggtcgactgaattagccgccaaaggtccaatgagaatggaggactgataaaatattagccaatagaagctagggattggggtcaggtgggcagattgacagtaccactggccagtgaacaacgcctagggcgggtcgctcgtagggcttatcccgcctgtcccgccattctcgctagttcgatcggtagcgggagcggagagcggaccccagagagccctgagcagccccaccgccgccgccggcctagttaccatcacaccccgggaggagccgcagctgccgcagccggccccagtcaccatcaccgcaaccatgagcagcgaggccgagacccagcagccgcccgccgccccccccgccgcccccgccctcagcgccgccgacaccaagcccggcactacgggcagcggcgcagggagcggtggcccgggcggcctcacatcggcggcgcctgccggcggggacaagaaggtcatcgcaacgaaggttttgggaacagtaaaatggttcaatgtaaggaacggatatggtttcatcaacaggaatgacaccaaggaagatgtatttgtacaccagactgccataaagaagaataaccccaggaagtaccttcgcagtgtaggagatggagagactgtggagtttgatgttgttgaaggagaaaagggtgcggaggcagcaaatgttacaggtcctggtggtgttccagttcaaggcagtaaatatgcagcagaccgtaaccattatagacgctatccacgtcgtaggggtcctccacgcaattaccagcaaaattaccagaatagtgagagtggggaaaagaacgagggatcggagagtgctcccgaaggccaggcccaacaacgccggccctaccgcaggcgaaggttcccaccttactacatgcggagaccctatgggcgtcgaccacagtattccaaccctcctgtgcagggagaagtgatggagggtgctgacaaccagggtgcaggagaacaaggtagaccagtgaggcagaatatgtatcggggatatagaccacgattccgcaggggccctcctcgccaaagacagcctagagaggacggcaatgaagaagataaagaaaatcaaggagatgagacccaaggtcagcagccacctcaacgtcggtaccgccgcaacttcaattaccgacgcagacgcccagaaaaccctaaaccacaagatggcaaagagacaaaagcagccgatccaccagctgagaattcgtccgctcccgaggctgagcagggcggggctgagtaaatgccggcttaccatctctaccatcatccggtttagtcatccaacaagaagaaatatgaaattccagcaataagaaatgaacaaaagattggagctgaagacctaaagtgcttgctttttgcccgttgaccagataaatagaactatctgcattatctatgcagcatggggtttttattatttttacctaaagacgtctctttttggtaataacaaacgtgttttttaaaaaagcctggtttttctcaatacgcctttaaaggtttttaaattgtttcatatctggtcaagttgagatttttaagaacttcatttttaatttgtaataaaagtttacaacttgattttttcaaaaaagtcaacaaactgcaagcacctgttaataaaggtcttaaataattgtctttgtgt

SEQ ID NO: 73634 - DNA, 1555 bp, Homo sapiens
ataacgggcatatagtcagaccacggcgctcgcccacgcgtcggcgggagcggagagcggaccccagagagccctgagcagccccaccgccgccgccggcctagttaccatcacaccccgggaggagccgcagctgccgcagccggccccagtcaccatcaccgcaaccatgagcagcgaggccgagacccagcagccgcccgccgccccccccgccgcccccgccctcagcgccgccgacaccaagcccggcactacgggcagcggcgcagggagcggtggcccgggcggcctcacatcggcggcgcctgccggcggggacaagaaggtcatcgcaacgaaggttttgggaacagtaaaatggttcaatgtaaggaacggatatggtttcatcaacaggaatgacaccaaggaagatgtatttgtacaccagactgccataaagaagaataaccccaggaagtaccttcgcagtgtaggagatggagagactgtggagtttgatgttgttgaaggagaaaagggtgcggaggcagcaaatgttacaggtcctggtggtgttccagttcaaggcagtaaatatgcagcagaccgtaaccattatagacgctatccacgtcgtaggggtcctccacgcaattaccagcaaaattaccagaatagtgagagtggggaaaagaacgagggatcggagagtgctcccgaaggccaggcccaacaacgccggccctaccgcaggcgaaggttcccaccttactacatgcggagaccctatgggcgtcgaccacagtattccaaccctcctgtgcagggagaagtgatggagggtgctgacaaccagggtgcaggagaacaaggtagaccagtgaggcagaatatgtatcggggatatagaccacgattccgcaggggccctcctcgccaaagacagcctagagaggacggcaatgaagaagataaagaaaatcaaggagatgagacccaaggtcagcagccacctcaacgtcggtaccgccgcaacttcaattaccgacgcagacgcccagaaaaccctaaaccacaagatggcaaagagacaaaagcagccgatccaccagctgagaattcgtccgctcccgaggctgagcagggcggggctgagtaaatgccggcttaccatctctaccatcatccggtttagtcatccaacaagaagaaatatgaaattccagcaataagaaatgaacaaaagattggagctgaagacctaaagtgcttgctttttgcccgttgaccagataaatagaactatctgcattatctatgcagcatggggtttttattatttttacctaaagacgtctctttttggtaataacaaacgtgttttttaaaaaagcctggtttttctcaatacgcctttaaaggtttttaaattgtttcatatctggtcaagttgagatttttaagaacttcatttttaatttgtaataaaagtttacaacttgattttttcaaaaaagtcaacaaactgcaagcacctgttaataaaggtcttaaataattgtctttgtgt

SEQ ID NO: 73635 - DNA, 1396 bp, Homo sapiens
ctctaattctagttccggtctctatggcggccggcggaggcaggaacggttgtaggtcgactgaattagccgccaaaggtccaatgagaatggaggactgataaaatattagccaatagaagctagggattggggtcaggtgggcagattgacagtaccactggccagtgaacaacgcctagggcgggtcgctcgtagggcttatcccgcctgtcccgccattctcgctagttcgatcggtagcgggagcggagagcggaccccagagagccctgagcagccccaccgccgccgccggcctagttaccatcacaccccgggaggagccgcagctgccgcagccggccccagtcaccatcaccgcaaccatgagcagcgaggccgagacccagcagccgcccgccgccccccccgccgcccccgccctcagcgccgccgacaccaagcccggcactacgggcagcggcgcagggagcggtggcccgggcggcctcacatcggcggcgcctgccggcggggacaagaaggtcatcgcaacgaaggttttgggaacagtaaaatggttcaatgtaaggaacggatatggtttcatcaacaggaatgacaccaaggaagatgtatttgtacaccagactgccataaagaagaataaccccaggaagtaccttcgcagtgtaggagatggagagactgtggagtttgatgttgttgaaggagaaaagggtgcggaggcagcaaatgttacaggtcctggtggtgttccagttcaaggcagtaaatatgcagcagaccgtaaccattatagacgctatccacgtcgtaggggtcctccacgcaattaccagcaaaattaccagaatagtgagagtggggaaaagaacgagggatcggagagtgctcccgaaggccaggcccaacaacgccggccctaccgcaggcgaaggttcccaccttactacatgcggagaccctatgggcgtcgaccacagtattccaaccctcctgtgcagggagaagtgatggagggtgctgacaaccagggtgcaggagaacaaggtagaccagtgaggcagaatatgtatcggggatatagaccacgattccgcaggggccctcctcgccaaagacagcctagagaggacggcaatgaagaagataaagaaaatcaaggagatgagacccaaggtcagcagccacctcaacgtcggtaccgccgcaacttcaattaccgacgcagacgcccagaaaaccctaaaccacaagatggcaaagagacaaaagcagccgatccaccagctgagaattcgtccgctcccgaggctgagcagggcggggctgagtaaatgccggcttaccatctctaccatcatccgggtaagcaagcttggatggccat

SEQ ID NO: 73636 - DNA, 1129 bp, Homo sapiens
ctctaattctagttccggtctctatggcggccggcggaggcaggaacggttgtaggtcgactgaattagccgccaaaggtccaatgagaatggaggactgataaaatattagccaatagaagctagggattggggtcaggtgggcagattgacagtaccactggccagtgaacaacgcctagggcgggtcgctcgtagggcttatcccgcctgtcccgccattctcgctagttcgatcggtagcgggagcggagagcggaccccagagagccctgagcagccccaccgccgccgccggcctagttaccatcacaccccgggaggagccgcagctgccgcagccggccccagtcaccatcaccgcaaccatgagcagcgaggccgagacccagcagccgcccgccgccccccccgccgcccccgccctcagcgccgccgacaccaagcccggcactacgggcagcggcgcagggagcggtggcccgggcggcctcacatcggcggcgcctgccggcggggacaagaaggtcatcgcaacgaaggttttgggaacagtaaaatggttcaatgtaaggaacggatatggtttcatcaacaggaatgacaccaaggaagatgtatttgtacaccagactgccataaagaagaataaccccaggaagtaccttcgcagtgtaggagatggagagactgtggagtttgatgttgttgaaggagaaaagggtgcggaggcagcaaatgttacaggtcctggtggtgttccagttcaaggcagtaaatatgcagcagaccgtaaccattatagacgctatccacgtcgtaggggtcctccacgcaattaccagcaaaattaccagaatagtgagagtggggaaaagaacgagggatcggagagtgctcccgaaggccaggcccaacaacgccggccctaccgcaggcgaaggttcccaccttactacatgcggagaccctatgggcgtcgaccacagtattccaaccctcctgtgcagggagaagtgatggagggtgctgacaaccagggtgcaggagaacaaggtagaccagtgaggcagaatatgtatcggggatatagaccacgattccgcaggtatggtccacgtaaacatgt

SEQ ID NO: 73637 - DNA, 748 bp, Homo sapiens
ctctaattctagttccggtctctatggcggccggcggaggcaggaacggttgtaggtcgactgaattagccgccaaaggtccaatgagaatggaggactgataaaatattagccaatagaagctagggattggggtcaggtgggcagattgacagtaccactggccagtgaacaacgcctagggcgggtcgctcgtagggcttatcccgcctgtcccgccattctcgctagttcgatcggtagcgggagcggagagcggaccccagagagccctgagcagccccaccgccgccgccggcctagttaccatcacaccccgggaggagccgcagctgccgcagccggccccagtcaccatcaccgcaaccatgagcagcgaggccgagacccagcagccgcccgccgccccccccgccgcccccgccctcagcgccgccgacaccaagcccggcactacgggcagcggcgcagggagcggtggcccgggcggcctcacatcggcggcgcctgccggcggggacaagaaggtcatcgcaacgaaggttttgggaacagtaaaatgtgtcaagatgaagttggagaggtaagcctcataatccatgataagagagcaagggtggatgctgatatggcactgaagactactgcaggagtccaagcaagcacctgactaggatggtgataggagggatggctatgagatgttcagatgtcaaatctataggattgaggtgggtcagaacataag

SEQ ID NO: 73638 - DNA, 1558 bp, Homo sapiens
taatacatcattcggctaggtcgatgctgcgtgtttaatcggccgagggagagacagagagatcgggagcggagagcggaccccagagagccctgagcagccccaccgccgccgccggcctagttaccatcacaccccgggaggagccgcagctgccgcagccggccccagtcaccatcaccgcaaccatgagcagcgaggccgagacccagcagccgccgcccccgccctcagcgccgccgacaccaagcccggcactacgggcagcggcgcagggagcggtggcccgggcggcctcacatcggcggcgcctgccggcggggacaagaaggtcatcgcaacgaaggttttgggaacagtaaaatggttcaatgtaaggaacggatatggtttcatcaacaggaatgacaccaaggaagatgtatttgtacaccagactgccataaagaagaataaccccaggaagtaccttcgcagtgtaggagatggagagactgtggagtttgatgttgttgaaggagaaaagggtgcggaggcagcaaatgttacaggtcctggtggtgttccagttcaaggcagtaaatatgcagcagaccgtaaccattatagacgctatccacgtcgtaggggtcctccacgcaattaccagcaaaattaccagaatagtgagagtggggaaaagaacgagggatcggagagtgctcccgaaggccaggcccaacaacgccggccctaccgcaggcgaaggttcccaccttactacatgcggagaccctatgggcgtcgaccacagtattccaaccctcctgtgcagggagaagtgatggagggtgctgacaaccagggtgcaggagaacaaggtagaccagtgaggcagaatatgtatcggggatatagaccacgattccgcaggggccctcctcgccaaagacagcctagagaggacggcaatgaagaagataaagaaaatcaaggagatgagacccaaggtcagcagccacctcaacgtcggtaccgccgcaacttcaattaccgacgcagacgcccagaaaaccctaaaccacaagatggcaaagagacaaaagcagccgatccaccagctgagaattcgtccgctcccgaggctgagcagggcggggctgagtaaatgccggcttaccatctctaccatcatccggtttagtcatccaacaagaagaaatatgaaattccagcaataagaaatgaacaaaagattggagctgaagacctaaagtgcttgctttttgcccgttgaccagataaatagaactatctgcattatctatgcagcatggggtttttattatttttacctaaagacgtctctttttggtaataacaaacgtgttttttaaaaaagcctggtttttctcaatacgcctttaaaggtttttaaattgtttcatatctggtcaagttgagatttttaagaacttcatttttaatttgtaataaaagtttacaacttgattttttcaaaaaagtcaacaaactgcaagcacctgttaataaaggtcttaaataattgtctttgtgt

SEQ ID NO: 73639 - DNA, 1734 bp, Homo sapiens
  misc_feature (502)..(502): n is a, c, g, or t
ctctaattctagttccggtctctatggcggccggcggaggcaggaacggttgtaggtcgactgaattagccgccaaaggtccaatgagaatggaggactgataaaatattagccaatagaagctagggattggggtcaggtgggcagattgacagtaccactggccagtgaacaacgcctagggcgggtcgctcgtagggcttatcccgcctgtcccgccattctcgctagttcgatcggtagcgggagcggagagcggaccccagagagccctgagcagccccaccgccgccgccggcctagttaccatcacaccccgggaggagccgcagctgccgcagccggccccagtcaccatcaccgcaaccatgagcagcgaggccgagacccagcagccgccgggtctgctagcgtgaccacgtgcactacgggctggtgtgaacgcagtggagcgtgtggccccgtgcggccttactttggcggggcctgccgttcggggacnagaaggtcatcgcaacgaaggttttgggaacagtaaaatggttcaatgtaaggaacggatatggtttcatcaacaggaatgacaccaaggaagatgtatttgtacaccagactgccataaagaagaataaccccaggaagtaccttcgcagtgtaggagatggagagactgtggagtttgatgttgttgaaggagaaaagggtgcggaggcagcaaatgttacaggtcctggtggtgttccagttcaaggcagtaaatatgcagcagaccgtaaccattatagacgctatccacgtcgtaggggtcctccacgcaattaccagcaaaattaccagaatagtgagagtggggaaaagaacgagggatcggagagtgctcccgaaggccaggcccaacaacgccggccctaccgcaggcgaaggttcccaccttactacatgcggagaccctatgggcgtcgaccacagtattccaaccctcctgtgcagggagaagtgatggagggtgctgacaaccagggtgcaggagaacaaggtagaccagtgaggcagaatatgtatcggggatatagaccacgattccgcaggggccctcctcgccaaagacagcctagagaggacggcaatgaagaagataaagaaaatcaaggagatgagacccaaggtcagcagccacctcaacgtcggtaccgccgcaacttcaattaccgacgcagacgcccagaaaaccctaaaccacaagatggcaaagagacaaaagcagccgatccaccagctgagaattcgtccgctcccgaggctgagcagggcggggctgagtaaatgccggcttaccatctctaccatcatccggtttagtcatccaacaagaagaaatatgaaattccagcaataagaaatgaacaaaagattggagctgaagacctaaagtgcttgctttttgcccgttgaccagataaatagaactatctgcattatctatgcagcatggggtttttattatttttacctaaagacgtctctttttggtaataacaaacgtgttttttaaaaaagcctggtttttctcaatacgcctttaaaggtttttaaattgtttcatatctggtcaagttgagatttttaagaacttcatttttaatttgtaataaaagtttacaacttgattttttcaaaaaagtcaacaaactgcaagcacctgttaataaaggtcttaaataattgtctttgtgt

SEQ ID NO: 73640 - DNA, 992 bp, Homo sapiens
ctctaattctagttccggtctctatggcggccggcggaggcaggaacggttgtaggtcgactgaattagccgccaaaggtccaatgagaatggaggactgataaaatattagccaatagaagctagggattggggtcaggtgggcagattgacagtaccactggccagtgaacaacgcctagggcgggtcgctcgtagggcttatcccgcctgtcccgccattctcgctagttcgatcggtagcgggagcggagagcggaccccagagagccctgagcagccccaccgccgccgccggcctagttaccatcacaccccgggaggagccgcagctgccgcagccggccccagtcaccatcaccgcaaccatgagcagcgaggccgagacccagcagccgccccggaaagaatgaccaccgtaatattagagacagcatgtaaataaaagacacgtatcagtacgagtaaagagaatgaaaagaaaagataaaaagggaaagaaaagataatagaatgagaaatgaaagaaagaggaaatagcaaagtaatagaaagaaaaggataagagaaaaagaaaaatagttactagaaggggaagaggaaagaggagaaagaggggacggagtaaagatagggaaagtggaacagcgagagggagagaattagaggaaggagagacggacgaaaggaagtaggcgagtagaaagagaggagaataaacccacaggcgaacggcaagctataaagaagaggataggagttagttagattaatcgaagagcaaaaaaaaagaaaataggaaagaaagacagaaagacaaagaagataggagaacgtagcaagaaaaaattgtaagaagagaaagtgaaagaggggagagaggaaagaaaaaaagagtaaaaaaaaataaagaggaagaaaaagaaaaaagaataaagaaagaaagaaaactagataagaaaggagaagaagacagaagcaaggtagagaag

SEQ ID NO: 73641 - DNA, 1636 bp, Homo sapiens
  misc_feature (126)..(126): n is a, c, g, or t
  misc_feature (133)..(133): n is a, c, g, or t
  misc_feature (162)..(162): n is a, c, g, or t
cgcgtgtgcgacggggtcccctccccgccgaccggcctcgtgcgctcgggcccgcacgccgttgttcgcgtcacccccacccagctcccttccgcgtgtgctcggagggcgcggcgcaccgcctangcaggcnggagcggcttccccttccctcacgtgctntccgtccgcggcctgcgcacacacccatcctggggcccgcgccccgggcctgccctggagcgccccgcgcttcagactcacccacgtgtgcggcggcggcggcgactgcgtggccccgcacccgggcggtggagagaaagggctgtcaggtggccgcggcggccggcgtgcgagggaccggatgcccaagccgggcggatttggaaaaggatagctggtaatcgtggcttgttttgctttgttttcttttccagcaacgaaggttttgggaacagtaaaatggttcaatgtaaggaacggatatggtttcatcaacaggaatgacaccaaggaagatgtatttgtacaccagactgccataaagaagaataaccccaggaagtaccttcgcagtgtaggagatggagagactgtggagtttgatgttgttgaaggagaaaagggtgcggaggcagcaaatgttacaggtcctggtggtgttccagttcaaggcagtaaatatgcagcagaccgtaaccattatagacgctatccacgtcgtaggggtcctccacgcaattaccagcaaaattaccagaatagtgagagtggggaaaagaacgagggatcggagagtgctcccgaaggccaggcccaacaacgccggccctaccgcaggcgaaggttcccaccttactacatgcggagaccctatgggcgtcgaccacagtattccaaccctcctgtgcagggagaagtgatggagggtgctgacaaccagggtgcaggagaacaaggtagaccagtgaggcagaatatgtatcggggatatagaccacgattccgcaggggccctcctcgccaaagacagcctagagaggacggcaatgaagaagataaagaaaatcaaggagatgagacccaaggtcagcagccacctcaacgtcggtaccgccgcaacttcaattaccgacgcagacgcccagaaaaccctaaaccacaagatggcaaagagacaaaagcagccgatccaccagctgagaattcgtccgctcccgaggctgagcagggcggggctgagtaaatgccggcttaccatctctaccatcatccggtttagtcatccaacaagaagaaatatgaaattccagcaataagaaatgaacaaaagattggagctgaagacctaaagtgcttgctttttgcccgttgaccagataaatagaactatctgcattatctatgcagcatggggtttttattatttttacctaaagacgtctctttttggtaataacaaacgtgttttttaaaaaagcctggtttttctcaatacgcctttaaaggtttttaaattgtttcatatctggtcaagttgagatttttaagaacttcatttttaatttgtaataaaagtttacaacttgattttttcaaaaaagtcaacaaactgcaagcacctgttaataaaggtcttaaataattgtctttgtgt

SEQ ID NO: 73642 - DNA, 1439 bp, Homo sapiens
  misc_feature (207)..(207): n is a, c, g, or t
tggctcaggagtttgatagttcttgggcagtgagggtgagtagtagaatgtttagtgagcctagggtgttgtgagtgtaaattagtgcgatgagtaggggaagggagcctactagggtgtagaataggaagtatgtgcctagcgttccaggcgcattctaggctggattgccgtcactcgggctgaatgatagccaaggcggggacnagaaggtcatcgcaacgaaggttttgggaacagtaaaatggttcaatgtaaggaacggatatggtttcatcaacaggaatgacaccaaggaagatgtatttgtacaccagactgccataaagaagaataaccccaggaagtaccttcgcagtgtaggagatggagagactgtggagtttgatgttgttgaaggagaaaagggtgcggaggcagcaaatgttacaggtcctggtggtgttccagttcaaggcagtaaatatgcagcagaccgtaaccattatagacgctatccacgtcgtaggggtcctccacgcaattaccagcaaaattaccagaatagtgagagtggggaaaagaacgagggatcggagagtgctcccgaaggccaggcccaacaacgccggccctaccgcaggcgaaggttcccaccttactacatgcggagaccctatgggcgtcgaccacagtattccaaccctcctgtgcagggagaagtgatggagggtgctgacaaccagggtgcaggagaacaaggtagaccagtgaggcagaatatgtatcggggatatagaccacgattccgcaggggccctcctcgccaaagacagcctagagaggacggcaatgaagaagataaagaaaatcaaggagatgagacccaaggtcagcagccacctcaacgtcggtaccgccgcaacttcaattaccgacgcagacgcccagaaaaccctaaaccacaagatggcaaagagacaaaagcagccgatccaccagctgagaattcgtccgctcccgaggctgagcagggcggggctgagtaaatgccggcttaccatctctaccatcatccggtttagtcatccaacaagaagaaatatgaaattccagcaataagaaatgaacaaaagattggagctgaagacctaaagtgcttgctttttgcccgttgaccagataaatagaactatctgcattatctatgcagcatggggtttttattatttttacctaaagacgtctctttttggtaataacaaacgtgttttttaaaaaagcctggtttttctcaatacgcctttaaaggtttttaaattgtttcatatctggtcaagttgagatttttaagaacttcatttttaatttgtaataaaagtttacaacttgattttttcaaaaaagtcaacaaactgcaagcacctgttaataaaggtcttaaataattgtctttgtgt

SEQ ID NO: 73643 - DNA, 834 bp, Homo sapiens
gtagttcgatcggtagcgggatcggagagtgctcccgaaggccaggcccaacaagccggcctaccgcaggcgaaggtcctccacgcaattaccagcaaaattaccagaatagtgagagtggggaaaagaacgagggatcggagagtgctcccgaaggtcatcgcaacgaaggttttgggaacagtaaaatggttcaatgtaaggaacggatatggtttcatcaacaggaatgacaccaaggaagatgtatttgtacaccagggtgcggaggcagcaaatgttacaggtcctggtggtgttccagttcaaggcagtaaatatgcagcagaccgtaaccattatagacgctatccacgtcgtaggggtcctccacgcaattaccagcaaaacttactacatgcggagaccctatgggcgtcgaccacagtattccaaccctcctgtgcagggagaagtgatggagggtgctgacaaccagggtgcaggagaacaaggtagaccagtgaggcagaatatgtatcggggatatagaccacgattccgcaggggccctcctcgccaaagacagcctagagaggacggcaatgaagaagataaagaaaatcaaggagatgagacccaaggtcagcagccacctcaacgtcggtaccgccgcaacttcaattaccgacgcagacgcccagaaaaccctaaaccacaagatggcaaagagacaaaagcagccgatccaccagctgagaattcgtccgctcccgaggctgagcagggcggggctgagtaaatgccggcttaccatctctaccatcatccgggtaagcaagcttggatggccat

SEQ ID NO: 73644 - DNA, 1609 bp, Homo sapiens
aaaaagaaatcaagaatgcaattttatttacaatagtcacgccggaaatacctagaaataaatttaactgaggatgtaaaagacctctacaaggagagcgggagcggagagcggaccccagagagccctgagcagccccaccgccgccgccggcctagttaccatcacaccccgggaggagccgcagctgccgcagccggccccagtcaccatcaccgcaaccatgagcagcgaggccgagacccagcagccgcccgccgccccccccgccgcccccgccctcagcgccgccgacaccaagcccggcactacgggcagcggcgcagggagcggtggcccgggcggcctcacatcggcggcgcctgccggcggggacaagaaggtcatcgcaacgaaggttttgggaacagtaaaatggttcaatgtaaggaacggatatggtttcatcaacaggaatgacaccaaggaagatgtatttgtacaccagactgccataaagaagaataaccccaggaagtaccttcgcagtgtaggagatggagagactgtggagtttgatgttgttgaaggagaaaagggtgcggaggcagcaaatgttacaggtcctggtggtgttccagttcaaggcagtaaatatgcagcagaccgtaaccattatagacgctatccacgtcgtaggggtcctccacgcaattaccagcaaaattaccagaatagtgagagtggggaaaagaacgagggatcggagagtgctcccgaaggccaggcccaacaacgccggccctaccgcaggcgaaggttcccaccttactacatgcggagaccctatgggcgtcgaccacagtattccaaccctcctgtgcagggagaagtgatggagggtgctgacaaccagggtgcaggagaacaaggtagaccagtgaggcagaatatgtatcggggatatagaccacgattccgcaggggccctcctcgccaaagacagcctagagaggacggcaatgaagaagataaagaaaatcaaggagatgagacccaaggtcagcagccacctcaacgtcggtaccgccgcaacttcaattaccgacgcagacgcccagaaaaccctaaaccacaagatggcaaagagacaaaagcagccgatccaccagctgagaattcgtccgctcccgaggctgagcagggcggggctgagtaaatgccggcttaccatctctaccatcatccggtttagtcatccaacaagaagaaatatgaaattccagcaataagaaatgaacaaaagattggagctgaagacctaaagtgcttgctttttgcccgttgaccagataaatagaactatctgcattatctatgcagcatggggtttttattatttttacctaaagacgtctctttttggtaataacaaacgtgttttttaaaaaagcctggtttttctcaatacgcctttaaaggtttttaaattgtttcatatctggtcaagttgagatttttaagaacttcatttttaatttgtaataaaagtttacaacttgattttttcaaaaaagtcaacaaactgcaagcacctgttaataaaggtcttaaataattgtctttgtgt

SEQ ID NO: 73645 - DNA, 1542 bp, Homo sapiens
atccttaattaaattaatcccccccccccagcgggagcggagagcggaccccagagagccctgagcagccccaccgccgccgccggcctagttaccatcacaccccgggaggagccgcagctgccgcagccggccccagtcaccatcaccgcaaccatgagcagcgaggccgagacccagcagccgcccgccgccccccccgccgcccccgccctcagcgccgccgacaccaagcccggcactacgggcagcggcgcagggagcggtggcccgggcggcctcacatcggcggcgcctgccggcggggacaagaaggtcatcgcaacgaaggttttgggaacagtaaaatggttcaatgtaaggaacggatatggtttcatcaacaggaatgacaccaaggaagatgtatttgtacaccagactgccataaagaagaataaccccaggaagtaccttcgcagtgtaggagatggagagactgtggagtttgatgttgttgaaggagaaaagggtgcggaggcagcaaatgttacaggtcctggtggtgttccagttcaaggcagtaaatatgcagcagaccgtaaccattatagacgctatccacgtcgtaggggtcctccacgcaattaccagcaaaattaccagaatagtgagagtggggaaaagaacgagggatcggagagtgctcccgaaggccaggcccaacaacgccggccctaccgcaggcgaaggttcccaccttactacatgcggagaccctatgggcgtcgaccacagtattccaaccctcctgtgcagggagaagtgatggagggtgctgacaaccagggtgcaggagaacaaggtagaccagtgaggcagaatatgtatcggggatatagaccacgattccgcaggggccctcctcgccaaagacagcctagagaggacggcaatgaagaagataaagaaaatcaaggagatgagacccaaggtcagcagccacctcaacgtcggtaccgccgcaacttcaattaccgacgcagacgcccagaaaaccctaaaccacaagatggcaaagagacaaaagcagccgatccaccagctgagaattcgtccgctcccgaggctgagcagggcggggctgagtaaatgccggcttaccatctctaccatcatccggtttagtcatccaacaagaagaaatatgaaattccagcaataagaaatgaacaaaagattggagctgaagacctaaagtgcttgctttttgcccgttgaccagataaatagaactatctgcattatctatgcagcatggggtttttattatttttacctaaagacgtctctttttggtaataacaaacgtgttttttaaaaaagcctggtttttctcaatacgcctttaaaggtttttaaattgtttcatatctggtcaagttgagatttttaagaacttcatttttaatttgtaataaaagtttacaacttgattttttcaaaaaagtcaacaaactgcaagcacctgttaataaaggtcttaaataattgtctttgtgt

SEQ ID NO: 73646 - DNA, 1320 bp, Homo sapiens
ctctaattctagttccggtctctatggcggccggcggaggcaggaacggttgtaggtcgactgaattagccgccaaaggtccaatgagaatggaggactgataaaatattagccaatagaagctagggattggggtcaggtgggcagattgacagtaccactggccagtgaacaacgcctagggcgggtcgctcgtagggcttatcccgcctgtcccgccattctcgctagttcgatcggtagcgggagcggagagcggaccccagagagccctgagcagccccaccgccgccgccggcctagttaccatcacaccccgggaggagccgcagctgccgcagccggccccagtcaccatcaccgcaaccatgagcagcgaggccgagacccagcagccgcccgccgccccccccgccgcccccgccctcagcgccgccgacaccaagcccggcactacgggcagcggcgcagggagcggtggcccgggcggcctcacatcggcggcgcctgccggcggggacaagaaggtcatcgcaacgaaggttttgggaacagtaaaatggttcaatgtaaggaacggatatggtttcatcaacaggaatgacaccaaggaagatgtatttgtacaccagactgccataaagaagaataaccccaggaagtaccttcgcagtgtaggagatggagagactgtggagtttgatgttgttgaaggagaaaagggtgcggaggcagcaaatgttacaggtcctggtggtgttccagttcaaggcagtaaatatgcagcagaccgtaaccattatagacgctatccacgtcgtaggggtcctccacgcaattaccagcaaaattaccagaatagtgagagtggggaaaagaacgagggatcggagagtgctcccgaaggccaggcccaacaacgccggccctaccgcaggcgaaggttcccaccttactacatgcggagaccctatgggcgtcgaccacagtattccaaccctcctgtgcagggagaagtgatggagggtgctgacaaccagggtgcaggagaacaaggtagaccagtgaggcagaatatgtatcggggatatagaccacgattccgcaggggccctcctcgccaaagacagcctagagaggacggcaatgaaaaaacacaaaacacacacaagggcgccgctcgcggattaaaaatagaacaaacctcgaatccggacgggggtcttccacaccttaacggaactcgggaatagcgtcttaatttgaaacaagatcacattgcttgaggaacccgggattccctggaatccggaaagatgg

SEQ ID NO: 73647 - DNA, 1947 bp, Homo sapiens
  misc_feature (1125)..(1125): n is a, c, g, or t
ctctaattctagttccggtctctatggcggccggcggaggcaggaacggttgtaggtcgactgaattagccgccaaaggtccaatgagaatggaggactgataaaatattagccaatagaagctagggattggggtcaggtgggcagattgacagtaccactggccagtgaacaacgcctagggcgggtcgctcgtagggcttatcccgcctgtcccgccattctcgctagttcgatcggtagcgggagcggagagcggaccccagagagccctgagcagccccaccgccgccgccggcctagttaccatcacaccccgggaggagccgcagctgccgcagccggccccagtcaccatcaccgcaaccatgagcagcgaggccgagacccagcagccgcccgccgccccccccgccgcccccgccctcagcgccgccgacaccaagcccggcactacgggcagcggcgcagggagcggtggcccgggcggcctcacatcggcggcgcctgccggcggggacaagaaggtcatcgcaacgaaggttttgggaacagtaaaatggttcaatgtaaggaacggatatggtttcatcaacaggaatgacaccaaggaagatgtatttgtacaccagactgccataaagaagaataaccccaggaagtaccttcgcagtgtaggagatggagagactgtggagtttgatgttgttgaaggagaaaagggtgcggaggcagcaaatgttacaggtcctggtggtgttccagttcaaggcagtaaatatgcagcagaccgtaaccattatagacgctatccacgtcgtaggggtcctccacgcaattaccagcaaaattaccagaatagtgagagtggggaaaagaacgagggatcggagagtgctcccgaaggccaggcccaacaacgccggccctaccgcaggcgaaggttcccaccttactactgcgaaccattggggtgacacagattcatcccccgtccgcaagtgcgtcggtgctcacccggcgcgcaacaggcaccagcgcccatgctcgctatacctctcgtgcctcgcaagcagggcggaaaacactgtttgggagaaaactgccctgcggccaagtgctacnatcgcctgatacctcccttccgggcattgaatagaaccgacaacagaacaccatgaacagcacaaccacggctacagcatcaccagtcatgacgatgccaaacacaccaccagagagaggggggtggagaggaaggagcagaggagcgcgagcaggacaggacgcgcgggagggcaagcgcggagagaggcgggcggaagcggcaggcaagcgccgccgccgggccagggcgcgcgcggacgtcacggccaggagcgggggaggagaaacgagagcgcaggacgcgagccgcgcgcaccgcacaggcacagacgcgcgcggcggcgcggcggccgcaccaccggcggcacagccaccaaagctgcaagcccgccgagcacgcgcggagaccagcccaccacccagcgccaccgcccaagcccagcaggaacagacgagagcggaagacgagcagcaggagaaggagcgcgacagcgcgacgggcaggaggaagacgcagacgggggcagcacagacgcgcacgccgagacggacacgagagaagagaaggagaacacagatcacacgagcacccagccccacgcgcccaaccagcaagacgacgcagcgcgagagacgcgcacacgagacacacgggcaggcaacgacagcagacgcgaacgcgcacgaaggcaagaacggaggcagcacgtacacgaacaagacagcagagcgggggcggcccaagcgcggcggccgaacacaacgcgaggcggcggcgcggaagagacgaggccaccacgacgcgagagagcacgaagcggacggcagagcagaccacgc

SEQ ID NO: 73648 - DNA, 1039 bp, Homo sapiens
ctctaattctagttccggtctctatggcggccggcggaggcaggaacggttgtaggtcgactgaattagccgccaaaggtccaatgagaatggaggactgataaaatattagccaatagaagctagggattggggtcaggtgggcagattgacagtaccactggccagtgaacaacgcctagggcgggtcgctcgtagggcttatcccgcctgtcccgccattctcgctagttcgatcggtagcgggagcggagagcggaccccagagagccctgagcagccccaccgccgccgccggcctagttaccatcacaccccgggaggagccgcagctgccgcagccggccccagtcaccatcaccgcaaccatgagcagcgaggccgagacccagcagccgcccgccgccccccccgccgcccccgccctcagcgccgccgacaccaagcccggcactacgggcagcggcgcagggagcggtggcccgggcggcctcacatcggcggcgcctgccggcggggacaagaaggtcatcgcaacgaaggttttgggaacagtaaaatggttcaatgtaaggaacggatatggtttcatcaacaggaatgacaccaaggaagatgtatttgtacaccagggtgcggaggcagcaaatgttacaggtcctggtggtgttccagttcaaggcagtaaatatgcagcagaccgtaaccattatagacgctatccacgtcgtaggggtcctccacgcaattaccagcaaaattaccagaatagtgagagtggggaaaagaacgagggatcggagagtgctcccgaaggccaggcccaacaacgccggccctaccgcaggcgaaggttcccaccttactacatgcggagaccctatgggcgtcgaccacagtattccaaccctcctgtgcagggagaagtgatggagggtgctgacaaccagggtgcaggagaacaaggtagaccagtgaggcagaatatgtatcggggatatagaccacgattccgcaggtatggtccacgtaaacatgt

SEQ ID NO: 73649 - DNA, 1738 bp, Homo sapiens
ctctaattctagttccggtctctatggcggccggcggaggcaggaacggttgtaggtcgactgaattagccgccaaaggtccaatgagaatggaggactgataaaatattagccaatagaagctagggattggggtcaggtgggcagattgacagtaccactggccagtgaacaacgcctagggcgggtcgctcgtagggcttatcccgcctgtcccgccattctcgctagttcgatcggtagcgggagcggagagcggaccccagagagccctgagcagccccaccgccgccgccggcctagttaccatcacaccccgggaggagccgcagctgccgcagccggccccagtcaccatcaccgcaaccatgagcagcgaggccgagacccagcagccgccgcccccgccctcagcgccgccgacaccaagcccggcactacgggcagcggcgcagggagcggtggcccgggcggcctcacatcggcggcgcctgccggcggggacaagaaggtcatcgcaacgaaggttttgggaacagtaaaatggttcaatgtaaggaacggatatggtttcatcaacaggaatgacaccaaggaagatgtatttgtacaccagactgccataaagaagaataaccccaggaagtaccttcgcagtgtaggagatggagagactgtggagtttgatgttgttgaaggagaaaagggtgcggaggcagcaaatgttacaggtcctggtggtgttccagttcaaggcagtaaatatgcagcagaccgtaaccattatagacgctatccacgtcgtaggggtcctccacgcaattaccagcaaaattaccagaatagtgagagtggggaaaagaacgagggatcggagagtgctcccgaaggccaggcccaacaacgccggccctaccgcaggcgaaggttcccaccttactacatgcggagaccctatgggcgtcgaccacagtattccaaccctcctgtgcagggagaagtgatggagggtgctgacaaccagggtgcaggagaacaaggtagaccagtgaggcagaatatgtatcggggatatagaccacgattccgcaggggccctcctcgccaaagacagcctagagaggacggcaatgaagaagataaagaaaatcaaggagatgagacccaaggtcagcagccacctcaacgtcggtaccgccgcaacttcaattaccgacgcagacgcccagaaaaccctaaaccacaagatggcaaagagacaaaagcagccgatccaccagctgagaattcgtccgctcccgaggctgagcagggcggggctgagtaaatgccggcttaccatctctaccatcatccggtttagtcatccaacaagaagaaatatgaaattccagcaataagaaatgaacaaaagattggagctgaagacctaaagtgcttgctttttgcccgttgaccagataaatagaactatctgcattatctatgcagcatggggtttttattatttttacctaaagacgtctctttttggtaataacaaacgtgttttttaaaaaagcctggtttttctcaatacgcctttaaaggtttttaaattgtttcatatctggtcaagttgagatttttaagaacttcatttttaatttgtaataaaagtttacaacttgattttttcaaaaaagtcaacaaactgcaagcacctgttaataaaggtcttaaataattgtctttgtgt

SEQ ID NO: 73650 - DNA, 1649 bp, Homo sapiens
ctctaattctagttccggtctctatggcggccggcggaggcaggaacggttgtaggtcgactgaattagccgccaaaggtccaatgagaatggaggactgataaaatattagccaatagaagctagggattggggtcaggtgggcagattgacagtaccactggccagtgaacaacgcctagggcgggtcgctcgtagggcttatcccgcctgtcccgccattctcgctagttcgatcggtagcgggagcggagagcggaccccagagagccctgagcagccccaccgccgccgccggcctagttaccatcacaccccgggaggagccgcagctgccgcagccggccccagtcaccatcaccgcaaccatgagcagcgaggccgagacccagcagccgccgcctgccggcggggacaagaaggtcatcgcaacgaaggttttgggaacagtaaaatggttcaatgtaaggaacggatatggtttcatcaacaggaatgacaccaaggaagatgtatttgtacaccagactgccataaagaagaataaccccaggaagtaccttcgcagtgtaggagatggagagactgtggagtttgatgttgttgaaggagaaaagggtgcggaggcagcaaatgttacaggtcctggtggtgttccagttcaaggcagtaaatatgcagcagaccgtaaccattatagacgctatccacgtcgtaggggtcctccacgcaattaccagcaaaattaccagaatagtgagagtggggaaaagaacgagggatcggagagtgctcccgaaggccaggcccaacaacgccggccctaccgcaggcgaaggttcccaccttactacatgcggagaccctatgggcgtcgaccacagtattccaaccctcctgtgcagggagaagtgatggagggtgctgacaaccagggtgcaggagaacaaggtagaccagtgaggcagaatatgtatcggggatatagaccacgattccgcaggggccctcctcgccaaagacagcctagagaggacggcaatgaagaagataaagaaaatcaaggagatgagacccaaggtcagcagccacctcaacgtcggtaccgccgcaacttcaattaccgacgcagacgcccagaaaaccctaaaccacaagatggcaaagagacaaaagcagccgatccaccagctgagaattcgtccgctcccgaggctgagcagggcggggctgagtaaatgccggcttaccatctctaccatcatccggtttagtcatccaacaagaagaaatatgaaattccagcaataagaaatgaacaaaagattggagctgaagacctaaagtgcttgctttttgcccgttgaccagataaatagaactatctgcattatctatgcagcatggggtttttattatttttacctaaagacgtctctttttggtaataacaaacgtgttttttaaaaaagcctggtttttctcaatacgcctttaaaggtttttaaattgtttcatatctggtcaagttgagatttttaagaacttcatttttaatttgtaataaaagtttacaacttgattttttcaaaaaagtcaacaaactgcaagcacctgttaataaaggtcttaaataattgtctttgtgt

SEQ ID NO: 73651 - DNA, 951 bp, Homo sapiens
  misc_feature (502)..(502): n is a, c, g, or t
ctctaattctagttccggtctctatggcggccggcggaggcaggaacggttgtaggtcgactgaattagccgccaaaggtccaatgagaatggaggactgataaaatattagccaatagaagctagggattggggtcaggtgggcagattgacagtaccactggccagtgaacaacgcctagggcgggtcgctcgtagggcttatcccgcctgtcccgccattctcgctagttcgatcggtagcgggagcggagagcggaccccagagagccctgagcagccccaccgccgccgccggcctagttaccatcacaccccgggaggagccgcagctgccgcagccggccccagtcaccatcaccgcaaccatgagcagcgaggccgagacccagcagccgccgggtctgctagcgtgaccacgtgcactacgggctggtgtgaacgcagtggagcgtgtggccccgtgcggccttactttggcggggcctgccgttcggggacnagaaggtcatcgcaacgaaaggttttggacgcacgtacaatggttcaatgtaaggaaccggatatggtttcatcaacaggaaatgacaccaatgggaaagatgtatttgtacaacccagtatgtgccattaacagacagaaattacaccccccgaggaaagtttaccctttcgcaggtgttacggacgattcggacgcagacttggtggcacgtttcggcctgcatcggttcggaacggggacgaaaaacaggcgttgccgtgaagcgccgtccaaaaagttgttccacaaaggttccggttgatgggatgttcacccaggttcaaagggacacgttaatttatttgcaggccgagaaccaggtaacccaatttattagacgccttattacaacgatcggtaggcacggtgcctcacaaggacagattaccccatcaacatttcccgta

SEQ ID NO: 73652 - DNA, 1393 bp, Homo sapiens
ataacgggcatatagtcagaccacggcgctcgcccacgcgtcggcgggagcggagagcggaccccagagagccctgagcagccccaccgccgccgccggcctagttaccatcacaccccgggaggagccgcagctgccgcagccggccccagtcaccatcaccgcaaccatgacaacgaaggttttgggaacagtaaaatggttcaatgtaaggaacggatatggtttcatcaacaggaatgacaccaaggaagatgtatttgtacaccagactgccataaagaagaataaccccaggaagtaccttcgcagtgtaggagatggagagactgtggagtttgatgttgttgaaggagaaaagggtgcggaggcagcaaatgttacaggtcctggtggtgttccagttcaaggcagtaaatatgcagcagaccgtaaccattatagacgctatccacgtcgtaggggtcctccacgcaattaccagcaaaattaccagaatagtgagagtggggaaaagaacgagggatcggagagtgctcccgaaggccaggcccaacaacgccggccctaccgcaggcgaaggttcccaccttactacatgcggagaccctatgggcgtcgaccacagtattccaaccctcctgtgcagggagaagtgatggagggtgctgacaaccagggtgcaggagaacaaggtagaccagtgaggcagaatatgtatcggggatatagaccacgattccgcaggggccctcctcgccaaagacagcctagagaggacggcaatgaagaagataaagaaaatcaaggagatgagacccaaggtcagcagccacctcaacgtcggtaccgccgcaacttcaattaccgacgcagacgcccagaaaaccctaaaccacaagatggcaaagagacaaaagcagccgatccaccagctgagaattcgtccgctcccgaggctgagcagggcggggctgagtaaatgccggcttaccatctctaccatcatccggtttagtcatccaacaagaagaaatatgaaattccagcaataagaaatgaacaaaagattggagctgaagacctaaagtgcttgctttttgcccgttgaccagataaatagaactatctgcattatctatgcagcatggggtttttattatttttacctaaagacgtctctttttggtaataacaaacgtgttttttaaaaaagcctggtttttctcaatacgcctttaaaggtttttaaattgtttcatatctggtcaagttgagatttttaagaacttcatttttaatttgtaataaaagtttacaacttgattttttcaaaaaagtcaacaaactgcaagcacctgttaataaaggtcttaaataattgtctttgtgt

SEQ ID NO: 73653 - DNA, 395 bp, Homo sapiens
ataacgggcatatagtcagaccacggcgctcgcccacgcgtcggcgggagcggagagcggaccccagagagccctgagcagccccaccgccgccgccggcctagttaccatcacaccccgggaggagccgcagctgccgcagccggccccagtcaccatcaccgcaaccatgactgatgtgccctgatggaaaaaaaaaaacccccccccccccccccccctaaaatggcagtgcgcgtgctctctgtctctgatatcccgcacaccacaccccctgggactcctggagccgactccgccgatggtcacgccgccatttccgaaatggtacgggtccttcatatgggccgcctggggtaatgctaatccacctaaatatgggtcgttcctcctgg

SEQ ID NO: 73654 - DNA, 1529 bp, Homo sapiens
tgatacggatcatgtatttgtgtgaccaccactaccacagtcaatttgtagagcagttaaatcactgccaaaattccctcttgcttccttgtagtcagtccttctcccaaccccaggtacttggcaacctgttttccgttcctagacattttccttttccagaatgtcatattcgtaaaatcatttaacattgtagtcttttgagcctgacttttgtttttgagacagggtcttgctctgcagtgtgggctagagtacaatggtacaatcatggctcactgcagcctcgacctcctgcgctcaagcagtcctccctgccttggccttccaaagtgctgggattataggtgtgagccactgcacctggccctgagtctgacttcttatttaaatcatttgagattcatctgtgttgctgtgtgccatcagtaagttagttacttttattgtgagcaatatcccattgtatggatgttccagtttatcccttactcagttgagagacactgaaattatttgcagttttttggtaattatgaataaagctgctataaacctttgtagacaagggtttgtgttaacataagcttttattttagtgtgatgtgggattgctgggtcatgtggaaagcatttcttttaactttatactgccatacatatgtatttctaatctacagaataagctcatgacataaattatctctgtatatattccagaaatcaagactcaaaaggttaattaacttattcgtgtacacatagcaagtggctgagctgggattgaacaaaagtctaactccgaagcttgggtcctttccactatgccctacttcttccacgtaaagaagtcatttgactttaaaattatacagtagccttcataatgttcttaaatttcctgaaacaagcaaagttttgaaagtcgcctgtggtttcttaaagctggatttctcacagtctctccatttatatattgccgcatttacgtatactgtttcttagttgggctttactttctttagacttctatgtatgttttccaaatctggtttgcataaggtgactcatacaagaatgcttctaaacaaacaagccgtatatgtttatgtaaatgttacattttaaaaatgacattgcataaagaaattttgttcctgttatctgaaaaattttaggatatgaaacattgaatactttgaccatgacttgaaagcccagctgaatagagatctaataactagtaacaacttttattcaaagggcattacttacaggttgtttattggtcttcttttgtgctcagtttatatctgctctgaaatatgagccatgtcttaaaatttgataatgagctgaggataatttggagaagcaaaggagaataagtacttgtaggcttgaatcaattgatcttatttgttacttggaattaaggtgtaaggagtactccaaagtcacaaatgacttctagattgaagctatagaataaaggtttgcaggccaataaaattgaagctctctgaaag

SEQ ID NO: 73655 - DNA, 1355 bp, Homo sapiens
ggaggtgttctagaggatcccgtctgccattatccaagcttatatttatttatttatttatttatttagtatttttagtagagatggggttcaccatgttagccaggctggtctcaaactcctgaccccaggtaatacacccaccttggccttccaaagtgctgggattataggtgtgagccactgcacctggccctgagtctgacttcttatttaaatcatttgagattcatctgtgttgctgtgtgccatcagtaagttagttacttttattgtgagcaatatcccattgtatggatgttccagtttatcccttactcagttgagagacactgaaattatttgcagttttttggtaattatgaataaagctgctataaacctttgtagacaagggtttgtgttaacataagcttttattttagtgtgatgtgggattgctgggtcatgtggaaagcatttcttttaactttatactgccatacatatgtatttctaatctacagaataagctcatgacataaattatctctgtatatattccagaaatcaagactcaaaaggttaattaacttattcgtgtacacatagcaagtggctgagctgggattgaacaaaagtctaactccgaagcttgggtcctttccactatgccctacttcttccacgtaaagaagtcatttgactttaaaattatacagtagccttcataatgttcttaaatttcctgaaacaagcaaagttttgaaagtcgcctgtggtttcttaaagctggatttctcacagtctctccatttatatattgccgcatttacgtatactgtttcttagttgggctttactttctttagacttctatgtatgttttccaaatctggtttgcataaggtgactcatacaagaatgcttctaaacaaacaagccgtatatgtttatgtaaatgttacattttaaaaatgacattgcataaagaaattttgttcctgttatctgaaaaattttaggatatgaaacattgaatactttgaccatgacttgaaagcccagctgaatagagatctaataactagtaacaacttttattcaaagggcattacttacaggttgtttattggtcttcttttgtgctcagtttatatctgctctgaaatatgagccatgtcttaaaatttgataatgagctgaggataatttggagaagcaaaggagaataagtacttgtaggcttgaatcaattgatcttatttgttacttggaattaaggtgtaaggagtactccaaagtcacaaatgacttctagattgaagctatagaataaaggtttgcaggccaataaaattgaagctctctgaaag

SEQ ID NO: 73656 - DNA, 396 bp, Homo sapiens
tgatacggatcatgtatttgtgtgaccaccactaccacagtcaatttgtagagcagttaaatcactgccaaaattccctcttgcttccttgtagtcagtccttctcccaaccccaggtacttggcaacctgttttccgttcctagacattttccttttccagaatgtcatattcgtaaaatcatttaacattgtagtcttttgagcctgacttttgtttttgagacagggtcttgctctgcagtgtgggctagagtacaatggtacaatcatggctcactgcagcctcgacctcctgcgctcaagcagtcctccctgccttggccttccaaagtgctgggattataggtgtgagccactgtgcccagccaatatctttattttaatttgtttttat

SEQ ID NO: 73657 - DNA, 363 bp, Homo sapiens
  misc_feature (22)..(22): n is a, c, g, or t
tagagaaagacgaaactgaacntaggtctaagcatcagcttccccagcttttgaatctcactaggcaagggggacagagctccctgttgtggtttataacaactgtgataacagacacccagactcccctgcaatccaaatactgttggcatgaggacacttgcattctgtatggaaggaattaagtgctaatctgtggtgccataaagaaatgtcttctctttgtagggtgtaataatgatctctgctgtgttagcaaggtcagtgctttggacttctaggactagtagcctaaacttgtacgagttttagatgctcaggaacactacttcttattctttcttctctcttctcttctgttct

SEQ ID NO: 73658 - DNA, 649 bp, Homo sapiens
gggaagaccacgctctgatgcacttaccctgaccacctcccacctcctgagctggggctgggtctgcaggggggcagatacctgaacaaaactggagttttgataacaacaaagaaaatacaattttacttaaagtgatccaaggggacactgagtcagccattcatgaagctgaacatcatttcaagggacgctggctccggtatcatggtgaacgccaaggtgaagagcagccgcatgagatcccaaaggaaagcccgggagtcacacaagtggagtacagcagcaaaccccctccaccgcctgcccttggctttggtcttgccagggaacagctgatgccgactagatgacgcaaccaggaagtgaatatcctgtctgctccttgttctgtgctgtctgtgtgtcctagcttgccatcccaaatcaaggcatcccttgaaatcccctgggtccaagcatccagatgctcagtgaacgcagtgctctaactccatcttccactttccattaagaagtcaatgactcttattcaatacaactccatcttctgctaacccctaaaaggaatttacattctgctcatttcacttcccattatattgtattaattttcccatcattaaaccttttaaacccaataaaaaaa

SEQ ID NO: 73659 - DNA, 273 bp, Homo sapiens
agatctttaaccaaaaaaaaaaaaaaagaggccctacagaaacttagaaacagcctttacagggtcaaggggagctttgacaaggaagaggcaaaaatctctgccccatgtgtcagttgaacttcttccaccttccctcaccagtggctacatttcagggctgaaagggctttggaatcctttgctgagtgctttggatgagatttgttttcaagttgctttttagaattagagtgaccatttacatggttttcattcccaatctgtgaattc

SEQ ID NO: 73660 - DNA, 808 bp, Homo sapiens
tttttttaatttttgttagggccatataaaacaaaaaccaaaaacaaacttgcaactacgaaggttacagaaataataggatattatgaatagtagaatgttgtactattttgattattaaaacctggaaatgatgtccttatgcttggtaggctggtacccttaggcatttccctaagaaactaatcccacaggagtcaaaataaatagaattttctgctgctctcaaattatcatagatgttgtgaaaactgtaataggacaaaaaaaagtagtgaagacgaagatccaaaaactgaattccctgcatttccagtaactagcaatataaacagcaaaacagagtaaaagtagtttttgtgaaaaatgtaaattttccatctattgtgatggcacattgcaggacaaggaattctgtgagagagaagtctaagttcagatctgatttcagtatggctttgaaattaaactgcagaaatctcttttattaaatggaatatcactacccaccctgctgtactgtccatgagatttagctaaagtgtatgtaaagcacttaacagtgtggcacatataggcattcaatatatttttctgcattattaaagaatgtaacacattttcttgttctaaacatgtgggtatacttaagttttcattttcacaaatgctaaagcaacaactaggtagcaggctttcggtttaaataattcaactataatcacattctaagacatgtaactgattatcttccagaatagccacaaattgagtatatgagagaggtcaattttgagagctgatgata

SEQ ID NO: 73661 - DNA, 456 bp, Homo sapiens
ttcaggtagaactggcagaaagaattttttttccagtagtagtagtattagtggagttgaaaaatatacttttaattatacattgcaagctctgattgcaggttagaaaactaaaatcgatcattcctacatcaatagtgttgtctattactacattgatttgtgtttatttatgcagagactttcagttatttacttacatatttcagcatctgcctcttgattattatcgtaggttgcttttaatgaaagagcttatataggaagcgaaacacacttgacagatccattttaagtaaacctgatagtgaattatggcaacccaaggagattatgaaattacttattcatacttgctttttagcaattaggaatctgtttctgattaaaacctcatgctgcttgaaaacttccattcttttcttcatacattgtattgatgtgcttcaataaaat

SEQ ID NO: 73662 - DNA, 295 bp, Homo sapiens
ctagcctggcaaacatagtgaaaccctgtctctactaaaaatacaaaaattagctgggtgtggtggcacacgcctgtaatcccaggtactccagaggctgaggcagaactgcttgagcccgggaggtggagagtgcagtggcataatcacggctcactgcagccttgacttcccaggctcaagtgatcctcctacctcagtctcctgagtagctgggactacaggtgcttaccaccacacctggctaactttttttatgttttatgttttgtagagacaggggtctcactttgaa

SEQ ID NO: 73663 - DNA, 1081 bp, Homo sapiens
  misc_feature (400)..(400): n is a, c, g, or t
atggcgggacacctggcttcggatttcgccttctcaccccctccaggcggtggaggtgatgggccaggggggccggagccgggctgggttgatcctcggacctggctaagcttccaaggccctcctggagggccaggaatcgggccggggtttgggccaggctctgaggagtgggggattcccccatgtcccccgccgtatgagttctgcggggggatggcgtactgtgggcctcagactggagtggggctagtgccccaagacggcttggagacctctcagcctgagggcgaagcaggagtcggggtggagagcaactccgatggggcctccccggagccctgcaccgtcccctctggtgccgtgaagctggagaaggagaagctggagcaaaacccgnaggagtcccaggacatcaaagctctgcagaaagaactcgagcaatttgccaagctcctgaagcagaagaggatcaccctgggatatacacaggccgatgtggctcaccctgggggttctatttgggaaggtgttcagccaaacgaccatctgccgctttgaggctctgcagcttagcttcaagaacatgtgtgagctgcggcccttgctgcagaagtgggtggaggaagctgacaacaatgaaaatcttcaggagatatgcaaagcagaaaccctcgtgcaggccggaaagagaaagcgaaccagtatcgagaaccaagtgagaggcaacctggagaatttgttcctgcggtgcccgaaacccacactgcagcagatcagccacatcgcccagcagcttgggctggagaaggatgtggtccgagtgtggttctgtaaccggcgccagaagggcaagcgatcaagcagtggctatgcacaacgagaggattttgaggctgttgggtctcctttctcagggggaccagtgtcctttcctctggccccagggccccattttggtaccccaggctatgggagccctcacttcactgcactgtactcctcggtccctttccctgagggggaagcctttccccctgtctccgtcaccactctgggctctcccatgcattcaaactga

SEQ ID NO: 73664 - DNA, 400 bp, Homo sapiens
caatggaattttttttttaagcaggaagggcaggagagtggagacagaaataaaccttttaaatcttctttacgtgaaccccacaaggacataagcatttagcagattagagagcgtttggatttatagatactatcctctacagtagtggtcttcaatgtgtgatccagggaccccctgcggggccccaaggccctctcagaagctccaagagataaaaaccagttccataacaatactgaggcattgtttcccctttttactacggtgaccatttgtattaatggtgcaaagcattggtgggtaaaactgctggcaccttagcaggaagcaggacggtaatgccaagctgtaccagcagtcatggtattcttcattactgtgcagttgctgttaaaaa

SEQ ID NO: 73665 - DNA, 193 bp, Homo sapiens
tgagatggagtttcattcttgtcacccaggctggagcacaatgcacaatctcagctcactgcaacctccgctgtcacaaataaacatcagtaagagccagcagttgctctaggatctcagtcagcaagcttgggggctgtcaggaaaccagcagtcacctgtttctccctctcccagcccagggctgacccct

SEQ ID NO: 73666 - DNA, 338 bp, Homo sapiens
taactcatcagtcatcattaatgttagtgtattttatgtgtggtgcaatacagttgttcagtgtggcccagggaagccaaaagcttggacacccctgctgtagatggtgactgtttttcacatgggtccaggccagcagttctgaaatgtatgtacacacgaggattgaccacacaggtaaatctaatctgcatcggacagtgagagccagagggaggccaaggaaagcccttggtgttgggttggctccaaggtatctgtgtaaacccatggtttttaccatgtatatatgcaggtagatacaggaataaatgcagaagcctgcctatgcttgggct

SEQ ID NO: 73667 - DNA, 312 bp, Homo sapiens
tagttttagtacagatggggtttcaccatgttggccaggctggtctcaaacccctgaactcaggtgatctgcctgccttggcctcccaaagtgctgggattacaggcgtaagctactgtgcctggcccaaagtcaggattcttaagggaactctccaggacatgcttcgtttctctcagtctgtgtcatttagggtggcagaatggtctcacagggttaacatctctggaagtaaaccatttacccaatatgatgtagtggagttagaaaaaacaacaacaacaacaacaacaaaaaacccaaaaaaactag

SEQ ID NO: 73668 - DNA, 307 bp, Homo sapiens
gtgaaatctttctattttcccctagctaatctttattaagtatatgtaaatatttcagagactttttttttaatctgccttaaggcatttcaattaatactgtgatgtatcccagtgaacactttaccttccaagtgtttactagaaattttctaattttcacgttggcactgagggagtctttaatacataacttacctttcctaactcttcaggagtgcacaatcagagagttgggttgttttagaactgacaaagggctcggggagtttcaaatcaagtcttcttatcttacagataagaaact

SEQ ID NO: 73669 - DNA, 384 bp, Homo sapiens
gctttcaatacaacaatgatattatctcaaaatactcagcatgtctaacaggcctcttttaaaagctcagcatgtttaatgtagatgttgctaacgtccaggtggctcctataagttaagggtccattgatttagaagttctaaaagagactaacctaagggataccaagaacagatatttttaaagaatttcatagaggagatacacattagaaacccagaactctaagatgtgcatttgctaagtcctgtaaacagacaggaaaacacatttaaattagtttgccctttaaagattatttactacttgtctcttatcaatgtgagtacataaaagagaccttattacaattaaaaacaatgatggtttagcagcagatttag

SEQ ID NO: 73670 - DNA, 490 bp, Homo sapiens
caacaaaggcataaacagatgctctaatagctccttcctccaccctggtccctgagcccttttgccacagtttgactttcctcctgcacgtggaggactccccatgtgcctgctccttccctagtggctgggtgggcctcaccccacctccctccagaagcccctctgccaagtggtcacctcactgtgtctacatgccaccccccgtccccctgtccagaggctgcccctccccactggagctcaaccccaactgggcatctaggtgtgtccctgtggcccagctagtcctagtgccgtcctcatcatgtcacatcacatgacatctggatccatgacacccattaggctgggccctccacttggagggatgccctagaccctcacatttgggcaggtcctgaggcccatggtcttctccctggctgctgcctcactgctgtccttcctgggactccaaggccacttttctcaggcctaatggctgtgg

SEQ ID NO: 73671 - DNA, 444 bp, Homo sapiens
tgatggtgcagcatcacctttttagtatgctgcttcacttactggatgagtagctagtgtagcagatttaaaagtgtgagatcaaaagctgaatatagatagaatgatgacgttgggacttgattttttgacaagtatttgatggtgtgtttctttggtgtatttgatggtgtgtttctttggtttatttgcatctttttcaaaggtgaaatagagcatatgtagccataaaggtgtgtggttctagattaattttcacaagctttcttctgtaaaatttcatattataaaataaattgaatcagaaatatggaaaaaagtgaaaatatcacccccccccccccaatactgctgtcctccctcctcccaaataatactgtttaagcatagtgtctggtctctggtgatttcctacatacaattcaagatttgcccccaggtaaa

SEQ ID NO: 73672 - DNA, 408 bp, Homo sapiens
aaacaaaattatgggagcccgttattttggactgaactcctgtactaggccccaacagacgagaccaaaccaaaatggagtcattcatgctaaatgcctcgtcatcaaatagaagctttaaggaagcagatagatccaacatagactagtttttcttgagaacagaagattccagtctacctgtgtcagtgcaataaggaagtcctctctgctttaatttttacacaaaaagtaacctcatgttagccaatccgactttaaaattttttttttcctatttccttgttctcaccttacaaaacccactgttctgctgctgtccagcaggaaccctcatgctattttgtagaatggaagctgccctgattcatgaattgcaaataaaagccaattagatctataactata

SEQ ID NO: 73673 - DNA, 696 bp, Homo sapiens
taaaattactggcactgtttgacagtcaatacaggaaaaaaaaaaaaaatatgtcctggaagagaattgagaaagtgccttaaagagtaactggatgcctccgaaaaattcttaagcctagtagggtctcagaaaatgttactgcaaaatgaagtcctcagaagcagctctctctctgaccttctccaaacctcctgtctctggaccttcatttccacccatctcctcctccccaccaccgccaggctggccatgcgtactagactccctcttcctcaaggcaggtcatggaaaccagaatccctttccccaaagccagccacaaagcatcaaatattgtttctacttcccccagctcccctccagcctttctgtgtaaaccgtatagaaattatctgacctacctggtttaagtgtaggtcataacactcccattccagagaaggtcctgccccatgcccagatggaacgatggagtactgcacagagtccaggaaggatctaaaccggccttgctgggcttcctcacagtctattagcattacatcataccctttttgtctaattatatttctacagggctgtccatactttgttgaacctaagtataaaaatggacaatttccccctctacctttgggtcttcattctgaagtctcctgtgtcacataaaacaagatcaaataagtgtgtatg

SEQ ID NO: 73674 - DNA, 993 bp, Homo sapiens
atgtggatatgatagcactggacacttcgaggctccattggcaaaacatgcggcaaataggaaaccaagggacctttgacatttaagaagtatatgccctaagatttctacagatcctgaaattcatcactacggcagaatcacgcatcttatgaaaaccaagaataaaatgacacctgacaaccttgccagctcagcacatctggaggcactaaatgtctgacccaggaaatgtgcatcaaactgacgggtttcacaaatgagcagatcaagggttctccaggaagacctgccatgcatagacacctctacattagtgcagtcaaggatcaggaaacccctttctaatttgagcaacacacatatgaaggaataatccgatgtactgctgcaaagtgtcttcagccaatttagacaagaacaactcttaaattatttttggtgaagaaagttaatcactgaacaatttgaggtgaatggaagttcgctattcctctacaaccttttaccaggttataatgaaattgagtccactgaggaaggaaaaagttagtttcacttgactaagttcccacatggattaagcagcagacccaagaccaagaccagaacgcaatccactctttgatgagaacatacttggatatgacctatgctattttgaatgaaatttagcaaggaagaactgtccatcaatcattttaaccaagttcaccttttgttgccatttaagtttaattttgtcccaggaaattcatagtgagtgattgtgattacattttcctcattttcatgcctctgacattcttgttgaagatgctaatcttgtataaagctgtctttggagttgatgatgctgacacttctcactcctatgggaaatggagagatgtggtgcataaaatagaataaaatgtattagagcaaaataaaactgctaataagagtaatcactgtaatagattttaaaatcattttaaatctagttttaat

SEQ ID NO: 73675 - DNA, 1170 bp, Homo sapiens
taaaattactggcactgtttgacagtcaatacaggaaaaaaaaaaaaaatatgtcctggaagagaattgagaaagtgccttaaagagtaactggatgcctccgaaaaattcttaagcctagtagggtctcagaaaatgttactgcaaaatgaagtcctcagaagcagctctctctctgaccttctccaaacctcctgtctctggaccttcatttccacccatctcctcctccccaccaccgccaggctggccatgcgtactagactccctcttcctcaaggtgaattgactgctggggaaatgggctcagaagattaaaggcctgcttattaatggaaagagcttcctcccacacacagatatataaagccgcctcgccatttcttccttccaccgtgacccatagtctttctgggacaagggctgagatttcacagccgagttttaaagttgctggggatgctaacaacagggacttttatgcttgaatttctgctgcaaatcatacacccttggactcagtccactaagtctatagaattatctgcaaagcaatgcaataggatatacaaattttttgactatttgtatcgaaaataaatcaggaccttgaactatataaaaagctaacacattatcatgaaaactctgcatgaatactgataaaacatactggatgccctttgactcttacagtccttgttctcatctttttgcttatatccatttctcttttcaattaatttgggataattttgcttgaataataatctgatagtaacttcattatttctaattatattatcttaatgtgcaaattcaatcatttttggcttacattaacaaagataaaaatgtgtgacagaggttagtaatagaaggttagttttacatgaaatgaggaccagataaaagaccagtacaatgttatatatttatgtccttcacatgataggcagacatcaatccttgatgtcatgttcaaataaaggacttatatatatgcatagtgacaaagcactatgcatatgtatatgcatgggaacaatggagagaagttcagtgagagaattcccaattgtattaattactacaaacatttattgaataaagaatgataagaaacgcctctcttctttcttcctttcacatacacgtttacataaataa

SEQ ID NO: 73676 - DNA, 1140 bp, Homo sapiens
atgtggatatgatagcactggacacttcgaggctccattggcaaaacatgcggcaaataggaaaccaagggacctttgacatttaagaagtatatgccctaagatttctacagatcctgaaattcatcactacggcagaatcacgcatcttatgaaaaccaagaataaaatgacacctgacaaccttgccagctcagcacatctggaggcactaaatgtctgacccaggaaatgtgcatcaaactgacgggtgaattgactgctggggaaatgggctcagaagattaaaggcctgcttattaatggaaagagcttcctcccacacacagatatataaagccgcctcgccatttcttccttccaccgtgacccatagtctttctgggacaagggctgagatttcacagccgagttttaaagttgctggggatgctaacaacagggacttttatgcttgaatttctgctgcaaatcatacacccttggactcagtccactaagtctatagaattatctgcaaagcaatgcaataggatatacaaattttttgactatttgtatcgaaaataaatcaggaccttgaactatataaaaagctaacacattatcatgaaaactctgcatgaatactgataaaacatactggatgccctttgactcttacagtccttgttctcatctttttgcttatatccatttctcttttcaattaatttgggataattttgcttgaataataatctgatagtaacttcattatttctaattatattatcttaatgtgcaaattcaatcatttttggcttacattaacaaagataaaaatgtgtgacagaggttagtaatagaaggttagttttacatgaaatgaggaccagataaaagaccagtacaatgttatatatttatgtccttcacatgataggcagacatcaatccttgatgtcatgttcaaataaaggacttatatatatgcatagtgacaaagcactatgcatatgtatatgcatgggaacaatggagagaagttcagtgagagaattcccaattgtattaattactacaaacatttattgaataaagaatgataagaaacgcctctcttctttcttcctttcacatacacgtttacataaataa

SEQ ID NO: 73677 - DNA, 336 bp, Homo sapiens
atcctttgccctctttttgatggggttgtttttttcttgcaaatttgtttaagttctttgtagattctggatattagtcaaatagtttttttgagatggagtctcactctgttgctgaggcaggaggatcacttgagcctgggagatcaaggctacagtgagccatgattgtgccactgcattccagcctgggtgaaagagtgggaccctgtctcaaaaacaaacgaagaaactgttagtgactttactgaacttttgatattaatcaggtgccttcgcagcagagtctcttggattatactgccttcatattattcaacaactgaataaaaaaac

SEQ ID NO: 73678 - DNA, 452 bp, Homo sapiens
atacaaatattagtttgaaatgaatcatataactaaatataaaagctagaactataaaactattagaagaaaacttatacatacatctttattatcttggattaggcaacaatttcttagatatgacaccaaaagcacaatcaacccaagaaaaacagatttggccttcctcaaaattaaaaactttagtattaatacatcaaagaacactatcaaaaagtgcaaatacatccaccgaatgggagaagatatttgtaaattatatatatgctaaggatctataatccagattataaagaattcttacaactcaacaataaaaagacagcccatttttaaaaagggacaaatgatttgaactgatatttctccaaacaagatgtataaatagccaataagcacatgaaatgatgctcaacttcattagctattatagaaatacaaatcaacac

SEQ ID NO: 73679 - DNA, 5010 bp, Homo sapiens
ctccagaactctcacccgattgcctgcctctgctgcgtctttgcccactgaacagccatgagaaggcaactccggtccagaagggctccatcctttccttacagttatcgctacagactcgatgatccggatgaagcgaaccagaactacttagcagatgaagaggaggaagcagaagaagaggctcgggtgacggtggtgcccaaatcggaggaggaggaagaagaggaggagaaagaagaggaggaagaggaggaaaaggaggaggaagagggtcaaggtcagccaacaggcaatgcctggtggcagaaattgcagatcatgagtgaatacctgtgggatccagagagaaggatgtttctggcccgaacaggcctgatcttactcatttacttcttcttctatgcctccttggctgctgtgatcaccctctgcatgtacacactatttctgaccatcagtccctatataccaaccttcacggagcgggtaaagcctcctggagttatgatcagacccttcgcccatagccttaacttcaacttcaacgtttctgaacccgacacttggcagcattatgtgattagcctaaatggctttctccagggttataatgacagtcttcaagaggaaatgaatgtagattgtcccccggggcagtacttcatccaagatggcaatgaggatgaggacaagaaggcctgccaatttaagcgctccttcctaaagaactgctctggtctggaggacccaacttttggatactctactggacagccctgcatccttctaaagatgaaccggattgtaggctttcgtcctgagcttggagatcctgtgaaggtttcctgcaaagttcagagaggtgatgaaaatgacatccgatccatcagttactacccagagtcggcttcttttgacctccgctactacccttactacggcaaactgactcacgttaactacacatcccccttggtggcaatgcactttacagacgtggtgaagaaccaagcagtgcctgtgcagtgccaactgaagggcaaaggcgtcataaatgatgtcatcaatgatcgttttgtgggcagggtaatctttaccctgaacatagaaacttaagaacttcagggggccattcttaccagttctgtttctgttttatctcatggtatctctggtagcacctgaattctttttcttcaattaggacacagccagatggacatctaagacagccgatcatctttccttgcctatgacatgtgtataaaatgacattgtgggagctgttcgattttttaaaggtagtgtctcctgatgacaaacagagtatattaatttcctttccctccacttaaaactaaagcctgttcttgctgctggtaatctccctgtagcgtaaacatagtatctgataaaatttacaatagccacgcaatagccatcaaggagaatttctattatgattataaattcatcatgttttctaaaattctgttggttttagaggtcagattcctcccaaccaggctaataacctaacacatgtttaaaaaaaatctgcctaagccgggtgtggtggcatgcatctgtagtcccacctattcaggagattaaggcaggaggatcacttgagcccaggaggtcaaggctgcagtgagctgcactgcattccagcctgggtgacagagtgagatcctgtctctgaagaaaaaaaaaacctgcctggcaaggtccttccctgggaatcaccactcggtccaacctagacaaccaagaccgctatacctaaagacctctatatcctggtgcctaagaaacttctgcctcccacagacaactaagtgcttattcaaagactaggttattttcaactgggaaaaaagcagtgctaacaggatattgttctgggatagagatgaagaccgtccttgtgactttttaaagaggtggggctcactgcaactggggagaacacttagcatatggatatgattggtgtttgattccttgctctctggtgtaatcgtctaaaggcaaacattcctgcaaacaggtttttctcagcttcaggcagaggagacaacatggaagaagattcccaccagctaattcttcttgggctatttgtttgacagtagcatgatgttttttgagaccatcaggggtggttacatagaccagcagctacagctctggaaattgaaatcataatctgtcaatgaatacatgacaagacagaacgttccttgccaggccaggcaaaagccaaggcccattagccagtttagcatttactttaaaaatgacatgaggcagattcttatccaggatgtggatcagccaggtcactttgtcttatctttggtcacctgatcactcaactgcttcttaacacctccaccagggggaaggctggcacaaggagaaaaaaaaagcaagcatcagcgaatagtatagtgtctcagggtccgaagcaagtttaaatgccacctaggaggatccaaagtctgaatctcctctacaatgtttcctttctcccaaaaccagggaactgactgtctggtagtgaagacaagcaagtggagaagttatacgatatagtttaatgagagttaaaaaactagtatgtggaaagctatgggaatatgaggaaaaatatcttgagctaagaaagtagcagaggaaatttcacatgcaaagccacagtcatgaagagaccatggtgtgtctgggtaactgtgagcagtttatgtaactggaatgaaaagggctcagaggaatggcagggatggcaagagatccagctagagaggtattcagggatggaaagaggactttgagttttatccaataggtgaaaatgagtaattaaagcattttaatcagggaggctctgtgatcacatttgtgttttattttattttactttattatttatttgtttatttttgagatggagtttcgctgttgtcacccaggctggagtgcagtggtgtgatctcggctcactgcaacctccacctcccggattcaagtgattctccagcctcagcctcctgagtagctgggattacaggcacacaccaccatgcccagctaacttttgtatttttggcggagacagggtttcaccatgttggccaggctggtctcgaactcctgacctcaagtgatccgcctgcctcagcctcccacagtgctgggattacaggcgtgagccaccgcacccggcttgcaatttagaaagggcacttggcaaccactatgtgaagggtgattggagaaggacaagactgtggaatgggcaataaggaaggaggagtttggagaatgactccaaaggtttgagcttggctagaaccggtaagatggtgacattgttgatcaagactgggaatataagagagaagcagatttggagagatcaattttgaacattttagacatgattttctattggtcagacattgatgtggagatgtaaacacatgtagggttggtgagaaggaaagatgagaacaaaagcaacattgggttaagggaactcgcttaagaaattttaagctatttaatcttgggaactgaagccagtcatgtaaacatactataccaatctagtccctaacagtgttttttctcttgtggcagaaagaattgctgttcctctttggaatctccttcccagacaccttcaaagtcttattgacacagtaaagggaggccaaccactactaacaagttctagaagatataggatcttctatagtaggttaatggaaaatacaaaaacaaacaaacatacaatgaaactgcctcctctcaacccattttcttaacaaattcaattttcaaaactaacctttaaaaagaaaaggaacaaaatgaaaaagacaataacttttaaaccacttgaaaattacctcaatcaaactctcaagattcagtagtaaaagataatagaatgttagatctggaaaggatattagagagtgtttagaaaaaacaacttgcattgcatctgactccaggtccagtgctctttctactctgagctgctgcttaccagaaagtaccatcttcttaaaaatcaatgaatgatatcccaaacattttgaaacgtatgtaaattttgagttaaaatagttaacatttcacaggaattcaactactggtgctatactttatacataatacattatcctgttaaatgcattgactattagacaaggaattatgaatcatttgtcaaataatatttatctttcaatggaatccattgtgtccacaattgcaaagcaatattgaagggtactaagatagtttgggttgtcagctaggacatgaaaaatgtaggtttactatacagaactggatatgataatatattcattaaagttatgttctaactgttcaatagacttctagtagattaatttaaatagttccccataccgtgctgcatcaggatttgatttgtatgccatctgttgcaatgcacttggttttacttgcttgtcaatgagaaatactacttccaaatgtcttcatggttttgtccatactggactttgggttatgatttttcaccttctactcccctgaaatcattatcctaaagtaactttttttaggcacctattttctggggatcaacatgtaaaaaaacatttatattgtcttgaggagttgtcaacaacaataaattgaaataaaaaagaaatgtatgattttctctttctagaccatatcactgattttcccactggaatattgggcagccatgtgggtggaaaacttgacaattgacaacctgttagttaaatattgtttttcttctctctcccctctttttgactcttagggtttagtcacaggaggataaaactaaaagttgtttcatttctgggcattttttcctttgtagtctctgtgctctggtttctcgttagactgctttgtgagagcagcctttctttatcaaggttgagtcctggtataaactgttat

SEQ ID NO: 73680 - DNA, 683 bp, Homo sapiens
ctccagaactctcacccgattgcctgcctctgctgcgtctttgcccactgaacagccatgagaaggcaactccggtccagaagggctccatcctttccttacagttatcgctacagactcgatgatccggatgaagcgaaccagaactacttagcagatgaagaggaggaagcagaagaagaggctcgggtgacggtggtgcccaaatcggaggaggaggaagaagaggaggagaaagaagaggaggaagaggaggaaaaggaggaggaagagggtcaaggtcagccaacaggcaatgcctggtggcagaaattgcagatcatgagtgaatacctgtgggatccagagagaaggatgtttctggcccgaacaggtcagagttggagtaagtcccaatagtcccaatgccaaagtctggtgtcctttgcttttggtgtggtgttcagggctcctttaccatacgctggatgggcttgtctgcaaacttctctttgcacttcatgtaaaggcatcaatgcctagggaaatgcctagactgtggacagattccatcagaacaaactccaaatggatgaacaaacttgattgtgtaaccaaaacccactgggctcaacatcagttgcaatgcagagagacagtgagaatgagttgaaaaagcacatgatttttttaagtcccagtcc

SEQ ID NO: 73681 - DNA, 509 bp, Homo sapiens
ggaggaaaagtaaaatggtacttggcaaattatggttcttttcattttgattgcctggggggaaatggtttcatgggaatcaatacaaaaaaattatcccaagaatgggttaatatatccaagacctgttttcattgccaggagttatgatcagacccttcgcccatagccttaacttcaacttcaacgtttctgaacccgacacttggcagcattatgtgattagcctaaatggctttctccagggtaagtaagttcgtctgaatagtggaaagctcttttgaaaggtgatgggtgggaatccaaaattcaaaattcacctggcccaggaatcccagtcttactaaccccaactcatcatggtctgtccttactttgcatcccccttagcacctgtagctacaatcagaattgctctagtgtgtgattgtatgttgtcttgaaaacatacaagccaattttccagcaagataagctctttgtggcagagaaattttttttcttgaaca

SEQ ID NO: 73682 - DNA, 4235 bp, Homo sapiens
ctccagaactctcacccgattgcctgcctctgctgcgtctttgcccactgaacagccatgagaaggcaactccggtccagaagggctccatcctttccttacagttatcgctacagactcgatgatccggatgaagcgaaccagaactacttagcagatgaagaggaggaagcagaagaagaggctcgggtgacggtggtgcccaaatcggaggaggaggaagaagaggaggagaaagaagaggaggaagaggaggaaaaggaggaggaagagggtcaaggtcagccaacaggcaatgcctggtggcagaaattgcagatcatgagtgaatacctgtgggatccagagagaaggatgtttctggcccgaacaggcctgatcttactcatttacttcttcttctatgcctccttggctgctgtgatcaccctctgcatgtacacactatttctgaccatcagtccctatataccaaccttcacggagcgggtaaagcctcctggagttatgatcagacccttcgcccatagccttaacttcaacttcaacgtttctgaacccgacacttggcagcattatgtgattagcctaaatggctttctccagggttataatgacagtcttcaagaggaaatgaatgtagattgtcccccggggcagtacttcatccaagatggcaatgaggatgaggacaagaaggcctgccaatttaagcgctccttcctaaagaactgctctggtctggaggacccaacttttggatactctactggacagccctgcatccttctaaagatgaaccggattgtaggctttcgtcctgagcttggagatcctgtgaaggtttcctgcaaagttcagagaggtgatgaaaatgacatccgatccatcagttactacccagagtcggcttcttttgacctccgctactacccttactacggcaaactgactcacgttaactacacatcccccttggtggcaatgcactttacagacgtggtgaagaaccaagcagtgcctgtgcagtgccaactgaagggcaaaggcgtcataaatgatgtcatcaatgatcgttttgtgggcagggtaatctttaccctgaacatagaaacttaagaacttcagggggccattcttaccagttctgtttctgttttatctcatggtatctctggtagcacctgaattctttttcttcaattaggacacagccagatggacatctaagacagccgatcatctttccttgcctatgacatgtgtataaaatgacattgtgggagctgttcgattttttaaaggtagtgtctcctgatgacaaacagagtatattaatttcctttccctccacttaaaactaaagcctgttcttgctgctggtaatctccctgtagcgtaaacatagtatctgataaaatttacaatagccacgcaatagccatcaaggagaatttctattatgattataaattcatcatgttttctaaaattctgttggttttagaggtcagattcctcccaaccaggctaataacctaacacatgtttaaaaaaaatctgcctaagccgggtgtggtggcatgcatctgtagtcccacctattcaggagattaaggcaggaggatcacttgagcccaggaggtcaaggctgcagtgagctgcactgcattccagcctgggtgacagagtgagatcctgtctctgaagaaaaaaaaaacctgcctggcaaggtccttccctgggaatcaccactcggtccaacctagacaaccaagaccgctatacctaaagacctctatatcctggtgcctaagaaacttctgcctcccacagacaactaagtgcttattcaaagactaggttattttcaactgggaaaaaagcagtgctaacaggatattgttctgggatagagatgaagaccgtccttgtgactttttaaagaggtggggctcactgcaactggggagaacacttagcatatggatatgattggtgtttgattccttgctctctggtgtaatcgtctaaaggcaaacattcctgcaaacaggtttttctcagcttcaggcagaggagacaacatggaagaagattcccaccagctaattcttcttgggctatttgtttgacagtagcatgatgttttttgagaccatcaggggtggttacatagaccagcagctacagctctggaaattgaaatcataatctgtcaatgaatacatgacaagacagaacgttccttgccaggccaggcaaaagccaaggcccattagccagtttagcatttactttaaaaatgacatgaggcagattcttatccaggatgtggatcagccaggtcactttgtcttatctttggtcacctgatcactcaactgcttcttaacacctccaccagggggaaggctggcacaaggagaaaaaaaaagcaagcatcagcgaatagtatagtgtctcagggtccgaagcaagtttaaatgccacctaggaggatccaaagtctgaatctcctctacaatgtttcctttctcccaaaaccagggaactgactgtctggtagtgaagacaagcaagtggagaagttatacgatatagtttaatgagagttaaaaaactagtatgtggaaagctatgggaatatgaggaaaaatatcttgagctaagaaagtagcagaggaaatttcacatgcaaagccacagtcatgaagagaccatggtgtgtctgggtaactgtgagcagtttatgtaactggaatgaaaagggctcagaggaatggcagggatggcaagagatccagctagagaggtattcagggatggaaagaggactttgagttttatccaataggtgaaaatgagtaattaaagcattttaatcagggaggctctgtgatcacatttgtgttttattttattttactttattatttatttgtttatttttgagatggagtttcgctgttgtcacccaggctggagtgcagtggtgtgatctcggctcactgcaacctccacctcccggattcaagtgattctccagcctcagcctcctgagtagctgggattacaggcacacaccaccatgcccagctaacttttgtatttttggcggagacagggtttcaccatgttggccaggctggtctcgaactcctgacctcaagtgatccgcctgcctcagcctcccacagtgctgggattacaggcgtgagccaccgcacccggcttgcaatttagaaagggcacttggcaaccactatgtgaagggtgattggagaaggacaagactgtggaatgggcaataaggaaggaggagtttggagaatgactccaaaggtttgagcttggctagaaccggtaagatggtgacattgttgatcaagactgggaatataagagagaagcagatttggagagatcaattttgaacattttagacatgattttctattggtcagacattgatgtggagatgtaaacacatgtagggttggtgagaaggaaagatgagaacaaaagcaacattgggttaagggaactcgcttaagaaattttaagctatttaatcttgggaactgaagccagtcatgtaaacatactataccaatctagtccctaacagtgttttttctcttgtggcagaaagaattgctgttcctctttggaatctccttcccagacaccttcaaagtcttattgacacagtaaagggaggccaaccactactaacaagttctagaagatataggatcttctatagtaggttaatggaaaatacaaaaacaaacaaacatacaatgaaactgcctcctctcaacccattttcttaacaaattcaattttcaaaactaacctttaaaaagaaaaggaacaaaatgaaaaagaatttatattgtcttgaggagttgtcaacaacaataaattgaaataaaaaagaaatgtatgattttctctttctagaccatatcactgattttcccactggaatattgggcagccatgtgggtggaaaacttgacaattgacaacctgttagttaaatattgtttttcttctctctcccctctttttgactcttagggtttagtcacaggaggataaaactaaaagttgtttcatttctgggcattttttcctttgtagtctctgtgctctggtttctcgttagactgctttgtgagagcagcctttctttatcaaggttgagtcctggtataaactgttat

SEQ ID NO: 73683 - DNA, 273 bp, Homo sapiens
caagcacggtagctcacaccaataatcccagcactttgggaggccgaggccggtggatcacttgatgtcaggagttcaagaccaggctggccaatatggtcacaggaacctcaagtatttcacagaatgatgccaaggagcgcagtttctacaccatccctcccgatcagaccacatctattccaatctcagtctcaaactcttcccctttttcaactcacattaatgaattcactaagtacctagcactgagaataaaaagctaaagcagca

SEQ ID NO: 73684 - DNA, 241 bp, Homo sapiens
  misc_feature (49)..(50): n is a, c, g, or t
  misc_feature (56)..(56): n is a, c, g, or t
gggggttttaaaattaagtgaagagaagaaagtgagataaaaaaaaaannccttcnagggcaacgggtcacaggaacctcaagtatttcacagaatgatgccaaggagcgcagtttctacaccatccctcccgatcagaccacatctattccaatctcagtctcaaactcttcccctttttcaactcacattaatgaattcactaagtacctagcactgagaataaaaagctaaagcagca

SEQ ID NO: 73685 - DNA, 373 bp, Homo sapiens
tcctcccacaatgaccctgggggtcagatgttgagttagcggcaccacagaatggaagaagcctagattttgactcacagctttgagaaatgtccccataaaccctcatcagactatgcatggatgagaaaaaacttaatgactccagccatgagatctgaggaactgcttgttgctacaccagtctgtcctatacaggtcacaggaacctcaagtatttcacagaatgatgccaaggagcgcagtttctacaccatccctcccgatcagaccacatctattccaatctcagtctcaaactcttcccctttttcaactcacattaatgaattcactaagtacctagcactgagaataaaaagctaaagcagca

SEQ ID NO: 73686 - DNA, 257 bp, Homo sapiens
ggtatgtttttcctttggttaatttttagtattttctttgttagagtttgtagcattgtgttttgtattactaaatgttgttccacttgggatctgcaaattcctaaggtccttttatactctggggccctacaaagagaggaaccacggctgggctatttgaggagagaaattaggtgagtatgatccctcctgaggaatgttaactagaggagaggcagtggcctgaggcagccagtgagtgcagcagtgtactt

SEQ ID NO: 73687 - DNA, 491 bp, Homo sapiens
gtgaagggtttttgaaattagcacctacttgaaataataagctaaatctcatacttcaaggatggatttagctcccaattagaaataagagctagaagaaggagccactcagctaaaggtgataatgtaagtgcacagttttaaagttaaagataacataaagataaaactgttaaatgaatctaagtctactaaaaaaacagagacaccaaaattctatcccaaaaaattggtttagaaatctgaaaagaaaattaaaagattcatcttcaataacaacttgctacctcttatttgcccactatgatatatttacgtatcattcaatagtcaatgttctattttccatcctggttttctttgtgtttcagaaggcaatttcttttggaaaagaaatctgaggacttttgatacgcagacaacacatttaaaattcagctaattaggtaactactgaaatctctaactaactatttggggccagtgttact

SEQ ID NO: 73688 - DNA, 602 bp, Homo sapiens
gttggaagagttgctttaccccctcatctgacctaagaccagaacaagtacttctgtccctaagcaaggtctttttttttcttcaggcagcaaataatgatttgaccttaagccaaccaataatccaaccccttgcatctctgtgacattcttcttccacatgcccttcagctccgtttcttccctgaactgcaggatgtctctgcaaagcgcagagggtgcaggggctactggacctccaagaagtgatggatttggtctccaagttgatcccttaagagatggctgctgccctttgtgggtctcatcactgcaatcttctcatcctatctcctggctctgagtctcaaatgtttactggcccagggcaaggacccattcccatggtattctagattcatgccatccatctccgactgcactgctgggtggcaggacaatggctttgcatctgtgcttcatcccacagaacccagcttctgcctcagggaggaaccaactgtacttatttctctagattcttttcctccttcttgtggttctttctaaaaatagagacagactggcataaccaaccagcaatgagcactcctgtgcccgga

SEQ ID NO: 73689 - DNA, 3653 bp, Homo sapiens
tgtcccttcccttggtatccctatgacttacctgttggacaggtagggggaaggggagagtaatgagtctcacctgctcagagcaagggtggggcaagacacaccccatcccttccattggttttttccttagtcttactgacagagccttgtccaatcaggaggaagtaactttctatctgccaatagatgcaatgttaggatgagacctcaagttagagtccatccctagagccgactggcagtccccggggccaatggcaagcggataaacagaggcggccgtggaagaggactggaggcgaggctccgcccctccacgggacagtcaggcgagatagccagtgagctcgcaccagagggtgggcgtctcccccaggggcggagcttcgaggtggcgaggggcgtggcttggctgtcaggtctcttcgccttttgttcggttactgagttgctgccttggccagagtccggagcagccgccgcccgaccgcgccgagctcagttcgctgtccgcgccggctcccaccccggcccgaccccgacccggcccggtcaggccccatactcagtagccacgatggaggtgatgaacctgatggagcagcctatcaaggtgactgagtggcagcagacatacacctacgactcgggtatccactcgggcgccaacacctgcgtgccctccgtcagcagcaagggcatcatggaggaggatgaggcctgcgggcgccagtacacgctcaagaaaaccaccacttacacccagggggtgccccccagccaaggtgacctggagtaccagatgtccacaacagccagggccaaacgggtgcgggaggccatgtgccctggtgtgtcaggcgaggacagctcgcttctgctggccacccaggtggaggggcaggccaccaacctgcagcgactggccgagccgtcccagctgctcaagtcggccattgtgcatctcatcaactaccaggacgatgccgagctggccactcgcgccctgcccgagctcaccaaactgctcaacgacgaggacccggtggtggtgaccaaggcggccatgattgtgaaccagctgtcgaagaaggaggcgtcgcggcgggccctgatgggctcgccccagctggtggccgctgtcgtgcgtaccatgcagaataccagcgacctggacacagcccgctgcaccaccagcatcctgcacaacctctcccaccaccgggaggggctgctcgccatcttcaagtcgggtggcatccctgctctggtccgcatgctcagctcccctgtggagtcggtcctgttctatgccatcaccacgctgcacaacctgctcctgtaccaggagggcgccaagatggccgtgcgcctggccgacgggctgcaaaagatggtgcccctgctcaacaagaacaaccccaagttcctggccatcaccaccgactgcctgcagctcctggcctacggcaaccaggagagcaagctgatcatcctggccaatggtgggccccaggccctcgtgcagatcatgcgtaactacagttatgaaaagctgctctggaccaccagtcgtgtgctcaaggtgctatccgtgtgtcccagcaataagcctgccattgtggaggctggtgggatgcaggccctgggcaagcacctgaccagcaacagcccccgcctggtgcagaactgcctgtggaccctgcgcaacctctcagatgtggccaccaagcaggagggcctggagagtgtgctgaagattctggtgaatcagctgagtgtggatgacgtcaacgtcctcacctgtgccacgggcacactctccaacctgacatgcaacaacagcaagaacaagacgctggtgacacagaacagcggtgtggaggctctcatccatgccatcctgcgtgctggtgacaaggacgacatcacggagcctgccgtctgcgctctgcgccacctcactagccgccaccctgaggccgagatggcccagaactctgtgcgtctcaactatggcatcccagccatcgtgaagctgctcaaccagcccaaccagtggccactggtcaaggcaaccatcggcttgatcaggaatctggccctgtgcccagccaaccatgccccgctgcaggaggcagcggtcatcccccgcctcgtccaactgctggtgaaggcccaccaggatgcccagcgccacgtagctgcaggcacacagcagccctacacggatggtgtgaggatggaggagattgtggagggctgcaccggagcactgcacatcctcgcccgggaccccatgaaccgcatggagatcttccggctcaacaccattcccctgtttgtgcagctcctgtactcgtcggtggagaacatccagcgcgtggctgccggggtgctgtgtgagctggcccaggacaaggaggcggccgacgccattgatgcagagggggcctcggccccactcatggagttgctgcactcccgcaacgagggcactgccacctacgctgctgccgtcctgttccgcatctccgaggacaagaacccagactaccggaagcgcgtgtccgtggagctcaccaactccctcttcaagcatgacccggctgcctgggaggctgcccagagcatgattcccatcaatgagccctatggagatgacatggatgccacctaccgccccatgtactccagcgatgtgccccttgacccgctggagatgcacatggacatggatggagactaccccatcgacacctacagcgacggcctcaggcccccgtaccccactgcagaccacatgctggcctaggcggcctggccccagtgcggttcctcatctgagaggctctccgtgcaggcgatggggcaagacagaaaagtgcctgagctggggaagccggggtgtaacttcctgctgcaccctgcgcctccagaggtcctccgtagggtctttcttgggatagtgttctgctcctgcttttctgtcctgggcatgggtccagggcctgacaccccctccccgcccctgtggccctggccactaaagcttcagactcaagtacccattctgttttcccccagcaacgcccctccaaacctccagcctccctgtctccagctgcctgggcccggaagggctttggttccttctctgggtctgattttctcactgaactccaccgaccaactgccctaagcccccagggcctccagggcccaggttcgagacccaaacccccaaaatccaaaacttctcttgaaaagttcagggaccgtccaggggagatggggaggagatatggagtgagtcacctgctccagaagatgccagcttctctctccagggtgcttagttggctttgcccacccctcactccccagggagctccggggacagcttcctcacacccctgtcccacccacacagctgccctagctgaccccgagaagtgctcttggctgacccctctggtgtgtggtgaggggctttctcttccccttcctgtttcagacccccccatttcccgcacatggtgtggggggctgggggaggtccaagcagagtgttttattattatcgctttatgtttttggttattggtttttttgtatagaccaaagcaaagaaaataaaaataacacag

SEQ ID NO: 73690 - DNA, 3951 bp, Homo sapiens
tgtcccttcccttggtatccctatgacttacctgttggacaggtagggggaaggggagagtaatgagtctcacctgctcagagcaagggtggggcaagacacaccccatcccttccattggttttttccttagtcttactgacagagccttgtccaatcaggaggaagtaactttctatctgccaatagatgcaatgttaggatgagacctcaagttagagtccatccctagagccgactggcagtccccggggccaatggcaagcggataaacagaggcggccgtggaagaggactggaggcgaggctccgcccctccacgggacagtcaggcgagatagccagtgagctcgcaccagagggtgggcgtctcccccaggggcggagcttcgaggtggcgaggggcgtggcttggctgtcaggtctcttcgccttttgttcggttactgagttgctgccttggccagagtccggagcagccgccgcccgaccgcgccgagctcagttcgctgtccgcgccggctcccaccccggcccgaccccgacccggcccggtcaggccccatactcagtagccacgatggaggtgatgaacctgatggagcagcctatcaaggtgactgagtggcagcagacatacacctacgactcgggtatccactcgggcgccaacacctgcgtgccctccgtcagcagcaagggcatcatggaggaggatgaggcctgcgggcgccagtacacgctcaagaaaaccaccacttacacccagggggtgccccccagccaaggtgacctggagtaccagatgtccacaacagccagggccaaacgggtgcgggaggccatgtgccctggtgtgtcaggcgaggacagctcgcttctgctggccacccaggtggaggggcaggccaccaacctgcagcgactggccgagccgtcccagctgctcaagtcggccattgtgcatctcatcaactaccaggacgatgccgagctggccactcgcgccctgcccgagctcaccaaactgctcaacgacgaggacccggtggtggtgaccaaggcggccatgattgtgaaccagctgtcgaagaaggaggcgtcgcggcgggccctgatgggctcgccccagctggtggccgctgtcgtgcgtaccatgcagaataccagcgacctggacacagcccgctgcaccaccagcatcctgcacaacctctcccaccaccgggaggggctgctcgccatcttcaagtcgggtggcatccctgctctggtccgcatgctcagctcccctgtggagtcggtcctgttctatgccatcaccacgctgcacaacctgctcctgtaccaggagggcgccaagatggccgtgcgcctggccgacgggctgcaaaagatggtgcccctgctcaacaagaacaaccccaagttcctggccatcaccaccgactgcctgcagctcctggcctacggcaaccaggagagcaagctgatcatcctggccaatggtgggccccaggccctcgtgcagatcatgcgtaactacagttatgaaaagctgctctggaccaccagtcgtgtgctcaaggtgctatccgtgtgtcccagcaataagcctgccattgtggaggctggtgggatgcaggccctgggcaagcacctgaccagcaacagcccccgcctggtgcagaactgcctgtggaccctgcgcaacctctcagatgtggccaccaagcaggagggcctggagagtgtgctgaagattctggtgaatcagctgagtgtggatgacgtcaacgtcctcacctgtgccacgggcacactctccaacctgacatgcaacaacagcaagaacaagacgctggtgacacagaacagcggtgtggaggctctcatccatgccatcctgcgtgctggtgacaaggacgacatcacggagcctgccgtctgcgctctgcgccacctcactagccgccaccctgaggccgagatggcccagaactctgtgcgtctcaactatggcatcccagccatcgtgaagctgctcaaccagcccaaccagtggccactggtcaaggcaaccatcggcttgatcaggaatctggccctgtgcccagccaaccatgccccgctgcaggaggcagcggtcatcccccgcctcgtccaactgctggtgaaggcccaccaggatgcccagcgccacgtagctgcaggcacacagcagccctacacggatggtgtgaggatggaggagattgtggagggctgcaccggagcactgcacatcctcgcccgggaccccatgaaccgcatggagatcttccggctcaacaccattcccctgtttgtgcagctcctgtactcgtcggtggagaacatccagcgcgtggctgccggggtgctgtgtgagctggcccaggacaaggaggcggccgacgccattgatgcagagggggcctcggccccactcatggagttgctgcactcccgcaacgagggcactgccacctacgctgctgccgtcctgttccgcatctccgaggacaagaacccagactaccggaagcgcgtgtccgtggagctcaccaactccctcttcaagcatgacccggctgcctgggaggctgcccagagcatgattcccatcaatgagccctatggagatgacatggatgccacctaccgccccatgtactccagcgatgtgccccttgacccgctggagatgcacatggacatggatggagactaccccatcgacacctacagcgacggcctcaggcccccgtaccccactgcagaccacatgctggcctaggcggcctggccccagtgacggccccctctttgcaggcttttcctcctctctagaacctccttctgttggaggccctcccatctccccgctgaaacctgcgctccttttttggggggatcctttgctgctgagcttccccaagcacggtgtgccctggcctgccttcttcttgtgtctttggtggggatggggaggcctattcctgctggccccttctgggggtggtgggcaggtgacacggagtggcttgagcttctggggatgcaggtccaccgagcccctgacccctgtctgtccccgctcccctaacaggtgcggttcctcatctgagaggctctccgtgcaggcgatggggcaagacagaaaagtgcctgagctggggaagccggggtgtaacttcctgctgcaccctgcgcctccagaggtcctccgtagggtctttcttgggatagtgttctgctcctgcttttctgtcctgggcatgggtccagggcctgacaccccctccccgcccctgtggccctggccactaaagcttcagactcaagtacccattctgttttcccccagcaacgcccctccaaacctccagcctccctgtctccagctgcctgggcccggaagggctttggttccttctctgggtctgattttctcactgaactccaccgaccaactgccctaagcccccagggcctccagggcccaggttcgagacccaaacccccaaaatccaaaacttctcttgaaaagttcagggaccgtccaggggagatggggaggagatatggagtgagtcacctgctccagaagatgccagcttctctctccagggtgcttagttggctttgcccacccctcactccccagggagctccggggacagcttcctcacacccctgtcccacccacacagctgccctagctgaccccgagaagtgctcttggctgacccctctggtgtgtggtgaggggctttctcttccccttcctgtttcagacccccccatttcccgcacatggtgtggggggctgggggaggtccaagcagagtgttttattattatcgctttatgtttttggttattggtttttttgtatagaccaaagcaaagaaaataaaaataacacag

SEQ ID NO: 73691 - DNA, 3443 bp, Homo sapiens
tgtcccttcccttggtatccctatgacttacctgttggacaggtagggggaaggggagagtaatgagtctcacctgctcagagcaagggtggggcaagacacaccccatcccttccattggttttttccttagtcttactgacagagccttgtccaatcaggaggaagtaactttctatctgccaatagatgcaatgttaggatgagacctcaagttagagtccatccctagagccgactggcagtccccggggccaatggcaagcggataaacagaggcggccgtggaagaggactggaggcgaggctccgcccctccacgggacagtcaggcgagatagccagtgagctcgcaccagaggtagccacgatggaggtgatgaacctgatggagcagcctatcaaggtgactgagtggcagcagacatacacctacgactcgggtatccactcgggcgccaacacctgcgtgccctccgtcagcagcaagggcatcatggaggaggatgaggcctgcgggcgccagtacacgctcaagaaaaccaccacttacacccagggggtgccccccagccaaggtgacctggagtaccagatgtccacaacagccagggccaaacgggtgcgggaggccatgtgccctggtgtgtcaggcgaggacagctcgcttctgctggccacccaggtggaggggcaggccaccaacctgcagcgactggccgagccgtcccagctgctcaagtcggccattgtgcatctcatcaactaccaggacgatgccgagctggccactcgcgccctgcccgagctcaccaaactgctcaacgacgaggacccggtggtggtgaccaaggcggccatgattgtgaaccagctgtcgaagaaggaggcgtcgcggcgggccctgatgggctcgccccagctggtggccgctgtcgtgcgtaccatgcagaataccagcgacctggacacagcccgctgcaccaccagcatcctgcacaacctctcccaccaccgggaggggctgctcgccatcttcaagtcgggtggcatccctgctctggtccgcatgctcagctcccctgtggagtcggtcctgttctatgccatcaccacgctgcacaacctgctcctgtaccaggagggcgccaagatggccgtgcgcctggccgacgggctgcaaaagatggtgcccctgctcaacaagaacaaccccaagttcctggccatcaccaccgactgcctgcagctcctggcctacggcaaccaggagagcaagctgatcatcctggccaatggtgggccccaggccctcgtgcagatcatgcgtaactacagttatgaaaagctgctctggaccaccagtcgtgtgctcaaggtgctatccgtgtgtcccagcaataagcctgccattgtggaggctggtgggatgcaggccctgggcaagcacctgaccagcaacagcccccgcctggtgcagaactgcctgtggaccctgcgcaacctctcagatgtggccaccaagcaggagggcctggagagtgtgctgaagattctggtgaatcagctgagtgtggatgacgtcaacgtcctcacctgtgccacgggcacactctccaacctgacatgcaacaacagcaagaacaagacgctggtgacacagaacagcggtgtggaggctctcatccatgccatcctgcgtgctggtgacaaggacgacatcacggagcctgccgtctgcgctctgcgccacctcactagccgccaccctgaggccgagatggcccagaactctgtgcgtctcaactatggcatcccagccatcgtgaagctgctcaaccagcccaaccagtggccactggtcaaggcaaccatcggcttgatcaggaatctggccctgtgcccagccaaccatgccccgctgcaggaggcagcggtcatcccccgcctcgtccaactgctggtgaaggcccaccaggatgcccagcgccacgtagctgcaggcacacagcagccctacacggatggtgtgaggatggaggagattgtggagggctgcaccggagcactgcacatcctcgcccgggaccccatgaaccgcatggagatcttccggctcaacaccattcccctgtttgtgcagctcctgtactcgtcggtggagaacatccagcgcgtggctgccggggtgctgtgtgagctggcccaggacaaggaggcggccgacgccattgatgcagagggggcctcggccccactcatggagttgctgcactcccgcaacgagggcactgccacctacgctgctgccgtcctgttccgcatctccgaggacaagaacccagactaccggaagcgcgtgtccgtggagctcaccaactccctcttcaagcatgacccggctgcctgggaggctgcccagagcatgattcccatcaatgagccctatggagatgacatggatgccacctaccgccccatgtactccagcgatgtgccccttgacccgctggagatgcacatggacatggatggagactaccccatcgacacctacagcgacggcctcaggcccccgtaccccactgcagaccacatgctggcctaggcggcctggccccagtgcggttcctcatctgagaggctctccgtgcaggcgatggggcaagacagaaaagtgcctgagctggggaagccggggtgtaacttcctgctgcaccctgcgcctccagaggtcctccgtagggtctttcttgggatagtgttctgctcctgcttttctgtcctgggcatgggtccagggcctgacaccccctccccgcccctgtggccctggccactaaagcttcagactcaagtacccattctgttttcccccagcaacgcccctccaaacctccagcctccctgtctccagctgcctgggcccggaagggctttggttccttctctgggtctgattttctcactgaactccaccgaccaactgccctaagcccccagggcctccagggcccaggttcgagacccaaacccccaaaatccaaaacttctcttgaaaagttcagggaccgtccaggggagatggggaggagatatggagtgagtcacctgctccagaagatgccagcttctctctccagggtgcttagttggctttgcccacccctcactccccagggagctccggggacagcttcctcacacccctgtcccacccacacagctgccctagctgaccccgagaagtgctcttggctgacccctctggtgtgtggtgaggggctttctcttccccttcctgtttcagacccccccatttcccgcacatggtgtggggggctgggggaggtccaagcagagtgttttattattatcgctttatgtttttggttattggtttttttgtatagaccaaagcaaagaaaataaaaataacacag

SEQ ID NO: 73692 - DNA, 445 bp, Homo sapiens
gaagcggctctgaggccggaagtgagcctagagcgccgcggccccgagatgaagccggcggtggacgagatgttccccgagggcgccgggccctacgtggacctggacgaggcgggaggcagcaccgggctcttgatggacttggcagccaatgaaaaggccgttcatgcagacttttttaacgattttgaagatctttttgatgatgatgacatccagtgagatgccctctggctgcaggcggggccaagcccttggtacagagccgcagtgtgagcctgcgcaggacagtttcaggtggttttaaagaacacgtggaaatcccttgaatttaggacctggttaaccagaaagataagactgttcttaacgacctagatgattctgttcatctctgaacgggatcaggttttgtcctcactccaattaaaagaaagcaatgtca

SEQ ID NO: 73693 - DNA, 1214 bp, Homo sapiens
  misc_feature (470)..(470): n is a, c, g, or t
  misc_feature (481)..(481): n is a, c, g, or t
gaagcggctctgaggccggaagtgagcctagagcgccgcggccccgagatgaagccggcggtggacgagatgttccccgagggcgccgggccctacgtggacctggacgaggcgggaggcagcaccgggctcttgatggacttggcagccaatgaaaaggccgttcatgcagacttttttaacgattttgaagatctttttgatgatgatgacatccagtgagatgccctctggctgcaggcggggccaagcccttggtacagagccgcagtgtgagcctgcgcaggacagtttcaggtggttttaaagaacacgtggaaatcccttgaatttaggacctggttaaccagaaagataagactgttcttaacgacctagatgattctgttcatctctgaacgggatcaggttttgtcctcactccaattaaaagaaagcaatgtcaaaaaaaaaaaaaaaaaaaaaaaaanaaaaaaaaaanaaaaaaaaaaaaaagggggggggggaaaaaatttccccgggggggggcccccaaccctagccggctacccccgatttgtggtgaacaagagggggcccctaaaggagggggcggctcgataataaaggacgacgaacaagaccaggggccgcgaggcggtaacaacaccgctccgtcgaggggggcacacacgccggcacgaccgggcgaccatcttcgcggaaagaagacaaccacactcaacgcgggcgcggggcaaccacaagggggcacacaacaccaccaaccggagagatgataacagcccctgcaggggggaacaactactaacattttgagagagggggagtataagggtggcggtaaacacaacaacggcgagtaatatatggcaggcggcggcaaggacaaaaatgttgcggcgcctagggggggaattattatttgatgagcaacactattattactaccccggcggggcgctagcagtgaaaaaataaaagagagggacaactagaactaacaacataacaccaagcagccgcagcgaagccacaaagcgcaactaccaacgacagcaccacacagcgcacagcaacaaacacagaagcaaccgcaagtacctccgcaacccaccgtcaccgcaccgaagcacatacaccacgctaccacaacacatccacagacacactacaaagagcaacaacaacgacgacccccatcaaaacgcaaa

SEQ ID NO: 73694 - DNA, 475 bp, Homo sapiens
gaactaaaatgttgactccaacttgagcctgtttcccctcacccatcttctttttttgtgggggtagtggccctgcaatgcacttatcacctgttctttcggaaaacgcacctgacataaccttgcctttccattccccaggcgggaggcagcaccgggctcttgatggacttggcagccaatgaaaaggccgttcatgcagacttttttaacgattttgaagatctttttgatgatgatgacatccagtgagatgccctctggctgcaggcggggccaagcccttggtacagagccgcagtgtgagcctgcgcaggacagtttcaggtggttttaaagaacacgtggaaatcccttgaatttaggacctggttaaccagaaagataagactgttcttaacgacctagatgattctgttcatctctgaacgggatcaggttttgtcctcactccaattaaaagaaagcaatgtca

SEQ ID NO: 73695 - DNA, 499 bp, Homo sapiens
ttaggattgtcttttaaatgaaagctagaaagcactctagccaacactctccccttggactacatgtacgagccctggttggctgaaactgaaagtctgttacgggaaaagtcttttatttcattggatcattgacgattatctctgtattttggactactatataattcattctgaagtgatttcttcagcccttacccttgtaggtgtaactacgtggttttgcttatttccctagattttgaagatctttttgatgatgatgacatccagtgagatgccctctggctgcaggcggggccaagcccttggtacagagccgcagtgtgagcctgcgcaggacagtttcaggtggttttaaagaacacgtggaaatcccttgaatttaggacctggttaaccagaaagataagactgttcttaacgacctagatgattctgttcatctctgaacgggatcaggttttgtcctcactccaattaaaagaaagcaatgtca

SEQ ID NO: 73696 - DNA, 400 bp, Homo sapiens
cgttcatgcagacttttttaacgattttgaagatctttttgatgatgatgacatccagtgagatgccctctggctgcaggcggggccaagcccttggtacagagccgcagtgtgagcctgcgcaggacagtttcaggtgattttgaagatctttttgatgatgatgacatccagtgagatgccctctggctgcaggcggggccaagcccttggtacagagccgcagtgtgagcctgcgcaggacagtttcaggtggttttaaagaacacgtggaaatcccttgaatttaggacctggttaaccagaaagataagactgttcttaacgacctagatgattctgttcatctctgaacgggatcaggttttgtcctcactccaattaaaagaaagcaatgtca

SEQ ID NO: 73697 - DNA, 1268 bp, Homo sapiens
  misc_feature (524)..(524): n is a, c, g, or t
  misc_feature (535)..(535): n is a, c, g, or t
ttaggattgtcttttaaatgaaagctagaaagcactctagccaacactctccccttggactacatgtacgagccctggttggctgaaactgaaagtctgttacgggaaaagtcttttatttcattggatcattgacgattatctctgtattttggactactatataattcattctgaagtgatttcttcagcccttacccttgtaggtgtaactacgtggttttgcttatttccctagattttgaagatctttttgatgatgatgacatccagtgagatgccctctggctgcaggcggggccaagcccttggtacagagccgcagtgtgagcctgcgcaggacagtttcaggtggttttaaagaacacgtggaaatcccttgaatttaggacctggttaaccagaaagataagactgttcttaacgacctagatgattctgttcatctctgaacgggatcaggttttgtcctcactccaattaaaagaaagcaatgtcaaaaaaaaaaaaaaaaaaaaaaaaanaaaaaaaaaanaaaaaaaaaaaaaagggggggggggaaaaaatttccccgggggggggcccccaaccctagccggctacccccgatttgtggtgaacaagagggggcccctaaaggagggggcggctcgataataaaggacgacgaacaagaccaggggccgcgaggcggtaacaacaccgctccgtcgaggggggcacacacgccggcacgaccgggcgaccatcttcgcggaaagaagacaaccacactcaacgcgggcgcggggcaaccacaagggggcacacaacaccaccaaccggagagatgataacagcccctgcaggggggaacaactactaacattttgagagagggggagtataagggtggcggtaaacacaacaacggcgagtaatatatggcaggcggcggcaaggacaaaaatgttgcggcgcctagggggggaattattatttgatgagcaacactattattactaccccggcggggcgctagcagtgaaaaaataaaagagagggacaactagaactaacaacataacaccaagcagccgcagcgaagccacaaagcgcaactaccaacgacagcaccacacagcgcacagcaacaaacacagaagcaaccgcaagtacctccgcaacccaccgtcaccgcaccgaagcacatacaccacgctaccacaacacatccacagacacactacaaagagcaacaacaacgacgacccccatcaaaacgcaaa

SEQ ID NO: 73698 - DNA, 413 bp, Homo sapiens
gcttgataagcatgtgtgcactggggcttgctctcttggagcacttctgccaccatgtgaagaagccaggatgaaagacctcatagagagagacccagctggcttagctggtccaaccatccaagctgagactgtagacatgtaagagaagttgtatgatatcatccagccccagctgaatacagggatgactacaaacacatgagttaggcttggcaagatcagcagaagaaactcaacaaaaatttggcgaaactgttgctgtttcaaggcactgtgttttggggtggtttgccacacagtaacaagtaacttacatatctttattttctaaggaaagtaaaaggccttttccccctttcagtacaacgacctaaaaataactgaccaaagcaattatagatcataagaca

SEQ ID NO: 73699 - DNA, 453 bp, Homo sapiens
taaaaaagagcctttaagttcggttgccatgaatcatgtataagccattggaggagaaaattaattcttttgtttgtttctttattttaaaataaataccaggctatggcacccgtttgtgatcagaattgagaagaagcactcttcctgccagcttgtgggaatgctgtgtcccccaaggccaacagtatatgctgccaatgagtgaaaagaactaagactcaagtctgcacagaaaaaggcccaacatgcatgcttcagttttgatcccagcttggcccttaattttccaaacccttgcagatggagagctacctattttgggactgtaaggtttttgaaattaactgtcaactcattatccaaggcacatactatcttacctctatcttaccttctaaatattttaaataacgcttttctcagccttctcttttggcatctctttcttaa

SEQ ID NO: 73700 - DNA, 1131 bp, Homo sapiens
tggattattcctttctctgcctctggtacctggcacatactaagtactcaacaaatgttagagtagatgtttctagaaaggataaaccagatgcttaacatatttaattccaaggggtaattttagaaattattgtaatcaatgagctaataatatgttttcatgtccctaaaggaacttgaagtctaaatgggcagacaagaccaacatacacaaagcagagagtggcacaagagccatgtctgatgcaacagtgactcaggaggatcactctgactcagaatggccaagcaaaggtattgggaggaagtgggatagaactgagctttgaagaccgtgctaaaatatttacagactccccaggttatctcaagttctctccaggaattagcttcacctctttgtgctttggctccacatcagttaaatagtggtaacgtttgatcgttaagaaccatgtagagatgaaacaattttcaaagttttttaattaagtgtactcattgccactcaaagacaaataccatataaatataataataatcatattgagaaacaaaatagcaatgatgcagatactcatgtactgtttcatgtttgtggtctttgaggggagtttttactcaaatatccctagatgaataaatacatatggtctataaatatgtcccaaagcaattttctccacttgaacctacatatacttcactatagaactgaaaacaaatttatttaaaacttcttttatgtggttgtctgttgaaaaaaaaatcagaactctcattaaagccaataagaatttggtataaaaaattaatagcaggatatgagcttatagaatcttatcaataatatctttatgattcattggtctctttgtgatgtgccaaacataaccaggatttattgatgaatatgatatttgggggtataaaaactttatatatgtttttctttactcaattagtgaatcttgtctaaattaatattgtcatgagatttcatttagcaatggccaggtatcatggccaaatagatactttgacttgaattatctgcctaaatgttctaattctccactttacttcacgaaactgaggaaattcagctgtaataaaaatcttaaatttg

SEQ ID NO: 73701 - DNA, 1231 bp, Homo sapiens
ataggaagagaagattaagacacagagataccagagaggtcgttcacagaggaaagaccatgtgaagacgcagtgagaaggtggccatattcaagctgaggagagagacctcagaagaaaccaatactgccaacgccttggtcttggacttccagcctccagaactgtcctggatcagaagatgcctgacaagaggccactatcagcagcaacagcacagtggggacaaacctgagaccttgatggaccgtggacaccagcaggagagacagaggaacttgaagtctaaatgggcagacaagaccaacatacacaaagcagagagtggcacaagagccatgtctgatgcaacagtgactcaggaggatcactctgactcagaatggccaagcaaaggtattgggaggaagtgggatagaactgagctttgaagaccgtgctaaaatatttacagactccccaggttatctcaagttctctccaggaattagcttcacctctttgtgctttggctccacatcagttaaatagtggtaacgtttgatcgttaagaaccatgtagagatgaaacaattttcaaagttttttaattaagtgtactcattgccactcaaagacaaataccatataaatataataataatcatattgagaaacaaaatagcaatgatgcagatactcatgtactgtttcatgtttgtggtctttgaggggagtttttactcaaatatccctagatgaataaatacatatggtctataaatatgtcccaaagcaattttctccacttgaacctacatatacttcactatagaactgaaaacaaatttatttaaaacttcttttatgtggttgtctgttgaaaaaaaaatcagaactctcattaaagccaataagaatttggtataaaaaattaatagcaggatatgagcttatagaatcttatcaataatatctttatgattcattggtctctttgtgatgtgccaaacataaccaggatttattgatgaatatgatatttgggggtataaaaactttatatatgtttttctttactcaattagtgaatcttgtctaaattaatattgtcatgagatttcatttagcaatggccaggtatcatggccaaatagatactttgacttgaattatctgcctaaatgttctaattctccactttacttcacgaaactgaggaaattcagctgtaataaaaatcttaaatttg

SEQ ID NO: 73702 - DNA, 416 bp, Homo sapiens
cacttctattttcatatactctacaaacacttgttcaacctaagcttttctctcttctgtagtcaagtgtctataaacaacacttgggatcctagtttaaaaaacaaagttttagtctttatgataaaaatattaacataaatggataatgattatttcctcctcaccatgttagtttctcttggccagcagccctaaatatgtcgtattaactttaaatagtagggtccagattctaagacagtgtttcccaaatgacatcaagagatgtaagtactgtccctaaatgtgtgttgaacaatcaaatacagttggaaacactgctcgctcaattgccatccagaaaactgatggaaaatagcctatcgaaggctgtaaaaaaaagtcctgcaataaatgtttagcttcatttactc

SEQ ID NO: 73703 - DNA, 338 bp, Homo sapiens
atttctggctacagtttcaatatttaagaaaataaaaaatagacaaacagatggaaattttagcagccattttctaaacaacattttagtgactttataataatcatatagctacattatattattaaacttgatgatactaggttattttattcatgttatttttatattttccccttactgacacttaatatttattacatattgacaatcttctaagtactaaaacattatttcatttaataatcataaaaccaaacatgctattgtgttattacaaactgcagaataggaaaccgggaccctgaggagtttaagtaaattctccagagtcagaa

SEQ ID NO: 73704 - DNA, 599 bp, Homo sapiens
ctttttcttcccagtctccggtatgtcattatcagcagtgtgaaaatggactcactcccaccctgtctggatctggacaagagcccaccaccccgttggcagtagtcaggcagctctgcttctaagaacctgcagcttttggaagaaaggcaccctgtggtttcagaagcccaagagtccctgcagctcagcacccccagcctggtgcttggcagatgactgcctcctcacttagcagagggagcagaaaactgtgtattcttcagaacatcatgataacctggcactcatgggtctatggagagaattcagggggtctgggagcttggatggaataaatttgcatctttattttcaggaaagttttactgaagtttagcattttctttcattataaatggaatcagtataacccaatagtatgagcagttacttctccgcaacatcaaagtggctgcagatatctcaaaatagtatttacatttatcataacttagaaatttgggtggtaattaaaccagcaactattctttgtttaatgcattaagaaagaagtatgtatactatcatatctcaattaaaaatattttaagaactgg

SEQ ID NO: 73705 - DNA, 441 bp, Homo sapiens
gtctcatttccctgcaaatgtctgccttcgtgcaggtgattctgtagaaaggagtttctccaataaagcagagcttctctttcaactccatggacatcagagagagtccctttcaaaaaaggaggctcaggtctggagagacaaaggcctctactttcgaaaaggcctcttggatcaagcccagaccctcatcagagctgacaacatgtccagcctgcactactgcaagaacttctttgtctatggtagtgtggtcaactgaagaagccggcttagttgctccagtcaggtgctcacactaagaaaggatgggtgaaggttataaagtggctgtgaatgagaactcggtctgggctctaccaagcagagaagccatgcagagatgagaaaggtgaaagccatgaaaccatgttaagcagaaaaataaaaattcataacaga

SEQ ID NO: 73706 - DNA, 494 bp, Homo sapiens
tttccatggaaattctgtgtaccctaagctatgaaagcatcactgcagaactatttggattgccactgctggggcccactggtttcactaatgcaggaacaatttataggtgaatttatcaacttcgggggttttggtattatacttcaaatgtccatttggaatgcactcctacatgtggtacaggactgtggttctgacttcttgtaagtaacccctgattcttcttaacattttcattagccagtgggtgacatctttctagttcctattttacacacagagatgtcctttgtgactcccagctttaagcaggtagctcaattctaattctctgcacatttgtgccctgtggcctagaattcacctcacactcatgattagagccttagtcccccaactgcaaagccacacagcttcaatttctgttcactccctcactttaaatttcttcttcatttttgtcacataataaatttattttctggtttgag

SEQ ID NO: 73707 - DNA, 485 bp, Homo sapiens
ccatttttcgctttcttaatttttaaaaattaatgaggtttttgttgctattatatataatcagacaaaaagctataaaggaaaaaaagaattagtccacagacaagttttggttggagtccgacatttcacaagctgtgtattggccataagatggagtgtcgagtgaatagatgccacagaaatggcctttgaatggcgaatgaatgaagttgacacaagttcagaacgggtttttccattactatcgtttggaatacagtgtggccaaagccaaggcaactggtcactgtgactggaaattgtagccctggctgattgtggtatgagactgctaatatgaattctaaaatctcactttaatgcagcaaagcctatttcttgaagtggttggggagaaagtacagcacatgaaaatgatagagaattcacatttcagtgtatgtaaataaagacttactggagtgcagccacacttatgtgta

SEQ ID NO: 73708 - DNA, 835 bp, Homo sapiens
agcacaatcagaactcactgcagtctcaaactcccagctggtctcaagcaatcctcccaactcagcctcctgagtagctgggacaacaggtgcacaccaccactcaaggctaattttctttttatttttggtagagataaggtcttactatgttgcccaggctgatctcaaactcctggcctcaagtgatttttctgccttggcctcccaaagcactgggattataagtatggccactgttaccagccttagatcattttttttaatacagatagcttcccaactaaaaatattttattagaattctctgaattcagcaaagcaatgttattactgacccagtcttcacttattttcagctgacatggaagaacaaaattacctttatttttaaatttattttattttatattttcaaggtgcaaagtatgttgttttgagacacatatacataatgaaatgattactataatgaagaaaattaacaaatctatcatatcacttagctgtgcttcttttttatgataagaacaccaaaaatctagtccctcagaatatttcccaaaaacaatacattatcaaatatgcctacaggttgtacatcagattcacttattctactacgcctttacaacttttgcccttcatttacctatttccttcccaccaatgtaaccaccttttttaatgtattgaacttttaaaaatagatttcaaatatgagtggaaccatgaaaaaccacaacaaaacaaaacaaccaaaacactacaacaaaaacaacacacacacacacaacaaacacaaataatcgaccacacccaaaaacagcataca

SEQ ID NO: 73709 - DNA, 1510 bp, Homo sapiens
  misc_feature (5)..(5): n is a, c, g, or t
agcanatcggtactcacgccctatgaaactgtgcgaaccagacccggcagccttgctcagttcagcatagcggagcggatccgatcggatcggagcggatcggagcacaccggagcaggctcatcgagaaggcgtctgcgagaccatggagaacggatacacctatgaagattataagaacactgcagaatggcttctgtctcacactaagcaccgacctcaagttgcaataatctgtggttctggattaggaggtctgactgataaattaactcaggcccagatctttgactacggtgaaatccccaactttccccgaagtacagtgccaggtcatgctggccgactggtgtttgggttcctgaatggcagggcctgtgtgatgatgcagggcaggttccacatgtatgaagggtacccactctggaaggtgacattcccagtgagggttttccaccttctgggtgtggacaccctggtagtcaccaatgcagcaggagggctgaaccccaagtttgaggttggagatatcatgctgatccgtgaccatatcaacctacctggtttcagtggtcagaaccctctcagagggcccaatgatgaaaggtttggagatcgtttccctgccatgtctgatgcctacgaccggactatgaggcagagggctctcagtacctggaaacaaatgggggagcaacgtgagctacaggaaggcacctatgtgatggtggcaggccccagctttgagactgtggcagaatgtcgtgtgctgcagaagctgggagcagacgctgttggcatgagtacagtaccagaagttatcgttgcacggcactgtggacttcgagtctttggcttctcactcatcactaacaaggtcatcatggattatgaaagcctggagaaggccaaccatgaagaagtcttagcagctggcaaacaagctgcacagaaattggaacagtttgtctccattcttatggccagcattccactccctgacaaagccagttgacctgccttggagtcgtctggcatctcccacacaagacccaagtagctgctaccttctttggccccttgctggagtcatgtgcctctgtccttaggttgtagcagaaaggaaaagattcctgtccttcacctttcccactttcttctaccagacccttctggtgccagatcctcttctcaaagctgggattacaggtgtgagcatagtgagaccttggcgctacaaaataaagctgttctcattcctgttctttcttacacaagagctggagcccgtgccctaccacacatctgtggagatgcccaggatttgactcgggccttagaactttgcatagcagctgctactagctctttgagataatacattccgaggggctcagttctgccttatctaaatcaccagagaccaaacaaggactaatccaatacctcttggattttatttaatgtcataatgttgtcagaataaagagaaagatgaaataatttcatt

SEQ ID NO: 73710 - DNA, 922 bp, Homo sapiens
  misc_feature (802)..(802): n is a, c, g, or t
gctggtacagggccgcggaagtcctttggatactgtgcgaaccagacccggcagccttgctcagttcagcatagcggagcggatccgatcggatcggagcggatcggagcacaccggagcaggctcatcgagaaggcgtctgcgagaccatggagaacggatacacctatgaagattataagaacactgcagaatggcttctgtctcacactaagcaccgacctcaagttgcaataatctgtggttctggattaggaggtctgactgataaattaactcaggcccagatctttgactacggtgaaatccccaactttccccgaagtacagtgccaggtcatgctggccgactggtgtttgggttcctgaatggcagggcctgtgtgatgatgcagggcaggttccacatgtatgaagggtacccactctggaaggtgacattcccagtgagggttttccaccttctgggtgtggacaccctggtagtcaccaatgcagcaggagggctgaaccccaagtttgaggttggagatatcatgctgatccgtgaccatatcaacctacctggtttcagtggtcagaaccctctcagagggcccaatgatgaaaggtttggagatcgtttccctgccatgtctgatgcctacgaccggactatgaggcagagggctctcagtacctggaaacaaatgggggagcaacgtgagctacaggaaggcacctatgtgatggtggcaggccccagctttgagactgtggcagaatgtcgtgtgctgcagaagctgggagcagacgctgttgncctgcctccgctccagacgttctcgtgcccggcctgggcttcccgtcttgggctctccccctcccacccggtcccccggttctgccgccggaacggcccctgagggttccgccgggcccc

SEQ ID NO: 73711 - DNA, 628 bp, Homo sapiens
aggagggcaccaggcccgcaggacccttggggaggggcaggtgctgtgacccgggaacctggcacactgggcccagagggagctggcggagggagcgagcgcccagaggatgcagagaggcctggcactgagcctagtgtcgggagcaaggcggcagagtcatgcggcagccagcgcgggcagggacgcacgcgggaatcgagctggggtggcgccaccggagcaggaaggggacaggtcggtgcggtctaagctactccgtaaaagcagccgttgtgtgtctccgtgtgtgtgttaggggaacaagtggagagtgagtatatgtatatatccctcactccataccaggaggaggtctcctcaccccctgcgctcttcataaattcccatgctagggtctgggtaaagctgcgaggtacttttggtgctcaaattcggagttcctcctttagaggcaagattactcacctcctttgccagttgcactcctcccttccttccagactggcagtatgattaactcggtgggaagtgactgctaagtggagacggaaatcagtcaccgaactgagcaacagtcctgtgctcacttcccccaccccacgcctttgaaaactcttctctcggc

SEQ ID NO: 73712 - DNA, 1514 bp, Homo sapiens
gctggtacagggccgcggaagtcctttggatactgtgcgaaccagacccggcagccttgctcagttcagcatagcggagcggatccgatcggatcggagcggatcggagcacaccggagcaggctcatcgagaaggcgtctgcgagaccatggagaacggatacacctatgaagattataagaacactgcagaatggcttctgtctcacactaagcaccgacctcaagttgcaataatctgtggttctggattaggaggtctgactgataaattaactcaggcccagatctttgactacggtgaaatccccaactttccccgaagtacagtgccaggtcatgctggccgactggtgtttgggttcctgaatggcagggcctgtgtgatgatgcagggcaggttccacatgtatgaagggtacccactctggaaggtgacattcccagtgagggttttccaccttctgggtgtggacaccctggtagtcaccaatgcagcaggagggctgaaccccaagtttgaggttggagatatcatgctgatccgtgaccatatcaacctacctggtttcagtggtcagaaccctctcagagggcccaatgatgaaaggtttggagatcgtttccctgccatgtctgatgcctacgaccggactatgaggcagagggctctcagtacctggaaacaaatgggggagcaacgtgagctacaggaaggcacctatgtgatggtggcaggccccagctttgagactgtggcagaatgtcgtgtgctgcagaagctgggagcagacgctgttggcatgagtacagtaccagaagttatcgttgcacggcactgtggacttcgagtctttggcttctcactcatcactaacaaggtcatcatggattatgaaagcctggagaaggccaaccatgaagaagtcttagcagctggcaaacaagctgcacagaaattggaacagtttgtctccattcttatggccagcattccactccctgacaaagccagttgacctgccttggagtcgtctggcatctcccacacaagacccaagtagctgctaccttctttggccccttgctggagtcatgtgcctctgtccttaggttgtagcagaaaggaaaagattcctgtccttcacctttcccactttcttctaccagacccttctggtgccagatcctcttctcaaagctgggattacaggtgtgagcatagtgagaccttggcgctacaaaataaagctgttctcattcctgttctttcttacacaagagctggagcccgtgccctaccacacatctgtggagatgcccaggatttgactcgggccttagaactttgcatagcagctgctactagctctttgagataatacattccgaggggctcagttctgccttatctaaatcaccagagaccaaacaaggactaatccaatacctcttggattttatttaatgtcataatgttgtcagaataaagagaaagatgaaataatttcatt

SEQ ID NO: 73713 - DNA, 1591 bp, Homo sapiens
aggagggcaccaggcccgcaggacccttggggaggggcaggtgctgtgacccgggaacctggcacactgggcccagagggagctggcggagggagcgagcgcccagaggatgcagagaggcctggcactgagcctagtgtcgggagcaaggcggcagagtcatgcggcagccagcgcgggcagggacgcacgcgggaatcgagctggggtggcgccaccggagcaggaaggggacagatacacctatgaagattataagaacactgcagaatggcttctgtctcacactaagcaccgacctcaagttgcaataatctgtggttctggattaggaggtctgactgataaattaactcaggcccagatctttgactacggtgaaatccccaactttccccgaagtacagtgccaggtcatgctggccgactggtgtttgggttcctgaatggcagggcctgtgtgatgatgcagggcaggttccacatgtatgaagggtacccactctggaaggtgacattcccagtgagggttttccaccttctgggtgtggacaccctggtagtcaccaatgcagcaggagggctgaaccccaagtttgaggttggagatatcatgctgatccgtgaccatatcaacctacctggtttcagtggtcagaaccctctcagagggcccaatgatgaaaggtttggagatcgtttccctgccatgtctgatgcctacgaccggactatgaggcagagggctctcagtacctggaaacaaatgggggagcaacgtgagctacaggaaggcacctatgtgatggtggcaggccccagctttgagactgtggcagaatgtcgtgtgctgcagaagctgggagcagacgctgttggcatgagtacagtaccagaagttatcgttgcacggcactgtggacttcgagtctttggcttctcactcatcactaacaaggtcatcatggattatgaaagcctggagaaggccaaccatgaagaagtcttagcagctggcaaacaagctgcacagaaattggaacagtttgtctccattcttatggccagcattccactccctgacaaagccagttgacctgccttggagtcgtctggcatctcccacacaagacccaagtagctgctaccttctttggccccttgctggagtcatgtgcctctgtccttaggttgtagcagaaaggaaaagattcctgtccttcacctttcccactttcttctaccagacccttctggtgccagatcctcttctcaaagctgggattacaggtgtgagcatagtgagaccttggcgctacaaaataaagctgttctcattcctgttctttcttacacaagagctggagcccgtgccctaccacacatctgtggagatgcccaggatttgactcgggccttagaactttgcatagcagctgctactagctctttgagataatacattccgaggggctcagttctgccttatctaaatcaccagagaccaaacaaggactaatccaatacctcttggattttatttaatgtcataatgttgtcagaataaagagaaagatgaaataatttcatt

SEQ ID NO: 73714 - DNA, 1654 bp, Homo sapiens
cagcttgccagtgttcagtggatccaacactggagttgggcctgttagtagaaacaggctttattaacttttgccaggctctagaatggaggtagtttcatatcagacttgtagtgggcttgattcagaaagaagggtggctgagtagatggaagagcatagtatggcctttccctctgtgccagcttctccgtccctgctgcctcagtatacctgccagcctttttgcaccgaaggtcatttgtctgtgatgcccttggaatgggagcagaattcaccttgatattttttctcccccagatacacctatgaagattataagaacactgcagaatggcttctgtctcacactaagcaccgacctcaagttgcaataatctgtggttctggattaggaggtctgactgataaattaactcaggcccagatctttgactacggtgaaatccccaactttccccgaagtacagtgccaggtcatgctggccgactggtgtttgggttcctgaatggcagggcctgtgtgatgatgcagggcaggttccacatgtatgaagggtacccactctggaaggtgacattcccagtgagggttttccaccttctgggtgtggacaccctggtagtcaccaatgcagcaggagggctgaaccccaagtttgaggttggagatatcatgctgatccgtgaccatatcaacctacctggtttcagtggtcagaaccctctcagagggcccaatgatgaaaggtttggagatcgtttccctgccatgtctgatgcctacgaccggactatgaggcagagggctctcagtacctggaaacaaatgggggagcaacgtgagctacaggaaggcacctatgtgatggtggcaggccccagctttgagactgtggcagaatgtcgtgtgctgcagaagctgggagcagacgctgttggcatgagtacagtaccagaagttatcgttgcacggcactgtggacttcgagtctttggcttctcactcatcactaacaaggtcatcatggattatgaaagcctggagaaggccaaccatgaagaagtcttagcagctggcaaacaagctgcacagaaattggaacagtttgtctccattcttatggccagcattccactccctgacaaagccagttgacctgccttggagtcgtctggcatctcccacacaagacccaagtagctgctaccttctttggccccttgctggagtcatgtgcctctgtccttaggttgtagcagaaaggaaaagattcctgtccttcacctttcccactttcttctaccagacccttctggtgccagatcctcttctcaaagctgggattacaggtgtgagcatagtgagaccttggcgctacaaaataaagctgttctcattcctgttctttcttacacaagagctggagcccgtgccctaccacacatctgtggagatgcccaggatttgactcgggccttagaactttgcatagcagctgctactagctctttgagataatacattccgaggggctcagttctgccttatctaaatcaccagagaccaaacaaggactaatccaatacctcttggattttatttaatgtcataatgttgtcagaataaagagaaagatgaaataatttcatt

SEQ ID NO: 73715 - DNA, 663 bp, Homo sapiens
  misc_feature (5)..(5): n is a, c, g, or t
agcanatcggtactcacgccctatgaaactgtgcgaaccagacccggcagccttgctcagttcagcatagcggagcggatccgatcggatcggagcggatcggagcacaccggagcaggctcatcgagaaggcgtctgcgagaccatggagaacggatacacctatgaagattataagaacactgcagaatggcttctgtctcacactaagcaccgacctcaagttgcaataatctgtggttctggattaggaggtctgactgataaattaactcaggcccagatctttgactacggtgaaatccccaactttccccgaagtacagtgccaggtcatgctggccgactggtgtttgggttcctgaatggcagggcctgtgtgatgatgcagggcaggttccacatgtatgaagggtacccactctggaaggtgacattcccagtgagggttttccaccttctgggtgtggacaccctggtagtcaccaatgcagcaggagggctgaaccccaagtttgaggttggagataatacattccgaggggctcagttctgccttatctaaatcaccagagaccaaacaaggactaatccaatacctcttggattttatttaatgtcataatgttgtcagaataaagagaaagatgaaataatttcatt

SEQ ID NO: 73716 - DNA, 1319 bp, Homo sapiens
aagctagtagagctggtgtaaatcggacgagggttgcaataatctgtggttctggattaggaggtctgactgataaattaactcaggcccagatctttgactacggtgaaatccccaactttccccgaagtacagtgccaggtcatgctggccgactggtgtttgggttcctgaatggcagggcctgtgtgatgatgcagggcaggttccacatgtatgaagggtacccactctggaaggtgacattcccagtgagggttttccaccttctgggtgtggacaccctggtagtcaccaatgcagcaggagggctgaaccccaagtttgaggttggagatatcatgctgatccgtgaccatatcaacctacctggtttcagtggtcagaaccctctcagagggcccaatgatgaaaggtttggagatcgtttccctgccatgtctgatgcctacgaccggactatgaggcagagggctctcagtacctggaaacaaatgggggagcaacgtgagctacaggaaggcacctatgtgatggtggcaggccccagctttgagactgtggcagaatgtcgtgtgctgcagaagctgggagcagacgctgttggcatgagtacagtaccagaagttatcgttgcacggcactgtggacttcgagtctttggcttctcactcatcactaacaaggtcatcatggattatgaaagcctggagaaggccaaccatgaagaagtcttagcagctggcaaacaagctgcacagaaattggaacagtttgtctccattcttatggccagcattccactccctgacaaagccagttgacctgccttggagtcgtctggcatctcccacacaagacccaagtagctgctaccttctttggccccttgctggagtcatgtgcctctgtccttaggttgtagcagaaaggaaaagattcctgtccttcacctttcccactttcttctaccagacccttctggtgccagatcctcttctcaaagctgggattacaggtgtgagcatagtgagaccttggcgctacaaaataaagctgttctcattcctgttctttcttacacaagagctggagcccgtgccctaccacacatctgtggagatgcccaggatttgactcgggccttagaactttgcatagcagctgctactagctctttgagataatacattccgaggggctcagttctgccttatctaaatcaccagagaccaaacaaggactaatccaatacctcttggattttatttaatgtcataatgttgtcagaataaagagaaagatgaaataatttcatt

SEQ ID NO: 73717 - DNA, 1820 bp, Homo sapiens
  misc_feature (5)..(5): n is a, c, g, or t
agcanatcggtactcacgccctatgaaactgtgcgaaccagacccggcagccttgctcagttcagcatagcggagcggatccgatcggatcggagcggatcggagcacaccggagcaggctcatcgagaaggcgtctgcgagaccatggagaacggatacacctatgaagattataagaacactgcagaatggcttctgtctcacactaagcaccgacctcaagttgcaataatctgtggttctggattaggaggtctgactgataaattaactcaggcccagatctttgactacggtgaaatccccaactttccccgaagtacagtgccaggtcatgctggccgactggtgtttgggttcctgaatggcagggcctgtgtgatgatgcagggcaggttccacatgtatgaagggtacccactctggaaggtaagtcagagggataggtccggttggatctggaagaggcaggagagaactatctagcctctttcactacctagctatctgggctaggtggatttttggtcctctccttccttttctttcacgatgtatgtcatgcatttcagtgtagctgaattaatgaaattttgtaaatttttttcggattgtttgcttcgaaggtgacattcccagtgagggttttccaccttctgggtgtggacaccctggtagtcaccaatgcagcaggagggctgaaccccaagtttgaggttggagatatcatgctgatccgtgaccatatcaacctacctggtttcagtggtcagaaccctctcagagggcccaatgatgaaaggtatgtatgttactccgttttttttaggtgggtaggatttaaagacttctctaggagctgtgggagaatttttaaaattccgtttatgtgagataattcaacctgtgtcctaggtttggagatcgtttccctgccatgtctgatgcctacgaccggactatgaggcagagggctctcagtacctggaaacaaatgggggagcaacgtgagctacaggaaggcacctatgtgatggtggcaggccccagctttgagactgtggcagaatgtcgtgtgctgcagaagctgggagcagacgctgttggcatgagtacagtaccagaagttatcgttgcacggcactgtggacttcgagtctttggcttctcactcatcactaacaaggtcatcatggattatgaaagcctggagaaggccaaccatgaagaagtcttagcagctggcaaacaagctgcacagaaattggaacagtttgtctccattcttatggccagcattccactccctgacaaagccagttgacctgccttggagtcgtctggcatctcccacacaagacccaagtagctgctaccttctttggccccttgctggagtcatgtgcctctgtccttaggttgtagcagaaaggaaaagattcctgtccttcacctttcccactttcttctaccagacccttctggtgccagatcctcttctcaaagctgggattacaggtgtgagcatagtgagaccttggcgctacaaaataaagctgttctcattcctgttctttcttacacaagagctggagcccgtgccctaccacacatctgtggagatgcccaggatttgactcgggccttagaactttgcatagcagctgctactagctctttgagataatacattccgaggggctcagttctgccttatctaaatcaccagagaccaaacaaggactaatccaatacctcttggattttatttaatgtcataatgttgtcagaataaagagaaagatgaaataatttcatt

SEQ ID NO: 73718 - DNA, 696 bp, Homo sapiens
atttttaaggagcaaattgacatttttgaaggaataaaggacagccaagctcagcggatggcagaaaatctaggcttcgttgggcctttgaaaagccaggctgcagatcaaatttcgaagctggataatctcttccctgaaaattgatgctactcaggtggaagtgaatccctttggtgaaactccagaaggacaagttgtctgttttgatgccaagataaactttgatgacaacgcagaattccgacaaaaagacatatttgctatggacgacaaatcagagaatgagcccattgaaaatgaagctgccaaatatgatctaaaatacataggactagatgggaacattgcctgctttgtgaatggtgctgggctcgccatggctacttgtgatatcattttccttaatggtgggaagccagccaacttcttggatcttggaggtggtgtaaaggaagctcaagtatatcaagcattcaaattgctcacagctgatcctaaggttgaagccatccttgtcaatatatttggtggtatcgtcaactgtgccatcattgcccatggggatcaccaaagcctgccggggagctaggaacttcaaggtgcccctggtggttccggcttgaagggaaccaacgtccaagaggcccaggaagattattcaatcaaccagcggacttccccattacttcagcc

SEQ ID NO: 73719 - DNA, 289 bp, Homo sapiens
tggctcattgcctcatttggtaaatggtctgtatcatttgaattgcaaaatgtaccacaattgtttatatctatgctgtgatgttctttgattctagtagtactgtcgtttgtttatcgtgaaatattttttatattatgagaaaagtaggagacagcaaactaacatctgactttatgccttgaatgattatttagctgtatcttttttaaggactttatcctgtttcctattggaaaattgtgcaggatgattgggatccggttaacttgtaaccaggattgtctgc

SEQ ID NO: 73720 - DNA, 866 bp, Homo sapiens
tcttgctcatctaaagctccgataggagctcactttctgtgggacattgtttttgtctttccagcacccattctacccctccctgaggtgtgggaggctgctccagctccccaggtggcccctgaatgggctaaggtggcaaccctctatctcttgccacaggcctgagccagtcttggcgttcctccagcctcagtgacaggttcaaggctgcccaatcacaagaagctcaggattttccctgaggattctgggacacagattatggcccttgttgtgactggatgacactgatgacatggggtgggggggtgggggtaaaagacagacctcaggtcctcagtgacatcagtaagccactgaatgaatcacctaaccctgagacctatcctacttctggactttttacaagtaaacggccaataaatcccaccacatcccttgttttgatgtttaggccattttgggttttttgttgttgttgttgctttcagccaaaggcatcgtaactaacaacatctgttgggtggaagagggagaaggatcaactgcactatatacactggtttttttatttgcattttctccaagggcttttaacttcagaaatgtacaagtgatatgactccactatactttaaaagaccacctctgagcaacagctcttcccatgtgtaagatgagaagtacctgtcctgtggcctctcggctggtcacaggcagaagtgaatgacatgagtgtgacaatgttttatgaactatagtcttatacagtgatgagaactgttttccaaatgatctcattttaaaacactagctttccagatgctaataaaatcttacttcattctcagtaaactatcgca

SEQ ID NO: 73721 - DNA, 376 bp, Homo sapiens
ggcagaggctgcagtgagtccagatggtgccactgcactccagcctgagtgacaaagtgacactccatctcaaaaccccaactccccccaaaatttttgatttggtttgcatttctttgattatgtttgaggtcgattgagacttgaggctggcactggagcaggcgttcccacctgtcccgtgagggcaaaggtcgtggggagtgaccaagtgcatcagggggtgcagatgccctattctggctctttcacgctcagccatcttagcatacgtgaatataccatgagctgtttctcagcttgttttattttcctggtgagatagatgtcactggaatggcctttctccaagtgaaaggccatcttgtgctatgac

SEQ ID NO: 73722 - DNA, 440 bp, Homo sapiens
agaagtaggaacaatagttcccagtgggtgaaaccctgggtgtaagactggttgcataattttcagggcccagtgaatattgagaatgtgtagcttgggcaatgtaatgagacttcatctctacaaataataaacaaaaaattagctgggtgtggtggcactctcttgtggtcccagctactcgggaggctgaggtgggagaatcacttgagcccaggtggttgaggctgcggtgagctatgatagcaccactgcattccagcctgggtgacagagcaagagagtgtggactcccttgttcaaaaattattaagaatttcaaaacagtgaaagcagagcatcaaaccaagctgggggcccttctaagcatgcccatgacatacagtcatgcgaccctggagctagtcctggctgggtaggagaagggggcatgcatgtgc

SEQ ID NO: 73723 - DNA, 560 bp, Homo sapiens
  misc_feature (12)..(12): n is a, c, g, or t
  misc_feature (476)..(476): n is a, c, g, or t
  misc_feature (546)..(546): n is a, c, g, or t
taatgaaccccnggctgcagaatcggcacgaggaaacctttgcatttattcatctggactcccccacattgcagatgacgagacgggtacagggaggtccagccactcatttcaacaggtcagccagtagtagcagagcggggatcagaagccagctgtcgggctgaggcaggtgccctttctccacttcaaagcttttcctttgtctggcagggatgatctctctgtgtgcgcaccatggtctcagcctcagtctttccctccccgctgtgtccctcggcctctctgtccaccttcctcagtgtgtctgtctccctctgtgactgtgtgtccgtgtgtcttgcaaggcccctggctgtctcactctcacgctgcacacacatgtctatgcgctctttttaaccccacatccattgctgatgccccaaatgaaatagccacagggattatccagtatcccatgtcccaggtgcccngagccactgctggatagtagctccactccttttatgggtaagataacaatatgccgtcaatacccacagncagcttctgtttaa

SEQ ID NO: 73724 - DNA, 159 bp, Homo sapiens
caacattttaaggtcagggatgtcatcaagaatccagatattttccatctgttgactctgtattcctcagtatgtctgccatgtctccctcacacttacaaggtggctgcggcagttccaggcatcacatggtaacaagatcacatccagtgaagaagg

SEQ ID NO: 73725 - DNA, 350 bp, Homo sapiens
ctctgcagtctcttgagtaggttggactataggtgtgggctaccacacctgtgtgctaggtccaatttttatagcaagttacaacgaatctctgtaactatctgggtttttctagaaattttggtcttctagcaatttgacctcccgtctctcaccccatctccaaattgatacattattgtgaagtaacagttgtgacaactgccttctctcattctttgttcccatggcattttcaaactactctcattctagtatttgtgacattatgccaaaattgcttgttttgttcttccttccatccaaactgtaagttccctggggatgtagacagtgtcttgatactattt

SEQ ID NO: 73726 - DNA, 319 bp, Homo sapiens
aagggaagaagccagatcctgagttttcactgagaagaggatttgaacaacacagtggtggtcaacagcagttattggaactgtagattgttggttttgggaacacctgtctaggttgttaagagccagtggaataggacatcctggaaatgaagaaacatcaaaatccaaggaatctgagagaatgggaacaaaaaaacacatgtagagatttatggaaaacttgagacacaggggaagaaggataaaaatagaactcagatttctggaggtggatgacatttaactttaataagtaaagggccctgtctctacaaaa

SEQ ID NO: 73727 - DNA, 315 bp, Homo sapiens
ccaaaattacaagactgtttctgaaaatattccgaaagaatgtttagaaaacatctttttccaggtagacagagagtttgtgaggctgcatcattggcatcattttatcatcaccatcccgctcaggagctcaagaagaggggaactgagtcagttagaattacagagaaaaaaacatagtatatataaggttctggagctgaaaaatacaatgaacaaagtgaaaagtgaaacagagactatcagcagcagaattagtcaagcaaaagaaagaatctgcaaaattgaagatgagttatttgaaaatatacagtg

SEQ ID NO: 73728 - DNA, 447 bp, Homo sapiens
aagcaacaaataaaacgataatcttagattttgaagaatggaatgaagcagggtaagactttgtaatggaagatttaatacatatgacatattactatgtgtagtggtattaaggatgctgagaacacgtcagaagataggagtggctcctcattcagttaatttcttaaatgcctgctatgccccagacctttctatatacaggtaatcaagcatatgaattataagttgtttctaagaataaatgtcagttacatggaaatgaatgaaaggaacagtatgttttagtataacttttgatgattactcaatatgattataataaacataagctatttcattttttacctgcaatacagtaggcctatcaggttacagtagagccttttctcctgcattaaatgaccctagactaagcttatttaagcccttctgcttgttttccct

SEQ ID NO: 73729 - DNA, 488 bp, Homo sapiens
gggctccctctccttcccgaggcttggcaaacgcctggatcctacgttgacaatccagctacatttcagtgggactccagaaagctcacatatcccgctggtctcgaactcctgacctcaggtgatccacctgcctaggcctcccaaagtgccgggattataggcgtgagccaccggactgggcacattttttttttaaagtaataggatagcatctaataatcaatgcttaaacaataacaaccttgtcagtcaccagacaggagaaattgggatgtcagtgccagcacatgtgcagattcaggcaaatctctaagtttagatcacacaattttcaaagctaggaaaggttggtgattgtcatgcactgtgaagtatttcttagtcaaaagacagatatccaattaagaaggggaaagccacaagtttaataaaacaggagatgtggaaggagcctctgttcttcgctgagctctaaattataccat

SEQ ID NO: 73730 - DNA, 531 bp, Homo sapiens
gataggagtgttttggcagggtggttaaatgagaatgtttctaaggactcctccagtactatagttctgcagtttaatagaacatatatgccctgatataacttccagctattcattcattcattcaacaaacttgtttgtgtgagtgcctgttaggtgttactgtgctagccatgaaactagcaccattcttgtcctagaaataatataaaatatgtttgttaaatatgtagtaagcatttcataaatgctcttgaagggtgtacacaatagaggctataacagcttctctgaacaatcctgtggttaatgatgttctttaattatgccaacatccaatacctcatgttaaagacttttagcattttccagatgttggaaatgatcagaaaattgtatattctcagtaactatgaagaataatctgagttcttagttgtgggtgctgaggcccaagaggtatatccttcatcaaggttacatgtgggtagaggtagatgcctcctgcatcccagcattgggttagttagc

SEQ ID NO: 73731 - DNA, 438 bp, Homo sapiens
ttagaagtgggacttatttaagatgaacagtaaattctctgagtttgatttgtttcatttttgccacccccacccccaaacctcattgcttgtaagctcagaaagcatgcctatgcatcatttttgaaaggaaaataatgtggatatttaataatgtggatatttaatagtgtggatatttacccataactgtgatacagtaaatgtggcagttttgataatgatgtttggcttttttgttttgtttaatgcctgcaaaattatcctgcctatggctcccagaggcctttcccatgcagcatgttctataattatattactgatctaataaacatctatctcttattgtaataaactctctttgtgaacagcctcattaatgtgctgaagtaatgtacccgggggtatttccaacaatttcattgtagctgtaaaatt

SEQ ID NO: 73732 - DNA, 293 bp, Homo sapiens
gtcattggtttacttttgcccgtgggaaaagttgaaaattccttagcatggaatcaaaactctcacatcagtgtggttcttgtcaagttattcagccttatctttcgccacttaccatactctgcacctttgttctagcatccagccaaactagactacatggagctccacagtgatcgtcttcacctccagctgtttgcatttacttcttccctctatcctacatgtgttttccttccccttcagatatcaacctatgaattgcctctaccaaaaagcctacaatattgaca

SEQ ID NO: 73733 - DNA, 361 bp, Homo sapiens
tgctaaaaatcctaaattaaattcagagcaatattgtacttaggtaaaaactttatttttttcactcccttttgcaccaacaggtggccccagtactttgctataatcaatgggtagaagtgacaatctgctgaagttttctggaaaagcttttgatttactgatgaaagaaggcaaacatctctgtatttgatagattcattagaaaaagtggctgtcatacccttcacttccccccacccttttttttttcttgttagagacagggtctctttctgttgctcagactggcacatacccctgcgcttctttccatcttgaatggaatctgatactgagggttgaggacaccattttatac

SEQ ID NO: 73734 - DNA, 418 bp, Homo sapiens
tacaaaacatcccacgcccctccacaattgtcctcacccacttgaaagtatgactgcaatatgtacacacattcacgttggatataatggcaatgctgctcatactccacacttgtattctaagtagctgactgcatgtatgcctccccctgttcacaagttctataaagtcagagacgcttggtttatctgcagagaggcagtgcgaatctggtaccagtagttagaaatgtccactctggagccaaactcctggggcttgaaccttgggtcccccatgtaccaactgtgtgaccttgggccacttaccctctcagtggctcatttcccatctgcgaaatggggcttcgtcgtagtatcaccctggaacatagaaaagctatggtagctgctattaatattagctgttgttgttttc

SEQ ID NO: 73735 - DNA, 287 bp, Homo sapiens
ttaccaatctggaagtgggagcggccgcggttttttcaggtttttgcatttctaacaaccggatggccccatctggacttgccaaccagttctgtggccaccacccaggaactaactcagcagaagagaaccacttctattccctatgagttcatccctgagctaaccaatcaccactcctaattcaccagccccctactcaccaaattatcctaaaaagctctgattcccaggttttcagagagactgatttaagtaatagtaaaactccagtctcccacacagct

SEQ ID NO: 73736 - DNA, 5117 bp, Homo sapiens
ttaatttaatttaatatcattttgctgtagacagaatttgtggaaggggaagaacacgatcacagaataacaagtcgaattaacctaatagatctggcaggcagtgagcgctgctctacggctcacactaatggagatcgactaaaggaaggtgtgagtattaataagtccttgctaactttgggaaaagttatatctgcactttcggaacaagcaaaccaaaggagtgtttttattccttatcgtgaatctgttcttacatggctgttaaaagaaagtctgggtggaaattcaaaaactgcaatgattgctacgattagtcccgctgccagcaacatagaagaaacattaagcacacttagatatgctaaccaagcccgtttaatagtcaacattgctaaagtaaatgaagatatgaacgctaagttaattagagaattgaaggcagaaattgcaaagctaaaagctgctcagagaaacagtcggaatattgaccctgaacgatacaggctctgtcggcaagaaataacatccttaagaatgaaactgcatcaacaggagagagacatggcagaaatgcaaagagtgtggaaagaaaagtttgaacaagctgaaaaaagaaaacttcaagaaacaaaagagttacagaaagcaggaattatgtttcaaatggacaatcatttaccaaaccttgttaatctgaatgaagatccacaactatctgagatgctgctatatatgataaaagaaggaacaactacagttggaaagtataaaccaaactcaagccatgatattcagttatctggggtgctgattgctgatgatcattgtactatcaaaaattttggtgggacagtgagtattatcccagttggggaagcaaagacatatgtaaatggaaaacatattttggaaatcacagtattacgtcatggtgatcgagtgattcttggtggagatcattattttagatttaatcatccagtagaagtccagaaaggaaaaaggccatctggaagagatactcctataagtgagggtccaaaagactttgaatttgcaaaaaatgagttgctcatggcacagagatcacaacttgaagcagaaataaaagaggctcagttgaaggcaaaggaagaaatgatgcaaggaatccagattgcaaaagaaatggctcagcaagagctttcttctcaaaaagctgcatatgaaagcaaaataaaagcactggaagcagaactgagagaagagtctcaaaggaaaaaaatgcaggaaataaataaccagaaggctaatcacaaaattgaggaattagaaaaggcaaagcagcatcttgaacaggaaatatatgtcaacaaaaagcgattagaaatggagacattggctacaaaacaggctttagaagaccatagcatccgccatgcaagaattctggaagctttagaaactgaaaagcaaaaaattgctaaagaagtacaaattctacagcagaatcggaataatagggataaaacttttacagtgcagacaacttggagctctatgaaactctcaatgatgattcaggaagccaatgctatcagcagcaaattgaaaacatactatgtttttggcagacatgatatatcagataaaagtagttctgacacttctattcgggttcgtaacctgaaactaggaatctcaacattctggagtctggaaaagtttgaatctaaacttgcagcaatgaaagaactttatgagagtaatggtagtaacaggggtgaagatgccttttgtgatcctgaagatgaatgggaacccgacattacagatgcaccagtttcttcactttctagaaggaggagtaggagtttgatgaagaacagaagaatttctggttgtttacatgacatacaagtccatccaattaagaatttgcattcttcacattcatcaggtttaatggacaaatcaagcactatttactcaaattcagcagagtcctttcttcctggaatttgcaaagaattgattggttcttcgttagatttttttggacagagttatgatgaagaaagaactatagcagacagcctaattaatagttttcttaaaatttataatgggctatttgccatttccaaggctcatgaagaacaagatgaagaaagtcaagataacttgttttcttctgatcgagcaatccagtcacttactattcagactgcatgtgcttttgagcagctagtagtgctaatgaaacactggctgagtgatttactgccttgtaccaacatagcaagacttgaggatgagttgagacaagaagttaaaaaactgggaggctacttacagttatttttgcagggatgctgtttggatatttcatcaatgataaaagaggctcaaaagaatgcaatccaaattgtacaacaagctgtaaagtatgtggggcagttagcagttctgaaagggagcaagctacattttctagaaaacggtaacaataaagctgccagtgtccaggaggaattcatggatgctgtttgtgatggtgtaggcttaggaatgaagattttattagattctggactggaaaaagcaaaagaacttcagcatgaactctttaggcagtgtacaaaaaatgaggttaccaaagaaatgaaaactaatgccatgggattgattagatctcttgaaaacatctttgctgaatcgaaaattaaaagtttcagaaggcaagtacaagaagaaaactttgaataccaagatttcaagaggatggttaatcgtgctccagaattcttaaagttaaaacattgcttagagaaagctattgaaattattatttctgcactgaaaggatgccatagtgatataaatcttctccagacttgtgttgaaagtattcgcaacttggccagtgatttttacagtgacttcagtgtgccttctacttctgttggcagctatgagagtagagtaactcacattgtccaccaggaactagaatctctagctaagtctctcctcttttgttttgaatctgaagaaagccctgatttgttgaaaccctgggaaacttataatcaaaataccaaagaagaacaccaacaatctaaatcaagcgggattgacggcagtaagaataaaggtgtaccaaagcgtgtctatgagctccatggctcatccccagcagtgagctcagaggaatgcacacccagtaggattcagtgggtgtgaatactgatgtgtaggcacttttatgaccacccatgaaagaaaaagaacacttgctcggtaattttctttatgcaggagagtttaagagaaatcagcacagatatttcaaaaaagtccatgtctttttatctttaaaatatctatttatcaaaggccagacacagtggctcacgcctgtaatcccagcactttgggaggcgggcagatcacaaggtcaggagtttgagaccggcctggccaacatggtgaaaccccgtctctactaaaaatacaaaaatttgctgggcatggtggcgcgtgcctgtaatcccagctactaggggggctgaggcaggaggatcgcttgaacctgagaggcagaggttgcagtgagccaagatcatgccactttactccagtctgagcaacagaacgagacttagtcaaaataaataaataaataagtaaataaataaataaataaaatatcttttatctttaaagtgtttaacattggtatactgtctgtagttggttcattagtcgtttataaagggttattttctcatgagtggaaacctgaacaatcagttacctttgtgcctatgccttctctctcctcagacagctgggatgtttatggtgaaatggcctgtacaagtttaactaagacaacttaacttgcattgttaatcaaaaattcttttctcaaagggttaactggttgccattttgaatagtatgttcaagggtgtagcttcctgtttctttccaaattataagtagctacctaaatatagtataattatatattaataatatggcttgctggcacagtagtttaccctgttatctgtgtttcataatgggggctgtatgaatattatttaaaactaataaaatgttgccagaattatactaaactgttggatgagattaggagatcagaggctggaccttctcttgataatgcttgttttgttaaaggtataatgaaataatttgtatatgatttgatgaagattaaagacccttattttccacagctttaaaaaaaaacctttatttatgatcaagtaataaagataatattctacttgtgggatcttacattacggaaatagtttgacgtttttgacctcaagagtatgtataatttgaagagatactttgtaactatgcttgggtgatattgagcagttcctaaagaataattcatttaaaaaaaaagaagaaaaaaaaagaagaattcatttaaataacctgatcctttcatttgcccttttcgaatttacagatactacttgtacatttggcataactagttgaaattggccattcgtaccatgaataaatctgatagtttccttgttaggaagagattgtaagtaaatacagtcattgcagtcagaacagtattagtgaaccttgtgtggtgttttcaagctctttaaaatggtacaatgtagcacatttgctttcatttctttttttatttttggcatttgaccttgtattctttctgaagctctatatgtgtttttattagtcaataatctggcaagtagcactttgcctgtgcagtttgctggagtgtagatgtacatatgaggatttcccgggaggtgcacttctttgaagaacttcctaaagtacctgtatagtagttttcatcttaatattcagtatttaatcttcagtttgtgctttgtaaactcatgacttaattggtcagaaactttttagtgtctttataaaattttgtatacatatttatactaaacacattgtgatactgtatttgaatgaatggtgaaaaaatatttgctattggaattatgtgcactgacaagaaatgttataaagagaatgcctttaataaatcttttcagcattagaaatgcttc

SEQ ID NO: 73737 - DNA, 7272 bp, Homo sapiens
ctggggagccggcgctggaggtggtgagtggcgtggggactgtgtcgagggggtccccaaggtgccggaccctgcggaggggcgaagtttcggcactggggagggcgtgcggacgctttccctacaggcgaccactgctctgcgggcgggtggtcttagctccagtcccccattcagttcctcagcattccaggtcggcggcgaaggggtccccgaacgaagggcgcaaggcagcgtctctgctgggaccgggaagccggacttcagggcctctcggcccgtgggcttctccccgagtctccccgagtcggttggcattaagagtttagcagatactttcagaaatggatacataagaaatggctggaaatcaaatgaatgtccaaagaagagcttagggtcttagtaacattcttttttaaaataactgtctgccaaaatgtcattacacagtactcataatagaaataacagcggtgatattcttgatattccttcttcccaaaatagttcatcactgaatgccctcacccacagtagccgacttaagctgcatttgaagtcggatatgtcagaatgtgaaaatgatgatccattattgagatctgcaggtaaagtcagagacataaatagaacttatgttatttctgccagtagaaaaacagcagacatgccccttacccctaatcctgtaggtagattggcacttcagaggagaactacaaggaacaaagaatcatctttgcttgttagtgagttggaagacacaactgaaaaaacagcagaaacacgtcttacattacaacgtcgtgctaaaacagattctgcagaaaagtggaaaacagctgaaatagattctgtcaaaatgacactgaatgtgggaggtgaaacagaaaataatggtgtttctaaggaaagtagaacaaatgtaaggattgtaaataatgctaaaaactcttttgttgcctcttctgtacctttagatgaagatccacaggtcattgaaatgatggctgataagaaatacaaagaaacattttctgcccccagtagagcaaatgaaaatgttgcacttaagtactcaagtaatagaccacccattgcttccctgagtcagactgaagttgttagatcaggacacttgacaacgaaacctactcagagcaagttggatatcaaagtgttgggaacaggaaacttgtatcatagaagtattgggaaggaaattgcaaaaacttcaaataaatttgggagcttagaaaaaagaacacctacaaaatgtacaacagaacacaaactgacaacaaagtgcagcctgcctcagcttaagagcccagctccatcaatactgaagaatagaatgtctaaccttcaagttaaacaaagaccaaaaagttcctttcttgcaaataaacaggaaagatccgcagaaaatacaattcttcccgaagaagaaactgtagttcagaacacctctgcaggaaaagaccccttaaaagtagagaatagtcaagtgacagtggcagtacgcgtaagacctttcaccaagagagagaagattgaaaaagcatcccaggtagtcttcatgagtgggaaagaaataactgtggaacaccctgacacgaaacaagtttataattttatttatgatgtttcattctggtcttttgatgaatgtcatcctcactacgctagccagacaactgtctatgagaagctagcagcaccactcctagaaagagccttcgaaggcttcaatacctgtctttttgcttatggtcagactggctctggaaaatcatatacgatgatgggatttagtgaagaaccaggaataattccaagattttgtgaagatcttttttctcaagtagccagaaaacaaacccaagaggtcagctatcacattgaaatgagcttctttgaagtatataatgaaaaaattcacgaccttctggtttgtaaagatgaaaatgggcagagaaagcaaccactgagagtgagggaacatcctgtttatggaccatatgttgaagcactgtcaatgaacattgtcagttcttacgctgatatccagagttggctagaattgggaaataaacaaagagctactgctgctactggtatgaatgataaaagttcccgatctcattcagttttcaccctggtgatgacccagaccaagacagaatttgtggaaggggaagaacacgatcacagaataacaagtcgaattaacctaatagatctggcaggcagtgagcgctgctctacggctcacactaatggagatcgactaaaggaaggtgtgagtattaataagtccttgctaactttgggaaaagttatatctgcactttcggaacaagcaaaccaaaggagtgtttttattccttatcgtgaatctgttcttacatggctgttaaaagaaagtctgggtggaaattcaaaaactgcaatgattgctacgattagtcccgctgccagcaacatagaagaaacattaagcacacttagatatgctaaccaagcccgtttaatagtcaacattgctaaagtaaatgaagatatgaacgctaagttaattagagaattgaaggcagaaattgcaaagctaaaagctgctcagagaaacagtcggaatattgaccctgaacgatacaggctctgtcggcaagaaataacatccttaagaatgaaactgcatcaacaggagagagacatggcagaaatgcaaagagtgtggaaagaaaagtttgaacaagctgaaaaaagaaaacttcaagaaacaaaagagttacagaaagcaggaattatgtttcaaatggacaatcatttaccaaaccttgttaatctgaatgaagatccacaactatctgagatgctgctatatatgataaaagaaggaacaactacagttggaaagtataaaccaaactcaagccatgatattcagttatctggggtgctgattgctgatgatcattgtactatcaaaaattttggtgggacagtgagtattatcccagttggggaagcaaagacatatgtaaatggaaaacatattttggaaatcacagtattacgtcatggtgatcgagtgattcttggtggagatcattattttagatttaatcatccagtagaagtccagaaaggaaaaaggccatctggaagagatactcctataagtgagggtccaaaagactttgaatttgcaaaaaatgagttgctcatggcacagagatcacaacttgaagcagaaataaaagaggctcagttgaaggcaaaggaagaaatgatgcaaggaatccagattgcaaaagaaatggctcagcaagagctttcttctcaaaaagctgcatatgaaagcaaaataaaagcactggaagcagaactgagagaagagtctcaaaggaaaaaaatgcaggaaataaataaccagaaggctaatcacaaaattgaggaattagaaaaggcaaagcagcatcttgaacaggaaatatatgtcaacaaaaagcgattagaaatggagacattggctacaaaacaggctttagaagaccatagcatccgccatgcaagaattctggaagctttagaaactgaaaagcaaaaaattgctaaagaagtacaaattctacagcagaatcggaataatagggataaaacttttacagtgcagacaacttggagctctatgaaactctcaatgatgattcaggaagccaatgctatcagcagcaaattgaaaacatactatgtttttggcagacatgatatatcagataaaagtagttctgacacttctattcgggttcgtaacctgaaactaggaatctcaacattctggagtctggaaaagtttgaatctaaacttgcagcaatgaaagaactttatgagagtaatggtagtaacaggggtgaagatgccttttgtgatcctgaagatgaatgggaacccgacattacagatgcaccagtttcttcactttctagaaggaggagtaggagtttgatgaagaacagaagaatttctggttgtttacatgacatacaagtccatccaattaagaatttgcattcttcacattcatcaggtttaatggacaaatcaagcactatttactcaaattcagcagagtcctttcttcctggaatttgcaaagaattgattggttcttcgttagatttttttggacagagttatgatgaagaaagaactatagcagacagcctaattaatagttttcttaaaatttataatgggctatttgccatttccaaggctcatgaagaacaagatgaagaaagtcaagataacttgttttcttctgatcgagcaatccagtcacttactattcagactgcatgtgcttttgagcagctagtagtgctaatgaaacactggctgagtgatttactgccttgtaccaacatagcaagacttgaggatgagttgagacaagaagttaaaaaactgggaggctacttacagttatttttgcagggatgctgtttggatatttcatcaatgataaaagaggctcaaaagaatgcaatccaaattgtacaacaagctgtaaagtatgtggggcagttagcagttctgaaagggagcaagctacattttctagaaaacggtaacaataaagctgccagtgtccaggaggaattcatggatgctgtttgtgatggtgtaggcttaggaatgaagattttattagattctggactggaaaaagcaaaagaacttcagcatgaactctttaggcagtgtacaaaaaatgaggttaccaaagaaatgaaaactaatgccatgggattgattagatctcttgaaaacatctttgctgaatcgaaaattaaaagtttcagaaggcaagtacaagaagaaaactttgaataccaagatttcaagaggatggttaatcgtgctccagaattcttaaagttaaaacattgcttagagaaagctattgaaattattatttctgcactgaaaggatgccatagtgatataaatcttctccagacttgtgttgaaagtattcgcaacttggccagtgatttttacagtgacttcagtgtgccttctacttctgttggcagctatgagagtagagtaactcacattgtccaccaggaactagaatctctagctaagtctctcctcttttgttttgaatctgaagaaagccctgatttgttgaaaccctgggaaacttataatcaaaataccaaagaagaacaccaacaatctaaatcaagcgggattgacggcagtaagaataaaggtgtaccaaagcgtgtctatgagctccatggctcatccccagcagtgagctcagaggaatgcacacccagtaggattcagtgggtgtgaatactgatgtgtaggcacttttatgaccacccatgaaagaaaaagaacacttgctcggtaattttctttatgcaggagagtttaagagaaatcagcacagatatttcaaaaaagtccatgtctttttatctttaaaatatctatttatcaaaggccagacacagtggctcacgcctgtaatcccagcactttgggaggcgggcagatcacaaggtcaggagtttgagaccggcctggccaacatggtgaaaccccgtctctactaaaaatacaaaaatttgctgggcatggtggcgcgtgcctgtaatcccagctactaggggggctgaggcaggaggatcgcttgaacctgagaggcagaggttgcagtgagccaagatcatgccactttactccagtctgagcaacagaacgagacttagtcaaaataaataaataaataagtaaataaataaataaataaaatatcttttatctttaaagtgtttaacattggtatactgtctgtagttggttcattagtcgtttataaagggttattttctcatgagtggaaacctgaacaatcagttacctttgtgcctatgccttctctctcctcagacagctgggatgtttatggtgaaatggcctgtacaagtttaactaagacaacttaacttgcattgttaatcaaaaattcttttctcaaagggttaactggttgccattttgaatagtatgttcaagggtgtagcttcctgtttctttccaaattataagtagctacctaaatatagtataattatatattaataatatggcttgctggcacagtagtttaccctgttatctgtgtttcataatgggggctgtatgaatattatttaaaactaataaaatgttgccagaattatactaaactgttggatgagattaggagatcagaggctggaccttctcttgataatgcttgttttgttaaaggtataatgaaataatttgtatatgatttgatgaagattaaagacccttattttccacagctttaaaaaaaaacctttatttatgatcaagtaataaagataatattctacttgtgggatcttacattacggaaatagtttgacgtttttgacctcaagagtatgtataatttgaagagatactttgtaactatgcttgggtgatattgagcagttcctaaagaataattcatttaaaaaaaaagaagaaaaaaaaagaagaattcatttaaataacctgatcctttcatttgcccttttcgaatttacagatactacttgtacatttggcataactagttgaaattggccattcgtaccatgaataaatctgatagtttccttgttaggaagagattgtaagtaaatacagtcattgcagtcagaacagtattagtgaaccttgtgtggtgttttcaagctctttaaaatggtacaatgtagcacatttgctttcatttctttttttatttttggcatttgaccttgtattctttctgaagctctatatgtgtttttattagtcaataatctggcaagtagcactttgcctgtgcagtttgctggagtgtagatgtacatatgaggatttcccgggaggtgcacttctttgaagaacttcctaaagtacctgtatagtagttttcatcttaatattcagtatttaatcttcagtttgtgctttgtaaactcatgacttaattggtcagaaactttttagtgtctttataaaattttgtatacatatttatactaaacacattgtgatactgtatttgaatgaatggtgaaaaaatatttgctattggaattatgtgcactgacaagaaatgttataaagagaatgcctttaataaatcttttcagcattagaaatgcttc

SEQ ID NO: 73738 - DNA, 359 bp, Homo sapiens
ggaggcagctgagccttccctggcaaaagcagatcaatagtctgtgtttctgctgagtgaacttgacaaatgggactgagaagacactgcatgatagatccaaacccaacctgaatccaaacctaatccgccaccatgcacaggaaacagaaaagccaggcacgggatcagaaatactgtcgacagtctaaggacttgggtaggaataaccgcccaaaatcttccgtttccattctcagaaggagctgcccttcttctagggccagtctgggatagattcagatgaggggaaattctcttagaattatcctgtcagtattggctgggcaccgtggctcacgcctataatcctagcactt

SEQ ID NO: 73739 - DNA, 1742 bp, Homo sapiens
  misc_feature (237)..(237): n is a, c, g, or t
atgcatcttaacagaaggcttaagtagttgaatgacagggactacatttttgctgcagaagatcatgataaaacatgtgctgtgtggtcaccttgggtaatgtgccgagactgcttgatggtacttatctctacacactgcatctcatactgatttatggatttggatgacttattttatgtcaaagacataaagagagtagagaagagagaatagtattttcatttcagtcttaanaaagttctatcctatgagatgttaacagctgccttctcttggtggtctgtgaagtttttataaagatattgattattttccaatgacacacaaatctactgctagagaccattcaaatgcttagttacaccagggcttggctcctgtaccctgaggaggacacgattaaccaaatcctcctttttaaatgttctcaggacaatgagctgcacatacggcacaaatgcaatttgcttgaccaatcttgcctctgtctccttctatctccgtttacatgcttcatgctcagttgaaattaattctctacacattggtctcatgaacacatctttgagagcagagttcaagttaaatttttattttcatcattacctctgagaacacaatctggggcatattagacgctttgtaagtgtagaggtggggagaaagaagaagaaagagaggaacagaaggagggaaagattttcctgatagatcactttctggacactttctgtgctgagaagttctgagattgcctctctggatcctgctatcttggcagtcttgctaagagtttccatttacacttaaacatggttactgatgcgtcttaatgttgccttaactatcaggtttctgatagccccacatagccaagtgggaccctggtcaagaagttcacctctgttaaataaatatgcatagattttcaacatctcttcacatgcattcagaggtgatgaaagattccactggatgctagaacattgtgcataaataatcgaagttgtatgctcttcagcaatgatgctaccccatatcctttttttttctttcccatgatatgaggatatgagtgcagcagaactagctccatgcccttgtcccagaattaatcattcctatccatatttgatgtctttaccttttaaatatttatgggctgttatgttcctttcttgttgttcacccactctggggacattcagaagcctcacatttcttccttagccaaacaccccattcccttcatcctctctcagctgttctttggattacctccaaattgcatacataattttggtattgaggtgccaaaaatgcatttgtttcaactggagttttattgaagttgcttttactcaaatcaagtacacaaataaatttgatttccaaggcatgaaaattcagttaggtctccgaagggaagctgaggtatacttatatttcattataatgctacaggtagattttaagtcactaggaaaatgacatctcaaaatcaaaagattatagaatgagcactatatgaagaattacattttaaagcataggtctgtgatcattttgtaggtttttgttgttactgtcagtctattggtttttattaataattttattgaggtataactgatacacaaacgacatatttaatgtgtacaatttgatgagtttggacatatccgaggactcatgagactgtcactgcaatcaaggtaataaatgtatttattacttcc

SEQ ID NO: 73740 - DNA, 867 bp, Homo sapiens
  misc_feature (656)..(657): n is a, c, g, or t
  misc_feature (678)..(678): n is a, c, g, or t
  misc_feature (719)..(719): n is a, c, g, or t
  misc_feature (721)..(721): n is a, c, g, or t
  misc_feature (729)..(729): n is a, c, g, or t
  misc_feature (736)..(736): n is a, c, g, or t
  misc_feature (756)..(757): n is a, c, g, or t
  misc_feature (765)..(765): n is a, c, g, or t
  misc_feature (775)..(776): n is a, c, g, or t
  misc_feature (786)..(787): n is a, c, g, or t
  misc_feature (790)..(790): n is a, c, g, or t
  misc_feature (799)..(799): n is a, c, g, or t
  misc_feature (805)..(805): n is a, c, g, or t
  misc_feature (812)..(812): n is a, c, g, or t
  misc_feature (816)..(816): n is a, c, g, or t
  misc_feature (825)..(825): n is a, c, g, or t
  misc_feature (840)..(840): n is a, c, g, or t
agcgtgggtgcaatcctggctcactgcaacctctgcctcccaggttcaagtgattctcctgcctcagcttcccaagtagctgggactacaggcgtgtgccaccacgaccagaggccaggtgcagtgcatgtaatcccagcactttgggagactgagatgggaagatcgcttgaggccaggagtgcaagaccagcctgggcaacacagcaagaccttgattctactaaaaaaaaaaaaggatccttcaacttcaacaataataacacaagggaagtgaagaaaaacactttctaaggaaatctctctctgagctaccatcctgctagggagagcctgaaagcagaatgctgacttgactagctctggtcaatgaaagaaatcaccagtggaaaggctaccagggggctttctcaaaagagagggacagtaaactgcaagatgaacaactcaatgccatccaggtctggatgagaaagaacagtcgagagactgagtttcaggagtggaaacactcaaagcatcatcttccactttcttctccggctgctaggaagaagggaaaaacacagaccttctgaggacctgcggagcaaaccactggcttcagaaaagcaaacagggacttccctctgcgcagcaggaagcagttagcctanntcggaggcttgactgaagaanccaatgagcggaaggccagaagtttgagacgcagccagtananggaaactnccgggangaggcaggcagccgtccttnnaagaaaangccctatgtnnatgcgaccannccnccggaactnagcggnaacaaantggntccccaccngttctgcaaatcccnactacatgcagcactctccctttcctc

SEQ ID NO: 73741 - DNA, 961 bp, Homo sapiens
  misc_feature (750)..(751): n is a, c, g, or t
  misc_feature (772)..(772): n is a, c, g, or t
  misc_feature (813)..(813): n is a, c, g, or t
  misc_feature (815)..(815): n is a, c, g, or t
  misc_feature (823)..(823): n is a, c, g, or t
  misc_feature (830)..(830): n is a, c, g, or t
  misc_feature (850)..(851): n is a, c, g, or t
  misc_feature (859)..(859): n is a, c, g, or t
  misc_feature (869)..(870): n is a, c, g, or t
  misc_feature (880)..(881): n is a, c, g, or t
  misc_feature (884)..(884): n is a, c, g, or t
  misc_feature (893)..(893): n is a, c, g, or t
  misc_feature (899)..(899): n is a, c, g, or t
  misc_feature (906)..(906): n is a, c, g, or t
  misc_feature (910)..(910): n is a, c, g, or t
  misc_feature (919)..(919): n is a, c, g, or t
  misc_feature (934)..(934): n is a, c, g, or t
agcggaaggggtctgcagtgaaggtcccaaagtcccagacaacttgaagaagctgagtgagaaggccatgcagatatcttggagaagtgcattccaggcagaggaaaagccagtgcagagacactgaagcagggcatgactgatgtgtataaggagcatcatatacatgatcatctacagtccactgaggagaatagcagacgagaggccaggtgcagtgcatgtaatcccagcactttgggagactgagatgggaagatcgcttgaggccaggagtgcaagaccagcctgggcaacacagcaagaccttgattctactaaaaaaaaaaaaggatccttcaacttcaacaataataacacaagggaagtgaagaaaaacactttctaaggaaatctctctctgagctaccatcctgctagggagagcctgaaagcagaatgctgacttgactagctctggtcaatgaaagaaatcaccagtggaaaggctaccagggggctttctcaaaagagagggacagtaaactgcaagatgaacaactcaatgccatccaggtctggatgagaaagaacagtcgagagactgagtttcaggagtggaaacactcaaagcatcatcttccactttcttctccggctgctaggaagaagggaaaaacacagaccttctgaggacctgcggagcaaaccactggcttcagaaaagcaaacagggacttccctctgcgcagcaggaagcagttagcctanntcggaggcttgactgaagaanccaatgagcggaaggccagaagtttgagacgcagccagtananggaaactnccgggangaggcaggcagccgtccttnnaagaaaangccctatgtnnatgcgaccannccnccggaactnagcggnaacaaantggntccccaccngttctgcaaatcccnactacatgcagcactctccctttcctc

SEQ ID NO: 73742 - DNA, 1219 bp, Homo sapiens
  misc_feature (1008)..(1009): n is a, c, g, or t
  misc_feature (1030)..(1030): n is a, c, g, or t
  misc_feature (1071)..(1071): n is a, c, g, or t
  misc_feature (1073)..(1073): n is a, c, g, or t
  misc_feature (1081)..(1081): n is a, c, g, or t
  misc_feature (1088)..(1088): n is a, c, g, or t
  misc_feature (1108)..(1109): n is a, c, g, or t
  misc_feature (1117)..(1117): n is a, c, g, or t
  misc_feature (1127)..(1128): n is a, c, g, or t
  misc_feature (1138)..(1139): n is a, c, g, or t
  misc_feature (1142)..(1142): n is a, c, g, or t
  misc_feature (1151)..(1151): n is a, c, g, or t
  misc_feature (1157)..(1157): n is a, c, g, or t
  misc_feature (1164)..(1164): n is a, c, g, or t
  misc_feature (1168)..(1168): n is a, c, g, or t
  misc_feature (1177)..(1177): n is a, c, g, or t
  misc_feature (1192)..(1192): n is a, c, g, or t
agcggaaggggtctgcagtgaaggtcccaaagtcccagacaagtcccctcttgttgcccaggctggagtgcagcagcatgattacagctcacatcagcctcgacctcccgggctcaagctatcctcctacctcagcctcccaagtagctgggactataggatctttctgctgatgcagctgttaagagtgtttcataaactgtgacaacactaagcaaaatcatagaaggaaactctatggacaatttcagatggagaagaagaaaggactggaagttcaatttggccatgacaattagacttgaagaagctgagtgagaaggccatgcagatatcttggagaagtgcattccaggcagaggaaaagccagtgcagagacactgaagcagggcatgactgatgtgtataaggagcatcatatacatgatcatctacagtccactgaggagaatagcagacgagaggccaggtgcagtgcatgtaatcccagcactttgggagactgagatgggaagatcgcttgaggccaggagtgcaagaccagcctgggcaacacagcaagaccttgattctactaaaaaaaaaaaaggatccttcaacttcaacaataataacacaagggaagtgaagaaaaacactttctaaggaaatctctctctgagctaccatcctgctagggagagcctgaaagcagaatgctgacttgactagctctggtcaatgaaagaaatcaccagtggaaaggctaccagggggctttctcaaaagagagggacagtaaactgcaagatgaacaactcaatgccatccaggtctggatgagaaagaacagtcgagagactgagtttcaggagtggaaacactcaaagcatcatcttccactttcttctccggctgctaggaagaagggaaaaacacagaccttctgaggacctgcggagcaaaccactggcttcagaaaagcaaacagggacttccctctgcgcagcaggaagcagttagcctanntcggaggcttgactgaagaanccaatgagcggaaggccagaagtttgagacgcagccagtananggaaactnccgggangaggcaggcagccgtccttnnaagaaaangccctatgtnnatgcgaccannccnccggaactnagcggnaacaaantggntccccaccngttctgcaaatcccnactacatgcagcactctccctttcctc

SEQ ID NO: 73743 - DNA, 569 bp, Homo sapiens
accagctctcgcgacactttccttggccatggcgagagcacacgagaagagactctcgcaagaaagtaaatgagtcaggctggaaacagcgaagtatatctcgcgatagcactgtttaaaatggcggcttcaaggcgtttcacgggtgtcccggacaggcgtggaggtggggcgcaggcgaggatgaagcttgagttggccaggagtcggaaaacgattgcaggcgggaccgcgtccgtcggggctgaggaaacttagcgtggcagaccctaaactgggataactttagggatatggccttcttttcccagttgcctcaaacttagagcagcgtcgtctttagccgaagattcattttcccagcattttccttctccaggcggagtagttggagacagagggcaagccagaaactgaccttcccatctcctcattcccttccatcaagaacttttcatcgttctttccccaccctggtttgtaaatggtatttggcttcataaaaacgtttgtccacaggtgccctgctccatcagttcgctccagcaatataggaagttaccaaaaaa

SEQ ID NO: 73744 - DNA, 305 bp, Homo sapiens
ataaaatacttaggaatatacctaaccaagaaggtgaaaaacctctccaaggaaaactatgaaacactgctgaaagaaatcatagactacacaaatacatttcatgctcaaggatgggtagaatcaatattgtgaaaatgaccatactgccaaaagggatctacaaattcaacgctatccccatcaaataccaccatcattctttacagaattagaaaaagcaattctaaaattcatatggaaccaaagaaggggcccgcatagccaaagcaagactaagcaaaaagaacaaatctggaagcatc

SEQ ID NO: 73745 - DNA, 481 bp, Homo sapiens
tgctgtctcgcaaatgctggggtccaggactgggcacatcgagggacttggtaggtgcttggttcactgatgtaaaatataggagcacccagggccttgccctttcccacctgcatccctgaatgacaggagagtgtgggagagtgtagggacagcaggcgcagaccccggggcccctgcctgggattggcgtcggggaagacagtcattctggagcgacccctaggcctgatgccttagagcgcaactgccacagacacagcttccttggggggctggccaggccacggaggggcccctggctcccatttctggtccctggatcctgagagcaaggactagggattgtcaccaaggcctccatgagccctcagcagaaggagggccaccctcgagggctccgttatcactggagcccgcgttcaacaaacacgcagatgattctccaaggacagagatggatgatggggagggggctggc

SEQ ID NO: 73746 - DNA, 1259 bp, Homo sapiens
ggagcgagcaagttaaggctcacgcggggaaatagctgcacagtccggcccagagcgccaagcgcacacaccgagcacactcccacacgcgcacacacgcgctcacactcgccccctcctcgggccccggccctggacccgcgggcgcggactcggtcgcccgccctgggagtcgccacaccgcgcgcgccgcgcccgcccccctcgcacccccacgcgcgcccggctgggggatctcctccgcgtgcccgaaagggggatatgccatttggacatgtaattgtcagcacgggatctgagacttccaaaaaatgaagccggcgacaggactttgggtctgggtgagccttctcgtggcggcggggaccgtccagcccagcgattctcagtcagtgtgtgcaggaacggagaataaactgagctctctctctgacctggaacagcagtaccgagccttgcgcaagtactatgaaaactgtgaggttgtcatgggcaacctggagataaccagcattgagcacaaccgggacctctccttcctgcgggtaaagctgtggctttctttctcttctttgtgaatggacagtggcgtcatgatgcatacaggcagacctgtgtgctgatacctggaaggggtgctcttctgcctggcaggcactgtgactataggcaaaagataagagatagcgaaacgcacccaggaaaagaacaagagtaacaaagccataatgactgacgctcctgagtttaaagcagttgctgttgccctaagattgagaaaagattctgtcaccatgtagtacatgacatctagcaaatctttttctgacaagctgtgaactaggagagtcagaggaccaatcagataacaattgataactctagccagtcgtctccatttctgcctcttttctgccacttcagacttttagattattttatatcacataaggagactaacactgttattaaaaaaaaagaaaagaaaaggaaagaaaagcatctggttttgaaaacctacaaattatttaaagtagactcataggaaatcacaagtatttacatagatcaatacgtgcaagaacacaaatgtgtatatgtatacttgaagttgctcagacaatcagtccttttggaaattattattattattttttgctttcattgatctatactctgttaaactggctgttagtgctaatgcttacagtttcttaagttttgctttaactggaatatgtttgggaaaatctgaactt

SEQ ID NO: 73747 - DNA, 454 bp, Homo sapiens
tctgttcgagaagtcacaggctacgtgttagtggctcttaatcagtttcgttacctgcctctggagaatttacgcattattcgtgggacaaaactttatgaggatcgatatgccttggcaatatttttaaactacagaaaagatggaaactttggacttcaagaacttggattaaagaacttgacaggtaaggaatatatccaaaatggcaaatatgctttcattatcaatataaggcaattgtatatgtagggttactgtcatatttgttacattgaggaacactctaaggcatttaaatatcagtgatttatttgttttataagcaatgatgccctgtgatgcccttgcttttctttatagattttgtaagtttagtgtgaaggataccataatactgtatctcagctgaacaggagtaaactctggaaatgctctgtgactgaaaactgag

SEQ ID NO: 73748 - DNA, 5762 bp, Homo sapiens
ggagcgagcaagttaaggctcacgcggggaaatagctgcacagtccggcccagagcgccaagcgcacacaccgagcacactcccacacgcgcacacacgcgctcacactcgccccctcctcgggccccggccctggacccgcgggcgcggactcggtcgcccgccctgggagtcgccacaccgcgcgcgccgcgcccgcccccctcgcacccccacgcgcgcccggctgggggatctcctccgcgtgcccgaaagggggatatgccatttggacatgtaattgtcagcacgggatctgagacttccaaaaaatgaagccggcgacaggactttgggtctgggtgagccttctcgtggcggcggggaccgtccagcccagcgattctcagtcagtgtgtgcaggaacggagaataaactgagctctctctctgacctggaacagcagtaccgagccttgcgcaagtactatgaaaactgtgaggttgtcatgggcaacctggagataaccagcattgagcacaaccgggacctctccttcctgcggtctgttcgagaagtcacaggctacgtgttagtggctcttaatcagtttcgttacctgcctctggagaatttacgcattattcgtgggacaaaactttatgaggatcgatatgccttggcaatatttttaaactacagaaaagatggaaactttggacttcaagaacttggattaaagaacttgacagaaatcctaaatggtggagtctatgtagaccagaacaaattcctttgttatgcagacaccattcattggcaagatattgttcggaacccatggccttccaacttgactcttgtgtcaacaaatggtagttcaggatgtggacgttgccataagtcctgtactggccgttgctggggacccacagaaaatcattgccagactttgacaaggacggtgtgtgcagaacaatgtgacggcagatgctacggaccttacgtcagtgactgctgccatcgagaatgtgctggaggctgctcaggacctaaggacacagactgctttgcctgcatgaatttcaatgacagtggagcatgtgttactcagtgtccccaaacctttgtctacaatccaaccacctttcaactggagcacaatttcaatgcaaagtacacatatggagcattctgtgtcaagaaatgtccacataactttgtggtagattccagttcttgtgtgcgtgcctgccctagttccaagatggaagtagaagaaaatgggattaaaatgtgtaaaccttgcactgacatttgcccaaaagcttgtgatggcattggcacaggatcattgatgtcagctcagactgtggattccagtaacattgacaaattcataaactgtaccaagatcaatgggaatttgatctttctagtcactggtattcatggggacccttacaatgcaattgaagccatagacccagagaaactgaacgtctttcggacagtcagagagataacaggtttcctgaacatacagtcatggccaccaaacatgactgacttcagtgttttttctaacctggtgaccattggtggaagagtactctatagtggcctgtccttgcttatcctcaagcaacagggcatcacctctctacagttccagtccctgaaggaaatcagcgcaggaaacatctatattactgacaacagcaacctgtgttattatcataccattaactggacaacactcttcagcacaatcaaccagagaatagtaatccgggacaacagaaaagctgaaaattgtactgctgaaggaatggtgtgcaaccatctgtgttccagtgatggctgttggggacctgggccagaccaatgtctgtcgtgtcgccgcttcagtagaggaaggatctgcatagagtcttgtaacctctatgatggtgaatttcgggagtttgagaatggctccatctgtgtggagtgtgacccccagtgtgagaagatggaagatggcctcctcacatgccatggaccgggtcctgacaactgtacaaagtgctctcattttaaagatggcccaaactgtgtggaaaaatgtccagatggcttacagggggcaaacagtttcattttcaagtatgctgatccagatcgggagtgccacccatgccatccaaactgcacccaagggtgtaacggtcccactagtcatgactgcatttactacccatggacgggccattccactttaccacaacatgctagaactcccctgattgcagctggagtaattggtgggctcttcattctggtcattgtgggtctgacatttgctgtttatgttagaaggaagagcatcaaaaagaaaagagccttgagaagattcttggaaacagagttggtggaaccattaactcccagtggcacagcacccaatcaagctcaacttcgtattttgaaagaaactgagctgaagagggtaaaagtccttggctcaggtgcttttggaacggtttataaaggtatttgggtacctgaaggagaaactgtgaagattcctgtggctattaagattcttaatgagacaactggtcccaaggcaaatgtggagttcatggatgaagctctgatcatggcaagtatggatcatccacacctagtccggttgctgggtgtgtgtctgagcccaaccatccagctggttactcaacttatgccccatggctgcctgttggagtatgtccacgagcacaaggataacattggatcacaactgctgcttaactggtgtgtccagatagctaagggaatgatgtacctggaagaaagacgactcgttcatcgggatttggcagcccgtaatgtcttagtgaaatctccaaaccatgtgaaaatcacagattttgggctagccagactcttggaaggagatgaaaaagagtacaatgctgatggaggaaagatgccaattaaatggatggctctggagtgtatacattacaggaaattcacccatcagagtgacgtttggagctatggagttactatatgggaactgatgacctttggaggaaaaccctatgatggaattccaacgcgagaaatccctgatttattagagaaaggagaacgtttgcctcagcctcccatctgcactattgacgtttacatggtcatggtcaaatgttggatgattgatgctgacagtagacctaaatttaaggaactggctgctgagttttcaaggatggctcgagaccctcaaagatacctagttattcagggtgatgatcgtatgaagcttcccagtccaaatgacagcaagttctttcagaatctcttggatgaagaggatttggaagatatgatggatgctgaggagtacttggtccctcaggctttcaacatcccacctcccatctatacttccagagcaagaattgactcgaataggagtgaaattggacacagccctcctcctgcctacacccccatgtcaggaaaccagtttgtataccgagatggaggttttgctgctgaacaaggagtgtctgtgccctacagagccccaactagcacaattccagaagctcctgtggcacagggtgctactgctgagatttttgatgactcctgctgtaatggcaccctacgcaagccagtggcaccccatgtccaagaggacagtagcacccagaggtacagtgctgaccccaccgtgtttgccccagaacggagcccacgaggagagctggatgaggaaggttacatgactcctatgcgagacaaacccaaacaagaatacctgaatccagtggaggagaacccttttgtttctcggagaaaaaatggagaccttcaagcattggataatcccgaatatcacaatgcatccaatggtccacccaaggccgaggatgagtatgtgaatgagccactgtacctcaacacctttgccaacaccttgggaaaagctgagtacctgaagaacaacatactgtcaatgccagagaaggccaagaaagcgtttgacaaccctgactactggaaccacagcctgccacctcggagcacccttcagcacccagactacctgcaggagtacagcacaaaatatttttataaacagaatgggcggatccggcctattgtggcagagaatcctgaatacctctctgagttctccctgaagccaggcactgtgctgccgcctccaccttacagacaccggaatactgtggtgtaagctcagttgtggttttttaggtggagagacacacctgctccaatttccccacccccctctctttctctggtggtcttccttctaccccaaggccagtagttttgacacttcccagtggaagatacagagatgcaatgatagttatgtgcttacctaacttgaacattagagggaaagactgaaagagaaagataggaggaaccacaatgtttcttcatttctctgcatgggttggtcaggagaatgaaacagctagagaaggaccagaaaatgtaaggcaatgctgcctactatcaaactagctgtcactttttttctttttctttttctttctttgtttctttcttcctcttctttttttttttttttttaaagcagatggttgaaacacccatgctatctgttcctatctgcaggaactgatgtgtgcatatttagcatccctggaaatcataataaagtttccattagaacaaaagaataacattttctataacatatgatagtgtctgaaattgagaatccagtttctttccccagcagtttctgtcctagcaagtaagaatggccaactcaactttcataatttaaaaatctccattaaagttataactagtaattatgttttcaacactttttggtttttttcattttgttttgctctgaccgattcctttatatttgctcccctatttttggctttaatttctaattgcaaagatgtttacatcaaagcttcttcacagaatttaagcaagaaatattttaatatagtgaaatggccactactttaagtatacaatctttaaaataagaaagggaggctaatatttttcatgctatcaaattatcttcaccctcatcctttacatttttcaacatttttttttctccataaatgacactacttgataggccgttggttgtctgaagagtagaagggaaactaagagacagttctctgtggttcaggaaaactactgatactttcaggggtggcccaatgagggaatccattgaactggaagaaacacactggattgggtatgtctacctggcagatactcagaaatgtagtttgcacttaagctgtaattttatttgttctttttctgaactccattttggattttgaatcaagcaatatggaagcaaccagcaaattaactaatttaagtacatttttaaaaaaagagctaagataaagactgtggaaatgccaaaccaagcaaattaggaaccttgcaacggtatccagggactatgatgagaggccagcacattatcttcatatgtcacctttgctacgcaaggaaatttgttcagttcgtatacttcgtaagaaggaatgcgagtaaggattggcttgaattccatggaatttctagtatgagactatttatatgaagtagaaggtaactctttgcacataaattggtataataaaaagaaaaacacaaacattcaaagcttagggataggtccttgggtcaaaagttgtaaataaatgtgaaacatcttctc

SEQ ID NO: 73749 - DNA, 2459 bp, Homo sapiens
ggagcgagcaagttaaggctcacgcggggaaatagctgcacagtccggcccagagcgccaagcgcacacaccgagcacactcccacacgcgcacacacgcgctcacactcgccccctcctcgggccccggccctggacccgcgggcgcggactcggtcgcccgccctgggagtcgccacaccgcgcgcgccgcgcccgcccccctcgcacccccacgcgcgcccggctgggggatctcctccgcgtgcccgaaagggggatatgccatttggacatgtaattgtcagcacgggatctgagacttccaaaaaatgaagccggcgacaggactttgggtctgggtgagccttctcgtggcggcggggaccgtccagcccagcgattctcagtcagtgtgtgcaggaacggagaataaactgagctctctctctgacctggaacagcagtaccgagccttgcgcaagtactatgaaaactgtgaggttgtcatgggcaacctggagataaccagcattgagcacaaccgggacctctccttcctgcggtctgttcgagaagtcacaggctacgtgttagtggctcttaatcagtttcgttacctgcctctggagaatttacgcattattcgtgggacaaaactttatgaggatcgatatgccttggcaatatttttaaactacagaaaagatggaaactttggacttcaagaacttggattaaagaacttgacagaaatcctaaatggtggagtctatgtagaccagaacaaattcctttgttatgcagacaccattcattggcaagatattgttcggaacccatggccttccaacttgactcttgtgtcaacaaatggtagttcaggatgtggacgttgccataagtcctgtactggccgttgctggggacccacagaaaatcattgccagactttgacaaggacggtgtgtgcagaacaatgtgacggcagatgctacggaccttacgtcagtgactgctgccatcgagaatgtgctggaggctgctcaggacctaaggacacagactgctttgcctgcatgaatttcaatgacagtggagcatgtgttactcagtgtccccaaacctttgtctacaatccaaccacctttcaactggagcacaatttcaatgcaaagtacacatatggagcattctgtgtcaagaaatgtccacataactttgtggtagattccagttcttgtgtgcgtgcctgccctagttccaagatggaagtagaagaaaatgggattaaaatgtgtaaaccttgcactgacatttgcccaaaagcttgtgatggcattggcacaggatcattgatgtcagctcagactgtggattccagtaacattgacaaattcataaactgtaccaagatcaatgggaatttgatctttctagtcactggtattcatggggacccttacaatgcaattgaagccatagacccagagaaactgaacgtctttcggacagtcagagagataacaggtttcctgaacatacagtcatggccaccaaacatgactgacttcagtgttttttctaacctggtgaccattggtggaagagtactctatagtggcctgtccttgcttatcctcaagcaacagggcatcacctctctacagttccagtccctgaaggaaatcagcgcaggaaacatctatattactgacaacagcaacctgtgttattatcataccattaactggacaacactcttcagcacaatcaaccagagaatagtaatccgggacaacagaaaagctgaaaattgtactgctgaaggaatggtgtgcaaccatctgtgttccagtgatggctgttggggacctgggccagaccaatgtctgtcgtgtcgccgcttcagtagaggaaggatctgcatagagtcttgtaacctctatgatggtgaatttcgggagtttgagaatggctccatctgtgtggagtgtgacccccagtgtgagaagatggaagatggcctcctcacatgccatggaccgggtcctgacaactgtacaaagtgctctcattttaaagatggcccaaactgtgtggaaaaatgtccagatggcttacagggggcaaacagtttcattttcaagtatgctgatccagatcgggagtgccacccatgccatccaaactgcacccaagggtgcataggctcaagtattgaagactgcatcggcctgatggataggtgtaacggtcccactagtcatgactgcatttactacccatggacgggccattccactttaccacaacatgctaggtaacatctaccatgtttccattttgtcgctcaaatcctttcctagttatcatgaacaaaaagtactaaccagttgggttaaatttataatatattgtaactcataatatatcaaattggaaagttttgaaagaggcataaaacactttccttctca

SEQ ID NO: 73750 - DNA, 262 bp, Homo sapiens
agaaaacgaaatactagattctgacatttcagtgagatttagttgtcaaatttctggaaggatatttaaaagttcatgcttctttattctttataagaagtttgttttagatcaagtcataagcatatgtttccaggctgccgcaatataataagcccaattcttcgttaggtgagaaattagactgggcaactggagagggtagatggtgtccccgtctttcaggaccgttctatcttcatgaagcccttcatgatttctt

SEQ ID NO: 73751 - DNA, 731 bp, Homo sapiens
ccattaaaggtaactttctggggagtcctatagcactaggccaagccttgggggcatgaacaaagggcctgtcacttggccttgcactgccattacatgagatccagtgtttccaaataggccttggttggaagattgagctttctatacctgccattaggtagattagatagatggcttgatagctctctgggctatacttttaataatatataataatctttgggaaggagatagctattttaaatgcaagcaaagcccagaaactatcaaagtccaaatctttcacatatttaaggagtaattgccacatttgaggttaagggaccacttactatggtgcatttgagaaatatatatgaaacggtgagtcagagccctctgaccatcttcagtctacacataagcagataaaccaccaatataaatcttataggggccagacgaggtggcttatgcctgtaatcccagcactttggggggccaaggcaggaggatagtgtgagcccagaagttcaagaccaggctaggcaacatgttgagaccatgttgtttagtctctactaaaaaatataaaaattagccagcatggtggcacacacctgtagtcccagctacttgggagactgaggcaggaggatcacttgagcccaggaggtggaggctgcagggggctgagatctcaccactccattccagcctgggcaacagagcaagactctgtctcaaaa

SEQ ID NO: 73752 - DNA, 272 bp, Homo sapiens
taaacagcaaagttcaagtaacaataaatacatttagatttagaaagttaagtgtagtgtagtttaacatacattgcttaagaaaacaattgtagatgacattaaactaaaccaagaaacactataaaaaagattttgattttagtataaataaaattccttaataagaaaaataaaccatttcatgatcaagctctgatttacaaagagaggattttagggctaaataaatcaaagagaagtaagccttcccccacatcttctctatttca

SEQ ID NO: 73753 - DNA, 331 bp, Homo sapiens
caggtactgccttatgggattgtcataaatctgctctaattgtagaagggaattgtggaagtttttactacattgattgggaaaacttgaaagagaacaaatgagattaaatccagggtttaaaggtctctctccccacccttctcaaaagagaagatggcttatgctgtatcactaaagtcgtgttacttattttaagtcaagcatatttcctttgaggttgaaactgcttttggtaaagtaggtgcttttgataaagtagatggtaaagcacatgctttcatttttttcctattgagagtattttatttctatctgtactacttgacca

SEQ ID NO: 73754 - DNA, 487 bp, Homo sapiens
ccccagggtttatgtcctttactgacttccacattcctttgatgtcccatgtatgtgactggtccctctggacttgcttctggggacatcatgaacctgactctgtaggatgtggggcattgcccaaatagagagtcacatagtttggaaagaaagagactagctgtgggtacatcagtgtgttagtgatgccaggctgggctcatactctctctctttttttttaatatgataaaatatatagaacataaaatataccattttaaaccattttaaagcatagtttgacattaattacattcacactcttgtgcagccatcaccactattcgtttctaaaacatgtttattccaacagaaactctgtacccattgaaatctcttggtctctttgagggtttctctttttacagtccatgaagttaaagtaggacaggcagtctggaacagcaggaactaaagtgcatgtgctgacagcagttccaat

SEQ ID NO: 73755 - DNA, 590 bp, Homo sapiens
gtaaaactgcccagggaagcttgtgacttaaggaattattttattttctgatcctgataatgcaaagtatgtcaagctagaggctgcagatcctttagttctttggacaaaatataatggacaataaagatgtgccacttatagaggaagcaaaatcatggtacataagcttttgatatttgatattttattattctgggaccagagtcagaaatttaattatcataataagaaaggtgttctttggtcttacctttctgtaccacatcttattacataactttctttttttttagtttccatatgcaacactgatttttttggtgtcacccaggctggaatgcagttgtgagatcttggcacactgcagcctccacctccagggttcaagtgatcctcatgcctcaacctcctgagtagctgggattataggcatatgccaccatgctggctaagttttgtatttttagtagagacggggtttcgccatgttggtcaggctggtctcaaactcctggcatcaagttatccatctgccttggcctcccaaagtgctgggattacaggcatgagccaccgcacccagcctg

SEQ ID NO: 73756 - DNA, 570 bp, Homo sapiens
gcatcattcatgaacagtctgaatagagaccatatgaaagtcagttttaaactaagtacaggcacgcctcagagatattgtgggtctggttccaggccaccacacaataaagtgaatattataataaagtgagtcacatgaattttttggtttcccagtgcatataaaagttaggtttacattataatgatcatctaatggaagtctattaactgagcaatagcattatgttttaaaatatatatacgtatcttaattttaaaatactttattgctaaaaaaatgctgacaatcatctgagcctttacaacttgtaatctttttgctggtggaggatcttgcctcaacattgatggtggctgacttagggtggtgttgctgaaggctggggtggctgtggcagttttttcaaataagacagcagtgaagtttgccacatcagttgactcttcctttcacaagagatttctctgtagcatgcaatcctgtttgatagcatttacccacagtagaacttctttcaaaattggagtcaatcctatcaaactctaccactgcttactctactaa

SEQ ID NO: 73757 - DNA, 641 bp, Homo sapiens
tgttccctccagcacttagttacattcctggtgaggtagaattaatggtgcccaccaaatatttctagctatttgaatcttctgggcctacagtagatttacacttcttggtcccctgtggttggttggggacatgtgaccagttattgctaatgagttataacaaagcgatgtgtgaaacctgtgggccaaaattttaattgtcaatgcaagacccttcagtgtcatctgttctcttggctattgtgactatttgtgtttaggaaaatagctactccctcagctgcatcctaaagtgaagaaaaggtcaacttagagcaaagatttagctgacctatgatggactctgtgagagaacaaggaatacatttttgtcatttaaaaccatggagatatgaggttgtttgctacaaagcaaatcctagcccatcctgattcatacacttgtaaatgacaggtgtttgataaatactgtgaatctaaaatattttgcaaatctattagaagtagcaattaataattttatcatcaattgtaaatgtattacgtaaaattgcaaatgttaaaatcagctgtgcagagagacattgtgatgtaaggtgaagagtgtaggacatagagccagtagggatgggtttgta

SEQ ID NO: 73758 - DNA, 386 bp, Homo sapiens
ttttttaaagcttaattaactttccttctgtatatataacctataataatgacaaacatattgggaaaaaattacccctgctttttccccctttctctctacccccattataaagacatttttagctgtggatgcctcactttgttaggatcagatgccattaatttggcatttttgagaagagtaggtggcaggaaatcaaagctttttgagacattggtcatttctaaaccaaatactcacatatctgctggggaaataggctatttttcttttttcctttttttaaagtaaagtttcctgcttgagcccaggagtttgaggctgcagtgagctatgactgcaccactgcattccagcctgggtgacagaacgagatgctgtct

SEQ ID NO: 73759 - DNA, 747 bp, Homo sapiens
  misc_feature (586)..(586): n is a, c, g, or t
tggcagctgcttctctgttggcccaaagggactatcctccaccagtcacccaaagaggactgtctttaaggatatgagatagcaccctaagaggataaatggacattttcttgtctacaaaaagcctaatgcaacagtagaggacatagggaaatttctttggatggatagagacaagtgcatctctttcttacgaaagaatagaaatgtgattaaaaaggaaaagcctagaaacatctgaacgtgtggaaatgggggtgagtgggctagagaaaggatttctgcatcactttcttcctgtagcaattccatccgagatccctgggacagacctggcctgatgaatagcaggaagcacaccagggagggacaaggtcctgcagacaaccttcaccaccaggctgggacagcgccatggggacccagggcctctgctttggggaaagaccttgctgagggccccatgggcaagaacaagtgtgaagaaccctactatggttttttgcccaatgccctccacaaagccagcgtttgaaggaaaactgtgaggaagaagggacactccatggtgttgttgttgccaccnctggagcagcctgtagcaagaacagtcttggtccaaccaggtcagtgatactttttatgatggggctgtgtgggacctgacctgactcttgctaaccagatttctaaagccatctgcagggtcttttctcctattattccccagggcagggagggcaaaca

SEQ ID NO: 73760 - DNA, 673 bp, Homo sapiens
caaatacatttgcagggttgactgtctttctgtaattgatttttagtgctgtttcactgtggtcagagactgtgctctgcgtgggattggctattttggtgtttcttgaggccacttttgttgcttagcaactgatcagaatgtgctgattgttgggtgttctgtgactgtttattaggtcaagtatgtaaactgggttgcttaaattttctgtgtccttgctaatctttattttccctgcttaatctatcaattactgaacgaaggtatgtgaacttttccattattatatggattttaaaatttctctttataaatctatcagtttttgatttttctgttttaagactatattgttagaaacatacagattctggattttaaaaatatctttatggtgaattttcattgtcatatatgatagaaattgttcccatgatcacatgataacctctttcaccctaataatgctttttgtcttgtttattttgtctaatgtaagtatagctagaactgttctcttttgattaatatttgcctagtatgttttttcatttatcattttacaaataattttcatcagtatacagataattttcatcagtatacaaacatagtcaatgtataactgagattactaataaatttggatttatttctgtcattacatgtg

SEQ ID NO: 73761 - DNA, 784 bp, Homo sapiens
catcccctgagccaacttggaaagccccctactgagcaacagctccttgggacgccagtgggaagtacactccccctgtcctggactccggagcttcaccctgtcctctcctccaggccctgtcttgcttaccagcctgtgcccagcctatattcagacctcatttccctcttagactttaagcccgtggtagacagcatcttctactctagaaaaatgtgcgcattcctagtcccctcctagagacgttctagttcaggaggtctgggtgggagacttggcagctgtattattttaaagttccccaggggactcggatccctggctgggtttggaagctgctctgtggcacccagtgtggtacccaccattgagccaacatcattgagctctggaggattaacttgaatctgaagttcccattcacagacccaggttccatggctgagaccatgtttcccaaagtgccttgagcaataactggccaggtgctctcaataaaatataaatcggggccaggcgcggtggctcacgcctgtaatcccagcactttgggaggccaatgtgggcagatcacctaaggtcgggagttcaagaccagcccgaccaatatggtgaaaccctgtctctactgaaaacacaaaattagcctggcatggaggcatgtgcctgtagtcccagctactcaggaggctgaggcaggagaatcgcttgaatccaggaggcggagtttgcagtgagccgagatcgcgccattgcactccagcctgggcaacaggagcga

SEQ ID NO: 73762 - DNA, 779 bp, Homo sapiens
tgggtggggattatgttttttatctttttatcttatcactgatgcgttgtagataaccaagcgcttccccccaaaaacttcagccagggaaagataaaccactcagggtttccattgatcaaatggagaaggcaaagcctaatctgaaacaaaatgtattgctgctctgttatccaccatacctctttctttggtaggaaacatagtatcttaaaggctcaaactggagttagccggtctcagaatggctttagttggtcttaattggaaggagtcgagtccacctccgagtatcttgctagcagtcagcccagtggaattgctgaagataaggaactttgcctacggatgaaagataagaaggtagctgctgagttttaaggattgtttggctgttctggggtgctatatgcctagcttcgctagtctggaggacagcgagggaaaatttttagctaagaataacgagaatcattggccacttagtaacatttccactaaattattgaattgtttaaaggaatttagactttgtttctaaaagttgcctttttgagccagttgttgtgatctttgtactaaattgcacttttgctttaggaggtgggggtaacaatattttcttgtttcacaattcaggttattgaatgacttcagatttacagatttaagagattgaattttgttttgtttttattttttatttttttgagagagtctgaagtcagtcgacaggctggagtgcagtggtgcgatctcggctcactgcaacctctgcc

SEQ ID NO: 73763 - DNA, 835 bp, Homo sapiens
attttctgtagagtcagggcttcactatggtctccaggctgctcttaaactcttggcttggagcagttctccttcctgggccttccaaagtgctgagattacaggtgtgagctactgtgcccagcctacattcagagtcttaaaacacgaaaataaatttgtcagaatagtagaggaaaacatttcagatgtaaaaatcaggatatacactaataaaggtataatggtaacaaaattttgcaaattattagtaaataacaactcacttagcatgttgttgaaaagatactattatgaagtagagaataaagtattactttatatgtttttactatatttttaaattttactttgtttccagcagttttgcttatttattttgcgtggaataatttgtgggtgaccctgagacttttgcatggcttgaacctgctgatatctagtgtctccttaagtggtttgttgaggttttagataattagaagtatttctttaaaatgtaaatattccagtaaacattaagcttcatttaaactctccatttataaaataaaagtatatgttattttgtatccatttttataaagattatagtctttatctaagtgttctaagtcattcattttaactaaacatatggatttgtctgcagaacacgacttaaaagtggcttcagaggaaaagcaagaaacgcttgaaagaagtgaaaataaacagccagagattttcaaagttatagaaaaaagaaggatgtgatatatacaaattgcatattgaagggagatattgccacactcaaacaggaataatacacaataaaaaatgacagtgtcaa

SEQ ID NO: 73764 - DNA, 588 bp, Homo sapiens
gggattacaggtgcacgccaccagtcctggccaatttttttgttgctgtattttagtagagatgaggtttcaccatgttgcccaggctggtcttgaactcctgagctcaggagatctgcccacctcagcctcccaaagtgctgggattacaggcgtgagctactgtgcccggctaactgaccaatttcaagaggggatcagtagtagttccattgcgaccagcttgcccaataaagtttaggggacagtggctttatgttttcaccatcagacaaatacctacacaatgacaagcaaaacctttgccaggcagtatcttctgaaagagattcctgcagttatccaaggaaatagccacttaggtcaatggacgtttgcagagtggaagatagtcttcaaagagcaaacccttacagaaaagcaatagtgcctgccccaaatgtatgtttattgtcaaaaacctcaatccctctttttagaaaaattggatagggaaaaattcattaaccctagagaagtaacttagtcctatctttcacccgatttttgtttgaaatgatggtatagcctacctgattgggaaaaaaa

SEQ ID NO: 73765 - DNA, 173 bp, Homo sapiens
cataaggtcaaactcttttacacagataagagaatccagataagcagaaagaaaagaggcatctattcataatccaactatctagagaaaaccattttctttttttaaagtaaataaaaatgaacttattaaaaaaaaccatttatcatttcacaacacatcaataaccaagt

SEQ ID NO: 73766 - DNA, 407 bp, Homo sapiens
acatacttttggaactcctggcctcaagcagtcctcctgcctcagtctcccagtgctggtattacaggcgggagccaccgcacctggctagtaacatacttttcatgacatctctatggatcctctttattcatcattcaaaaagcaattataagcaactactttcaattcattttagaactctgttgttagaggttttggaattcattttaatcatatgtacatttttaaatgaaatggtatcttcatctattaattagggagaaatgaggtcatcaaaccaaactgaataatgtgaaattaaaagcttaattggaagcgcactgtatcatagggatatccaccttactgaagtaccctcaatgttaaatgagatacatatataaatcaccaagctcagtgcttga

SEQ ID NO: 73767 - DNA, 448 bp, Homo sapiens
gaactgtaaggtcgaataaacattttggacttaaggcctaataaaggatataaaccacaaaattaatctcttgttaggcttctctgcttacatttgtatacttgcttacaatcttcaagcaagagaactctgccatctagaaagaagacgtgggcccattctgcaggcccagaggatgcagggacagctgcaggttcacatttctcagtggcatctattcacattttctgattccaagtctcaagatgccatttcttccttaccaaggtcctggttgttgcatgggattgctgaggacgtaaactaggtttcccttaaggtccactgttttgtttttgtttttgagatggagtctcgctcttgttgcccaggctggagtgcaatggcacgatctcagctcactgcaacctctgcctcccgggttcaagggattatcctgcctcagcct

SEQ ID NO: 73768 - DNA, 309 bp, Homo sapiens
agagagagagaagaactagtgttttcctacatcccttacatttacagggtttctctacagtgtgagtttgtacatatctagaaagattcaactgttcaggctttctcacattccttacattgatagtgttactttctcctgtgaatttttacatgttcagttaggcttgaggaaacagcaaaggtttttccacattcttcacatccacagggcttctctctagtgtgttttcaaatgtgcaatacgagctgagaaagaagcaaaggctttcccacactggtcacattcaaagggtttctctcccatatg

SEQ ID NO: 73769 - DNA, 280 bp, Homo sapiens
atctttctgcaggtgaattgtaaccaatttaaagacaggaccaggtcttttaattcatgtttggttaatgacaccatattccgcccccccctccttttttttttttgcctctgttttccttttggtaggccttagattttatccaaccccctactcctccccacacacaacactctagctttcctactcctagggtctgccagcaactaaccttgtgaccttggtcaaattgcttaacctctcagaaactgcttttctatccatagaatggagttgacgc

SEQ ID NO: 73770 - DNA, 233 bp, Homo sapiens
ggatccggttgcagtgagccgagatcatgccactgcattccagcctgggtgacagagcaagactctgtgtcaaaaaaaaaaaaaaaacttgtagtcttaatgctatttcagaacacagaaaaggaaagaaaacttccacactcattttatgaagcaagtgtaatggtaaccccaacctgacaaagactgcacaaaagatactacagttgaggggggggggggggggggggggg

SEQ ID NO: 73771 - DNA, 119 bp, Homo sapiens
ttctgcattttttaaattttctataattagcaatgtattaccatacacatattttttttgagacagggtctcacttcgtcacccaagctggagtacagtggcatgatcttggctcactg

SEQ ID NO: 73772 - DNA, 459 bp, Homo sapiens
tgtcgaccatccaggctggagtgcagtggcgtgatctcggctgactgcaacctctgcctcccgagttcaagcgattctcctgcctcagcctcccaagtagctgggattacaggtgcccaccaccatgcctggctaatttgtttttttttttagtagacgggatttcaccatgttggccaggctggtctcgaactcctgacctcaggtgatctgcctgccttggcctcccaaagtgctgggattacaggcgtgagccactgcaccaggccaggtctgtcttattcatggcccagaacaatgcccagcacagtattcagtaaagtactgaattaataaatgtgcacaaatgaatacataagaaaacattttgcgatgtcttcatgacggtctctgggaccaactgataactgatagcccacttcagtgtacgtcgacgcggccgcgaatttagtagtagta

SEQ ID NO: 73773 - DNA, 1214 bp, Homo sapiens
  misc_feature (276)..(276): n is a, c, g, or t
gaattccgtccaccatctgagtaacagaaattccagaaagaaaaaccacagacagccgggcctggtggctcacgcctgtaatcccagtactttgggaggccgaggcgggtggatcacctgaggtcaggagtttgagaccagcctggccaacatggtaaaaccccgcctctactaaaaatacaaaaattagccgggcgtggtggcagtgcctgtagtcccagctactcgggagtctgaggcaggagaatcgcttgaacctgggaggttgtgagccanggtcaagggcttacagacgctgccagcatcgccgccgccagaggagaaatgtctgaagtaagacccctctccagagacatcttgatggagaccctcctgtatgagcagctcctggaacccccgaccatggaggttcttggcatgactgactctgaagaggacctggaccctatggaggacttcgattctttggaatgcatggagggcagtgacgcattggccctgcggctggcctgcatcggggacgagatggacgtgagcctcagggccccgcgcctggcccagctctccgaggtggccatgcacagcctgggtctggctttcatctacgaccagactgaggacatcagggatgttcttagaagtttcatggacggtttcaccacacttaaggagaacataatgaggttctggagatccccgaaccccgggtcctgggtgtcctgcgaacaggtgctgctggcgctgctgctgctgctggcgctgctgctgccgctgctcagcgggggcctgcacctgctgctcaagtgaggccccggcggctcagggcggggctggccccacccccatgaccactgccctggaggtggcggcctgctgctgttatctttttaactgttttctcatgatgcctttttatatttaaaccccgagatagtgctggaacactgctgaggttttatactcaggttttttgttttttttttattccagttttcgttttttctaaaagatgaattcctatggctctgcaattgtcaccggttaactgtggcctgtgcccaggaagagccattcactcctgcccctgcccacacggcaggtagcagggggagtgctggtcacacccctgtgtgatatgtgatgccctcggcaaagaatctactggaatagattccgaggagcaggagtgctcaataaaatgttggtttccagca

SEQ ID NO: 73774 - DNA, 2554 bp, Homo sapiens
  misc_feature (1195)..(1195): n is a, c, g, or t
  misc_feature (2198)..(2198): n is a, c, g, or t
  misc_feature (2225)..(2225): n is a, c, g, or t
gagatggagtttttcgctcttgtcgcccaggttggagtgtaatggtgtgatctcggctcactgcaaactcctcctcccaggttcaagcgattctcctgcctcagccacccgagtagctggattacaggcgcgcaccaccacacctggctaattttttttgaaacggggtagagacggagttttattaccatgttagtcaggctggtcttgaactcctgacctcatgatctgcccaccttggcctcccaaagtgctgggattacaggtgtaagccaccgcggctggcccatttcatatatttttaaaattttttattgttaatttatttttagagagggggtctcgttgtattgcccaggctggtcttgaactgggctcgtgcgacgtgcccgcctcggcctcccgaagggctgtgatgacagcacagcggtgcctgtgatctatggcttcaatttttcaaggctgccaggtccatgcaggggtgtgtgtgggatgcatccctagaaatcaaaggtcatgtgcgtgtgtgactggtggatgctgatggtcacactaccctccagaaaggcagcaacatgttcagtccaccgtggcgtcctgagctgtgagtggcctctggtctcctctcttctaaggctgttgattgtgttaaccagcttttatggagcccctgctaggtggtggaaaatgggcagtagtgtatgttttcatcctctcagcagccctggaggcccggctgtttctgcaaggctcagaggtgagctggttgttctgcctcacacagcaggggccgagcagggggtggaactgaggtccagcctggctgcaggctcagggcgtttcctgctgggttacactggagttgtgtgcgctccaagggctttgtgccaccccaccctcatggtccagggccaggctgtgactgggagggtggcacgtggaagactggaccagggttttctagctgggcccactcagctggccctccctgtgaccccagcgtggcccctgaccctctcggtttgcctgcctgtgaaacaggaagtgtcagatcccgcctgcttggctttgacaggactgggcgaggtcatgagagtctgagggtccctaccaggagttcgacctcatcctcaggtccagccccatccacctctgcccccaaccccgctctgacactcctgcagcctcggccctngaacacctgctgagggctgagcagaacacatctctacttgcttgtgcttctgggcaacctgggaggggcttgggaggtagatggcgtttccccatcttccagatgagccataggcgagctgtcgagtgcagagctgttcaccaaatgtaggctgctctgtccagaacctgccctccctcccactcggagccctgcaggtgccctcaaggccgtgggtgtggtactcttttctgcacatactagatttgcatcctaacctcttagggtaaaatagggcttctgactggcgcctggtgtttccactggtgagtgtgtaggaggctaagtgcgggctgtagcctgggtggggacacatggctaggtgtgtcttccttcaccaaagaagggtttcaactactcatttgcaagtttgctggaaaaaaaaagataataaaaaccagtccagtttcctggatctgcagctgcagtgacctcacagtgggtcctctgggaataggttgccttcatgtcttcagtcaacaaacatatgtctgctctatgccaggccttgggctgacaaccagaaactgataagagcagcagcccctctcttagcggtttactctgtgccggatcatttcatccccacaacagtcctgtgcaataggtgttactagtatctccattctaattttttttttttctgatatggagtcttgccctgtagcccagcctggagtgcagtggtcagctggagccagaggggagcagagacaggggctgcaggacccccaggaggcccccaagcagactctgagggtccaagaaggtgatgcctgaataggccagcctcatacccatcctctcagtactttgggaggcccaggcgggagttgaagccaggagttccgagacaagcctgggcaacaaagcaagaccctatctctacagcaattctataaaaatgagccaagtgcagtggtacatacctgtcgagttaccctggaggctgaggtgggatgantacctgagcccaggagtttgaggctgnagtgagcatgatcaggccactgcactccagcctgggcaaacgggtgagaccctgtctgtgaaaaaaataataataaaatttaatttttaaaaaaggaccaataggcgtaggcatgggccggtctgaggttggctggtgagctctgcacatttgaagactttggaggcatggcaggaccaggcaccatccatggaaagcatacttgagtgtggttagcgcgggaaccaagattggggtggcagggccacagggggagggcctgttagtggatgtggcacaaccccccacttgtttttgagactgtctcaaaaacaaacaaacaaacaaac

SEQ ID NO: 73775 - DNA, 469 bp, Homo sapiens
tgacgcattggccctgcggctggcctgcatcggggacgagatggacgtgagcctcagggccccgcgcctggcccagctctccgaggtggccatgcacaggtagccggcctatgccctatgcctctacacctggggaggggccctgggcggtgggtggaggccctgaacacagcacagggctgggccctgaggaagctctgtgggggatgtgccttgacactggggctatactgaaacccttggctgcttcccgcacctctcctgggagcccccagctcctggcactcgccccctgccacctgtccctggcattcctgggcaacaaagcagagcccagggcccttttctctctcgccgtcctcattgagcccagatggtacatttccaccgtggtcttaagagggggtgctacgtgagctcggatcctagatcctgggggctgggcctctcagcgagtctccggtggggg

SEQ ID NO: 73776 - DNA, 5162 bp, Homo sapiens
  misc_feature (1195)..(1195): n is a, c, g, or t
  misc_feature (2198)..(2198): n is a, c, g, or t
  misc_feature (2225)..(2225): n is a, c, g, or t
  misc_feature (2533)..(2533): n is a, c, g, or t
  misc_feature (2559)..(2559): n is a, c, g, or t
  misc_feature (2595)..(2595): n is a, c, g, or t
  misc_feature (2614)..(2614): n is a, c, g, or t
  misc_feature (2618)..(2618): n is a, c, g, or t
  misc_feature (2643)..(2643): n is a, c, g, or t
  misc_feature (2676)..(2676): n is a, c, g, or t
  misc_feature (2682)..(2682): n is a, c, g, or t
  misc_feature (2685)..(2685): n is a, c, g, or t
  misc_feature (2749)..(2749): n is a, c, g, or t
  misc_feature (2783)..(2783): n is a, c, g, or t
  misc_feature (3999)..(3999): n is a, c, g, or t
  misc_feature (4168)..(4168): n is a, c, g, or t
  misc_feature (4394)..(4394): n is a, c, g, or t
  misc_feature (4404)..(4404): n is a, c, g, or t
  misc_feature (4556)..(4557): n is a, c, g, or t
gagatggagtttttcgctcttgtcgcccaggttggagtgtaatggtgtgatctcggctcactgcaaactcctcctcccaggttcaagcgattctcctgcctcagccacccgagtagctggattacaggcgcgcaccaccacacctggctaattttttttgaaacggggtagagacggagttttattaccatgttagtcaggctggtcttgaactcctgacctcatgatctgcccaccttggcctcccaaagtgctgggattacaggtgtaagccaccgcggctggcccatttcatatatttttaaaattttttattgttaatttatttttagagagggggtctcgttgtattgcccaggctggtcttgaactgggctcgtgcgacgtgcccgcctcggcctcccgaagggctgtgatgacagcacagcggtgcctgtgatctatggcttcaatttttcaaggctgccaggtccatgcaggggtgtgtgtgggatgcatccctagaaatcaaaggtcatgtgcgtgtgtgactggtggatgctgatggtcacactaccctccagaaaggcagcaacatgttcagtccaccgtggcgtcctgagctgtgagtggcctctggtctcctctcttctaaggctgttgattgtgttaaccagcttttatggagcccctgctaggtggtggaaaatgggcagtagtgtatgttttcatcctctcagcagccctggaggcccggctgtttctgcaaggctcagaggtgagctggttgttctgcctcacacagcaggggccgagcagggggtggaactgaggtccagcctggctgcaggctcagggcgtttcctgctgggttacactggagttgtgtgcgctccaagggctttgtgccaccccaccctcatggtccagggccaggctgtgactgggagggtggcacgtggaagactggaccagggttttctagctgggcccactcagctggccctccctgtgaccccagcgtggcccctgaccctctcggtttgcctgcctgtgaaacaggaagtgtcagatcccgcctgcttggctttgacaggactgggcgaggtcatgagagtctgagggtccctaccaggagttcgacctcatcctcaggtccagccccatccacctctgcccccaaccccgctctgacactcctgcagcctcggccctngaacacctgctgagggctgagcagaacacatctctacttgcttgtgcttctgggcaacctgggaggggcttgggaggtagatggcgtttccccatcttccagatgagccataggcgagctgtcgagtgcagagctgttcaccaaatgtaggctgctctgtccagaacctgccctccctcccactcggagccctgcaggtgccctcaaggccgtgggtgtggtactcttttctgcacatactagatttgcatcctaacctcttagggtaaaatagggcttctgactggcgcctggtgtttccactggtgagtgtgtaggaggctaagtgcgggctgtagcctgggtggggacacatggctaggtgtgtcttccttcaccaaagaagggtttcaactactcatttgcaagtttgctggaaaaaaaaagataataaaaaccagtccagtttcctggatctgcagctgcagtgacctcacagtgggtcctctgggaataggttgccttcatgtcttcagtcaacaaacatatgtctgctctatgccaggccttgggctgacaaccagaaactgataagagcagcagcccctctcttagcggtttactctgtgccggatcatttcatccccacaacagtcctgtgcaataggtgttactagtatctccattctaattttttttttttctgatatggagtcttgccctgtagcccagcctggagtgcagtggtcagctggagccagaggggagcagagacaggggctgcaggacccccaggaggcccccaagcagactctgagggtccaagaaggtgatgcctgaataggccagcctcatacccatcctctcagtactttgggaggcccaggcgggagttgaagccaggagttccgagacaagcctgggcaacaaagcaagaccctatctctacagcaattctataaaaatgagccaagtgcagtggtacatacctgtcgagttaccctggaggctgaggtgggatgantacctgagcccaggagtttgaggctgnagtgagcatgatcaggccactgcactccagcctgggcaaacgggtgagaccctgtctgtgaaaaaaataataataaaatttaatttttaaaaaaggaccaataggcgtaggcatgggccggtctgaggttggctggtgagctctgcacatttgaagactttggaggcatggcaggaccaggcaccatccatggaaagcatacttgagtgtggttagcgcgggaaccaagattggggtggcagggccacagggggagggcctgttagtggatgtggcacaaccccccacttgtttttgagacaagtctngctctgtcacccaggttggagtgcantggcgcggtctcggctcactgcatattctgcctccnggattcaagtgattctccngccncagcctcccaagtagctgggattanaggcgagcgccaccacacctggttaatttttgnattttnagnggagatggcgtttcaccatgttagccaggctagtctcaaactcctaagctcaggtgatccaccngcctccacctctcaaagtgctgggattacaggcntgagccgcactgcaccaggccaggtctagggagccgaacagagcagtgacagggtcagggttgaggctgctaccttgagattaggttggagagagctccactgaaggctggagaccagtaaggcattcagagctggtgccaggtaggagctgacaggactgggcctcccttgggctggtggggtggccaggagagaccagagcaggaggtcgctgctgcaaggaccctcctgggcaggctccccaccttccgctccctggctccacacttttcccatgcagatctgggccctaaggccagcctaggcccagttggtgatgggatctttgccattcatatcaagtcaatctgagggcctgggcccagaggccagatggttaaaggttcagattaggtcccttctttgtggtagagggtaatgggtatttaataaattaatccaaagtgctgtaatcccagtactttgggaggccgaggcgggtggatcacctgaggtcaggagtttgagaccagcctggccaacatggtaaaaccccgcctctactaaaaatacaaaaattagccgggcgtggtggcagtgcctgtagtcccagctactcgggagtctgaggcaggagaatcgcttgaacctgggaggccaggaggcagaggttgcagtgagccaagattgtgccactgccctccagcctccagcaagactcagtatccaaaaacaaagaaagaaagaaagggcccttatgaatcatcttcaagttcctcccttccaagaacagagatgctaggcgacttgcccagaggcacacagccagcatgtagcaggattcatgcctgtgggagctggggttgggggatattgacggctttagcggatcaaaagagctggtgagtagggctatacaatctgggggtcatcctgtgagagagcccccagactgctcagttcttaggggtccagtcatatgctgtctttttgccccagaggagaaatgtctgaagtaagacccctctccagagacatcttgatggagaccctcctgtatgagcagctcctggaacccccgaccatggaggttcttggcatgactgactctgaagaggacctggaccctatggaggacttcgattctttggaatgcatggagggcaggtaggtccccatggcctgccctaccccctgcctgatagtgacttcaggggtgggctggatgagcagacnttctatgagcgggggagcgcctgcagatgcctcccaggcagggcctccgagaggaagatttcccggatgtgggcatggaggcttctgccctgggagcggcttcactttgctgccccaccctcccctgataccagctcacagacccctggacagccagcatgttcacagnctcaagatggacctggggcccctggctgtcaaaatggcacagtgtttgggcctcagggagctagacaggcccttagcgacctgctgaggacatcagggcctcttgaaggaggtgactctgttgccagaaaggggacccgatccagatcccaagagagggttcttagatctcaagcaagaaagaatttgggccacacgcagtggctcgcgcctgtaatcccagcacntagggaggcngaggcaggcggatcacttgaggtcaggagctcgagaccagcctggccaacatggcaaaaccctgtctctactaaaaatacaaaaagtagctgggcctggtggcacatgtctgtagtcccagctagtcgggaggctgaggcaggagaatctcnngaacccaggaggcagaggttgcagtgacccaaggttgcaaaaatgcactccagcctgggcaacagagcgagactccatctcaaaaaaagaaaacctactctataggcagagcagcggcatgggctgctcaactgaatatacttatagttatttcctgattacatgctaaacaaggggtggattattcatgagtttccgggtaaggggtgggcagttcccggaaccgagaattcctcctccttttagacaatatagggcaacttcctgacgttgccgtggcatttgtaaactgtcgtggcactggtgagtgactccaacatgctaatatagttggtgcacaatgaatagtgaggatgactggaggtcacttttgtgcccatcttggctttggtgggctttggctggcgtctttgccgaatcctgttttatcagcagggtctttgtaacctgtatcttatgctgatgtcctatctcatcctgtgacttagaattcctagcctcctgggaatgcaacccagtaggtctcagccttttgttacccagcccctaatcaagatggagtcgctctggttcaactgcctctgacggctctcattttagaaaac

SEQ ID NO: 73777 - DNA, 4369 bp, Homo sapiens
  misc_feature (1195)..(1195): n is a, c, g, or t
  misc_feature (2198)..(2198): n is a, c, g, or t
  misc_feature (2225)..(2225): n is a, c, g, or t
  misc_feature (2533)..(2533): n is a, c, g, or t
  misc_feature (2559)..(2559): n is a, c, g, or t
  misc_feature (2595)..(2595): n is a, c, g, or t
  misc_feature (2614)..(2614): n is a, c, g, or t
  misc_feature (2618)..(2618): n is a, c, g, or t
  misc_feature (2643)..(2643): n is a, c, g, or t
  misc_feature (2676)..(2676): n is a, c, g, or t
  misc_feature (2682)..(2682): n is a, c, g, or t
  misc_feature (2685)..(2685): n is a, c, g, or t
  misc_feature (2749)..(2749): n is a, c, g, or t
  misc_feature (2783)..(2783): n is a, c, g, or t
  misc_feature (3431)..(3431): n is a, c, g, or t
gagatggagtttttcgctcttgtcgcccaggttggagtgtaatggtgtgatctcggctcactgcaaactcctcctcccaggttcaagcgattctcctgcctcagccacccgagtagctggattacaggcgcgcaccaccacacctggctaattttttttgaaacggggtagagacggagttttattaccatgttagtcaggctggtcttgaactcctgacctcatgatctgcccaccttggcctcccaaagtgctgggattacaggtgtaagccaccgcggctggcccatttcatatatttttaaaattttttattgttaatttatttttagagagggggtctcgttgtattgcccaggctggtcttgaactgggctcgtgcgacgtgcccgcctcggcctcccgaagggctgtgatgacagcacagcggtgcctgtgatctatggcttcaatttttcaaggctgccaggtccatgcaggggtgtgtgtgggatgcatccctagaaatcaaaggtcatgtgcgtgtgtgactggtggatgctgatggtcacactaccctccagaaaggcagcaacatgttcagtccaccgtggcgtcctgagctgtgagtggcctctggtctcctctcttctaaggctgttgattgtgttaaccagcttttatggagcccctgctaggtggtggaaaatgggcagtagtgtatgttttcatcctctcagcagccctggaggcccggctgtttctgcaaggctcagaggtgagctggttgttctgcctcacacagcaggggccgagcagggggtggaactgaggtccagcctggctgcaggctcagggcgtttcctgctgggttacactggagttgtgtgcgctccaagggctttgtgccaccccaccctcatggtccagggccaggctgtgactgggagggtggcacgtggaagactggaccagggttttctagctgggcccactcagctggccctccctgtgaccccagcgtggcccctgaccctctcggtttgcctgcctgtgaaacaggaagtgtcagatcccgcctgcttggctttgacaggactgggcgaggtcatgagagtctgagggtccctaccaggagttcgacctcatcctcaggtccagccccatccacctctgcccccaaccccgctctgacactcctgcagcctcggccctngaacacctgctgagggctgagcagaacacatctctacttgcttgtgcttctgggcaacctgggaggggcttgggaggtagatggcgtttccccatcttccagatgagccataggcgagctgtcgagtgcagagctgttcaccaaatgtaggctgctctgtccagaacctgccctccctcccactcggagccctgcaggtgccctcaaggccgtgggtgtggtactcttttctgcacatactagatttgcatcctaacctcttagggtaaaatagggcttctgactggcgcctggtgtttccactggtgagtgtgtaggaggctaagtgcgggctgtagcctgggtggggacacatggctaggtgtgtcttccttcaccaaagaagggtttcaactactcatttgcaagtttgctggaaaaaaaaagataataaaaaccagtccagtttcctggatctgcagctgcagtgacctcacagtgggtcctctgggaataggttgccttcatgtcttcagtcaacaaacatatgtctgctctatgccaggccttgggctgacaaccagaaactgataagagcagcagcccctctcttagcggtttactctgtgccggatcatttcatccccacaacagtcctgtgcaataggtgttactagtatctccattctaattttttttttttctgatatggagtcttgccctgtagcccagcctggagtgcagtggtcagctggagccagaggggagcagagacaggggctgcaggacccccaggaggcccccaagcagactctgagggtccaagaaggtgatgcctgaataggccagcctcatacccatcctctcagtactttgggaggcccaggcgggagttgaagccaggagttccgagacaagcctgggcaacaaagcaagaccctatctctacagcaattctataaaaatgagccaagtgcagtggtacatacctgtcgagttaccctggaggctgaggtgggatgantacctgagcccaggagtttgaggctgnagtgagcatgatcaggccactgcactccagcctgggcaaacgggtgagaccctgtctgtgaaaaaaataataataaaatttaatttttaaaaaaggaccaataggcgtaggcatgggccggtctgaggttggctggtgagctctgcacatttgaagactttggaggcatggcaggaccaggcaccatccatggaaagcatacttgagtgtggttagcgcgggaaccaagattggggtggcagggccacagggggagggcctgttagtggatgtggcacaaccccccacttgtttttgagacaagtctngctctgtcacccaggttggagtgcantggcgcggtctcggctcactgcatattctgcctccnggattcaagtgattctccngccncagcctcccaagtagctgggattanaggcgagcgccaccacacctggttaatttttgnattttnagnggagatggcgtttcaccatgttagccaggctagtctcaaactcctaagctcaggtgatccaccngcctccacctctcaaagtgctgggattacaggcntgagccgcactgcaccaggccaggtctagggagccgaacagagcagtgacagggtcagggttgaggctgctaccttgagattaggttggagagagctccactgaaggctggagaccagtaaggcattcagagctggtgccaggtaggagctgacaggactgggcctcccttgggctggtggggtggccaggagagaccagagcaggaggtcgctgctgcaaggaccctcctgggcaggctccccaccttccgctccctggctccacacttttcccatgcagatctgggccctaaggccagcctaggcccagttggtgatgggatctttgccattcatatcaagtcaatctgagggcctgggcccagaggccagatggttaaaggttcagattaggtcccttctttgtggtagagggtaatgggtatttaataaattaatccaaagtgctgtaatcccagtactttgggaggccgaggcgggtggatcacctgaggtcaggagtttgagaccagcctggccaacatggtaaaaccccgcctctactaaaaatacaaaaattagccgggcgtggtggcagtgcctgtagtcccagctactcgggagtctgaggcaggagaatcgcttgaacctgggaggttgtgagccanggtcaagggcttacagacgctgccagcatcgccgccgccagaggagaaatgtctgaagtaagacccctctccagagacatcttgatggagaccctcctgtatgagcagctcctggaacccccgaccatggaggttcttggcatgactgactctgaagaggacctggaccctatggaggacttcgattctttggaatgcatggagggcagtgacgcattggccctgcggctggcctgcatcggggacgagatggacgtgagcctcagggccccgcgcctggcccagctctccgaggtggccatgcacagcctgggtctggctttcatctacgaccagactgaggacatcagggatgttcttagaagtttcatggacggtttcaccacacttaaggagaacataatgaggttctggagatccccgaaccccgggtcctgggtgtcctgcgaacaggtgctgctggcgctgctgctgctgctggcgctgctgctgccgctgctcagcgggggcctgcacctgctgctcaagtgaggccccggcggctcagggcggggctggccccacccccatgaccactgccctggaggtggcggcctgctgctgttatctttttaactgttttctcatgatgcctttttatatttaaaccccgagatagtgctggaacactgctgaggttttatactcaggttttttgttttttttttattccagttttcgttttttctaaaagatgaattcctatggctctgcaattgtcaccggttaactgtggcctgtgcccaggaagagccattcactcctgcccctgcccacacggcaggtagcagggggagtgctggtcacacccctgtgtgatatgtgatgccctcggcaaagaatctactggaatagattccgaggagcaggagtgctcaataaaatgttggtttccagca

SEQ ID NO: 73778 - DNA, 438 bp, Homo sapiens
gaccgcagcccgctggaggtgccgggggcgaaatgctggcgtctgctcctccgtctcccagaatcctgccctggaaaaaaccagcgccaaccgccggtttaactgaggacggatttaaggcattacgaaagacagctttcccctttgctcggctctccttctctctcctgctgccctgtgaagaggtgtcttctgccataattgaaaatcaaatttaacaactgtttccaccagaaaaccatcatcataagaaccaaaaattaggcgaggactcacagtacctgggtttaacttcatgtcgctgaaagaggcactgaaaaggaagaggaagacagagctcttaccagggggaggcagagatggcacagcaagagacatgcccccagaatgccaccaatgccccaggacaggcccacccatgggaccaggttatcggga

SEQ ID NO: 73779 - DNA, 297 bp, Homo sapiens
atgttagcttgtaattaagctgacttttaaccactgagctccttaaaaaaaatctttttaaatcttatgaccgtagttcagctggaacaaattgctgttattttagaagtaccaagtatcaaaccagaaagggcttgatttaggaaacaaacccaggctattgtggtggaaaaaaagatggcagaacccttagctatggaacagcagcgtgagacgacagccattgctcttttggttggcctgactagcaaaaaggtggccttgttatgtaaataaagccttttaagtagtcaaaaa

SEQ ID NO: 73780 - DNA, 409 bp, Homo sapiens
ggaaggcttatcagagtggccacctagacagaggcatggtagcctgagttcagacctagcctggactttcacccagccagacttcagttgtgcctgtaccttgtgggatgacacatgcccgtctccaactcatgcaggctctcagtgagaggtagttggctccagccagcttgcacctccccactgctggtcttatcctaggaccactgcagggagacgatctctcagtttggggtctttgaaggctcagggagctcctagccagctgactaggctggggtccatcctgataacatgagagagagaagatgtctgtatctctggtgtgtctttacttttcaggccaccaagggttaagaacccagcgtcagccagtgagtagtagacatctgttctccttttgagaaag

SEQ ID NO: 73781 - DNA, 442 bp, Homo sapiens
ggaaggcttatcagagtggccacctagacagaggcatggtagcctgagttcagacctagcctggactttcacccagccagacttcagttgtgcctgtaccttgtgggatgacacatgcccgtctccaactcatgcaggctctcagtgagaggtagttggctccagccagcttgcacctccccactgctggtcttatcctaggaccactgcagggagacgatctctcagtttggggtctttgaaggctcagggagctcctagccagctgactaggctggggtccatcctgataacatgagagagagaagatgtctgtatctctggtgtgtctttacttttcaggccaccaaggaagggaaagccgtggtgagtcctgaactacaggctttctcaaaaggagaacggatgtctactactcactggctgacgctgggttcttaac

SEQ ID NO: 73782 - DNA, 80 bp, Homo sapiens
tggatatgatgactgattacctgagaaataattgatgaaatctcaagaaaattcctctagatagtcaagttctgatccag

SEQ ID NO: 73783 - DNA, 505 bp, Homo sapiens
ttgttttcatcttagtcaagatttcttccatgcagttttcttcctaatttttatatagttaactttatgcaactttttagtttctcgagagactgagaaggtcctttctctctccaaacttgtaagaaaaatttctcgtgcagtacttgtgtgatttcatactttacagttgacaccttgatagacctagtctctatttccttatagggagagcataaacaagaagctttattatttttcagcagtaaccttagttgccccagcgccattactgaataatcacatttttatcatcggtagtgtcatcatcataacacatcagcaaggaagtttttccttcacagtggcacggtggctcactcctgtaatcccagcactttgggaggccgaggcaggtggatcatgaggtcaggagatcgagaccatcctggtgaaacctagtgaaaccccgtctctactaaaaatacaaagtaggagaaaatacttgcaatgaaaaccgtcgacc

SEQ ID NO: 73784 - DNA, 220 bp, Homo sapiens
accataggaccctaaggaacgattgggttgtcatcctcaaacaggatttgctgatattcagggacacccgttcttccgaaatgttgattgggatatgatggagcaaaaacaggtggtacctccctttaaaccaaatatttctggggaatttggtttggacaactttgattctcagtttactaattgtccacaggaagtgcttctaaagtcagaacaggtt

SEQ ID NO: 73785 - DNA, 2312 bp, Homo sapiens
cggggtgtcttgggcccgggcggctgtagaggcggcggcgcctacgggcagtgggaggagccgcgcggttccggctgctccggcgaggcgacccttgggtcggcgctgcgggcgaggtgggcaggtaggtgggcggacggccgcggttctccggcaagcgcaggcggcggagtcccccacggcgcccgaagcgcccccccgcacccccggcctccagcgttgaggcgggggagtgaggagatgccgacccagagggacagcagcaccatgtcccacacggtcgcaggcggcggcagcggggaccattcccaccaggtccgggtgaaagcctactaccgcggggatatcatgataacacattttgaaccttccatctcctttgagggcctttgcaatgaggttcgagacatgtgttcttttgacaacgaacagctcttcaccatgaaatggatagatgaggaaggagacccgtgtacagtatcatctcagttggagttagaagaagcctttagactttatgagctaaacaaggattctgaactcttgattcatgtgttcccttgtgtaccagaacgtcctgggatgccttgtccaggagaagataaatccatctaccgtagaggtgcacgccgctggagaaagctttattgtgccaatggccacactttccaagccaagcgtttcaacaggcgtgctcactgtgccatctgcacagaccgaatatggggacttggacgccaaggatataagtgcatcaactgcaaactcttggttcataagaagtgccataaactcgtcacaattgaatgtgggcggcattctttgccacaggaaccagtgatgcccatggatcagtcatccatgcattctgaccatgcacagacagtaattccatataatccttcaagtcatgagagtttggatcaagttggtgaagaaaaagaggcaatgaacaccagggaaagtggcaaagcttcatccagtctaggtcttcaggattttgatttgctccgggtaataggaagaggaagttatgccaaagtactgttggttcgattaaaaaaaacagatcgtatttatgcaatgaaagttgtgaaaaaagagcttgttaatgatgatgaggatattgattgggtacagacagagaagcatgtgtttgagcaggcatccaatcatcctttccttgttgggctgcattcttgctttcagacagaaagcagattgttctttgttatagagtatgtaaatggaggagacctaatgtttcatatgcagcgacaaagaaaacttcctgaagaacatgccagattttactctgcagaaatcagtctagcattaaattatcttcatgagcgagggataatttatagagatttgaaactggacaatgtattactggactctgaaggccacattaaactcactgactacggcatgtgtaaggaaggattacggccaggagatacaaccagcactttctgtggtactcctaattacattgctcctgaaattttaagaggagaagattatggtttcagtgttgactggtgggctcttggagtgctcatgtttgagatgatggcaggaaggtctccatttgatattgttgggagctccgataaccctgaccagaacacagaggattatctcttccaagttattttggaaaaacaaattcgcataccacgttctctgtctgtaaaagctgcaagtgttctgaagagttttcttaataaggaccctaaggaacgattgggttgtcatcctcaaacaggatttgctgatattcagggacacccgttcttccgaaatgttgattgggatatgatggagcaaaaacaggtggtacctccctttaaaccaaatatttctggggaatttggtttggacaactttgattctcagtttactaatgaacctgtccagctcactccagatgacgatgacattgtgaggaagattgatcagtctgaatttgaaggttttgagtatatcaatcctcttttgatgtctgcagaagaatgtgtctgatcctcatttttcaaccatgtattctactcatgttgccatttaatgcatggataaacttgctgcaagcctggatacaattaaccattttatatttgccacctacaaaaaaacacccaatatcttctcttgtagactatatgaatcaattattacatctgttttactatgaaaaaaaaattaatactactagcttccagacaatcatgtcaaaatttagttgaactggtttttcagtttttaaaaggcctacagatgagtaatgaagttatcttttttgttta

SEQ ID NO: 73786 - DNA, 1221 bp, Homo sapiens
agctttaaaaacttaaaaccactttctaaactgctttttagaaaacttttaaaacaaaaaaaaaattcaatttttttttaatttattattttttttctgagacggagtctcattctgtcacccaggtggaggttgtagtgagctgagatcgtgccactgcatgccagcctgggcgacagagcaagaccctgtcaaaaataataataataataaaggcaattgttctagtgatgttaagtgagcttaatgtatcactgcagatgctgaacttatatgataggtgaaatagaaagggtgaatttaaaacagaactttttatctcattctttctttctgttctttttaataaaaggaaggattacggccaggagatacaaccagcactttctgtggtactcctaattacattgctcctgaaattttaagaggagaagattatggtttcagtgttgactggtgggctcttggagtgctcatgtttgagatgatggcaggaaggtctccatttgatattgttgggagctccgataaccctgaccagaacacagaggattatctcttccaagttattttggaaaaacaaattcgcataccacgttctctgtctgtaaaagctgcaagtgttctgaagagttttcttaataaggaccctaaggaacgattgggttgtcatcctcaaacaggatttgctgatattcagggacacccgttcttccgaaatgttgattgggatatgatggagcaaaaacaggtggtacctccctttaaaccaaatatttctggggaatttggtttggacaactttgattctcagtttactaatgaacctgtccagctcactccagatgacgatgacattgtgaggaagattgatcagtctgaatttgaaggttttgagtatatcaatcctcttttgatgtctgcagaagaatgtgtctgatcctcatttttcaaccatgtattctactcatgttgccatttaatgcatggataaacttgctgcaagcctggatacaattaaccattttatatttgccacctacaaaaaaacacccaatatcttctcttgtagactatatgaatcaattattacatctgttttactatgaaaaaaaaattaatactactagcttccagacaatcatgtcaaaatttagttgaactggtttttcagtttttaaaaggcctacagatgagtaatgaagttatcttttttgttta

SEQ ID NO: 73787 - DNA, 858 bp, Homo sapiens
atgtgataaaatttccagttactaactttcaagaatgcaaagtgtataatttattgctttaaaatttctttctgaaggtttcagtgttgactggtgggctcttggagtgctcatgtttgagatgatggcaggaaggtctccatttgatattgttgggagctccgataaccctgaccagaacacagaggattatctcttccaagttattttggaaaaacaaattcgcataccacgttctctgtctgtaaaagctgcaagtgttctgaagagttttcttaataaggaccctaaggaacgattgggttgtcatcctcaaacaggatttgctgatattcagggacacccgttcttccgaaatgttgattgggatatgatggagcaaaaacaggtggtacctccctttaaaccaaatatttctggggaatttggtttggacaactttgattctcagtttactaatgaacctgtccagctcactccagatgacgatgacattgtgaggaagattgatcagtctgaatttgaaggttttgagtatatcaatcctcttttgatgtctgcagaagaatgtgtctgatcctcatttttcaaccatgtattctactcatgttgccatttaatgcatggataaacttgctgcaagcctggatacaattaaccattttatatttgccacctacaaaaaaacacccaatatcttctcttgtagactatatgaatcaattattacatctgttttactatgaaaaaaaaattaatactactagcttccagacaatcatgtcaaaatttagttgaactggtttttcagtttttaaaaggcctacagatgagtaatgaagttatcttttttgttta

SEQ ID NO: 73788 - DNA, 2222 bp, Homo sapiens
  misc_feature (2215)..(2215): n is a, c, g, or t
cggggtgtcttgggcccgggcggctgtagaggcggcggcgcctacgggcagtgggaggagccgcgcggttccggctgctccggcgaggcgacccttgggtcggcgctgcgggcgaggtgggcaggtaggtgggcggacggccgcggttctccggcaagcgcaggcggcggagtcccccacggcgcccgaagcgcccccccgcacccccggcctccagcgttgaggcgggggagtgaggagatgccgacccagagggacagcagcaccatgtcccacacggtcgcaggcggcggcagcggggaccattcccaccaggtccgggtgaaagcctactaccgcggggatatcatgataacacattttgaaccttccatctcctttgagggcctttgcaatgaggttcgagacatgtgttcttttgacaacgaacagctcttcaccatgaaatggatagatgaggaaggagacccgtgtacagtatcatctcagttggagttagaagaagcctttagactttatgagctaaacaaggattctgaactcttgattcatgtgttcccttgtgtaccagaacgtcctgggatgccttgtccaggagaagataaatccatctaccgtagaggtgcacgccgctggagaaagctttattgtgccaatggccacactttccaagccaagcgtttcaacaggcgtgctcactgtgccatctgcacagaccgaatatggggacttggacgccaaggatataagtgcatcaactgcaaactcttggttcataagaagtgccataaactcgtcacaattgaatgtgggcggcattctttgccacaggaaccagtgatgcccatggatcagtcatccatgcattctgaccatgcacagacagtaattccatataatccttcaagtcatgagagtttggatcaagttggtgaagaaaaagaggcaatgaacaccagggaaagtggcaaagcttcatccagtctaggtcttcaggattttgatttgctccgggtaataggaagaggaagttatgccaaagtactgttggttcgattaaaaaaaacagatcgtatttatgcaatgaaagttgtgaaaaaagagcttgttaatgatgatgaggatattgattgggtacagacagagaagcatgtgtttgagcaggcatccaatcatcctttccttgttgggctgcattcttgctttcagacagaaagcagattgttctttgttatagagtatgtaaatggaggagacctaatgtttcatatgcagcgacaaagaaaacttcctgaagaacatgccagattttactctgcagaaatcagtctagcattaaattatcttcatgagcgagggataatttatagagatttgaaactggacaatgtattactggactctgaaggccacattaaactcactgactacggcatgtgtaaggaaggattacggccaggagatacaaccagcactttctgtggtactcctaattacattgctcctgaaattttaagaggagaagattatggtaataaataaattggtggtattattttagctattgctagatgggtggtaaaatgtggtaccaattgcattacagtacactaatgcattttgacgtgatcttattaatataaggattcttgatcctgttaaaaactacatggagagtcccagactttgaaatcgagacagtgggaccttggcagtatttgggggtaccaagctgaataatattttattagtggcaaacactaaacagtagcaggcactattctaagcagtttacatatattaactaagttaatcctcttaacaaccctgtgaggtaagtactattaattctccttttacagttgaagaaactgacatacggaaagtttaaataactcgcctaaggtcaaggattcagaacagcacccatgtgactccagagtcatgaacccctggaaaatttttcagatttcctgggatatttgccccaggaatctgaaagatggtggaaagattaactgtatctcaggcacccaaagatacacttatcttgagaaaacatttgactttttgggttttggccctctgccttcagcagatataaaggacaatgtggtacttgtgagagctgctcaaagtctgaatccactgtccttcactggtctttatcagctagcaaaagatcaagtgtttaaaggggggaagccccccccanaaaggtg

SEQ ID NO: 73789 - DNA, 1213 bp, Homo sapiens
agctttaaaaacttaaaaccactttctaaactgctttttagaaaacttttaaaacaaaaaaaaaattcaatttttttttaatttattattttttttctgagacggagtctcattctgtcacccaggtggaggttgtagtgagctgagatcgtgccactgcatgccagcctgggcgacagagcaagaccctgtcaaaaataataataataataaaggcaattgttctagtgatgttaagtgagcttaatgtatcactgcagatgctgaacttatatgataggtgaaatagaaagggtgaatttaaaacagaactttttatctcattctttctttctgttctttttaataaaaggaaggattacggccaggagatacaaccagcactttctgtggtactcctaattacattgctcctgaaattttaagaggagaagattatggtaataaataaattggtggtattattttagctattgctagatgggtggtaaaatgtggtaccaattgcattacagtacactaatgcattttgacgtgatcttattaatataaggattcttgatcctgttaaaaactacatggagagtcccagactttgaaatcgagacagtgggaccttggcagtatttgggggtaccaagctgaataatattttattagtggcaaacactaaacagtagcaggcactattctaagcagtttacatatattaactaagttaatcctcttaacaaccctgtgaggtaagtactattaattctccttttacagttgaagaaactgacatacggaaagtttaaataactcgcctaaggtcaaggattcagaacagcacccatgtgactccagagtcatgaacccctggaaaatttttcagatttcctgggatatttgccccaggaatctgaaagatggtggaaagattaactgtatctcaggcacccaaagatacacttatcttgagaaaacatttgactttttgggttttggccctctgccttcagcagatataaaggacaatgtggtacttgtgagagctgctcaaagtctgaatccactgtccttcactggtctttatcagctagcaaaagatcaagtttaagaccaaggaggcaggagaatggcgtgaacccgggaggcggacgcttgcagtgaaccgagattgtgccactgcactccagcctgggcgacagagtgaaactctgtctcaaaa

SEQ ID NO: 73790 - DNA, 2483 bp, Homo sapiens
cggggtgtcttgggcccgggcggctgtagaggcggcggcgcctacgggcagtgggaggagccgcgcggttccggctgctccggcgaggcgacccttgggtcggcgctgcgggcgaggtgggcaggtaggtgggcggacggccgcggttctccggcaagcgcaggcggcggagtcccccacggcgcccgaagcgcccccccgcacccccggcctccagcgttgaggcgggggagtgaggagatgccgacccagagggacagcagcaccatgtcccacacggtcgcaggcggcggcagcggggaccattcccaccaggtccgggtgaaagcctactaccgcggggatatcatgataacacattttgaaccttccatctcctttgagggcctttgcaatgaggttcgagacatgtgttcttttgacaacgaacagctcttcaccatgaaatggatagatgaggaaggagacccgtgtacagtatcatctcagttggagttagaagaagcctttagactttatgagctaaacaaggattctgaactcttgattcatgtgttcccttgtgtaccagaacgtcctgggatgccttgtccaggagaagataaatccatctaccgtagaggtgcacgccgctggagaaagctttattgtgccaatggccacactttccaagccaagcgtttcaacaggcgtgctcactgtgccatctgcacagaccgaatatggggacttggacgccaaggatataagtgcatcaactgcaaactcttggttcataagaagtgccataaactcgtcacaattgaatgtgggcggcattctttgccacaggaaccagtgatgcccatggatcagtcatccatgcattctgaccatgcacagacagtaattccatataatccttcaagtcatgagagtttggatcaagttggtgaagaaaaagaggcaatgaacaccagggaaagtggcaaagcttcatccagtctaggtcttcaggattttgatttgctccgggtaataggaagaggaagttatgccaaagtactgttggttcgattaaaaaaaacagatcgtatttatgcaatgaaagttgtgaaaaaagagcttgttaatgatgatgaggatattgattgggtacagacagagaagcatgtgtttgagcaggcatccaatcatcctttccttgttgggctgcattcttgctttcagacagaaagcagattgttctttgttatagagtatgtaaatggaggagacctaatgtttcatatgcagcgacaaagaaaacttcctgaagaacatgccagattttactctgcagaaatcagtctagcattaaattatcttcatgagcgagggataatttatagagatttgaaactggacaatgtattactggactctgaaggccacattaaactcactgactacggcatgtgtaaggaaggattacggccaggagatacaaccagcactttctgtggtactcctaattacattgctcctgaaattttaagaggagaagattatggtttcagtgttgactggtgggctcttggagtgctcatgtttgagatgatggcaggaaggtctccatttgatattgttgggagctccgataaccctgaccagaacacagaggattatctcttccaagttattttggaaaaacaaattcgcataccacgttctctgtctgtaaaagctgcaagtgttctgaagagttttcttaataaggaccctaaggaacgattgggttgtcatcctcaaacaggatttgctgatattcagggacacccgttcttccgaaatgttgattgggatatgatggagcaaaaacaggtggtacctccctttaaaccaaatatttctggggaatttggtttggacaactttgattctcagtttactaatgaacctgtccagctcactccagatgacgatgacattgtgaggaagattgatcagtctgaatttgaaggttttgagtatatcaatcctcttttgatgtctgcagaagaatgtgtctgatcctcatttttcaaccatgtattctactcatgttgccatttaatgcatggataaacttgctgcaagcctggatacaattaaccattttatatttgccacctacaaaaaaacacccaatatcttctcttgtagactatatgaatcaattattacatctgttttactatgaaaaaaaaattaatactactagcttccagacaatcatgtcaaaatttagttgaactggtttttcagtttttaaaaggcctacagatgagtaatgaagttatcttttttgtttaaaaaaaaaaaaaaacactgcattaaaaaagtatctgttgcattaaggcacatagtgggattacatcataaacctcccataatttttgtcattctgtgttaaatcatttcagggtttaattttgaaataaaagattaatataaaatgcaccaactttttatattacctatta

SEQ ID NO: 73791 - DNA, 1449 bp, Homo sapiens
ataggtacaactaggtgttagaaatataatgtactacgcaaagcatttcccattataactctgatacaaatgttctcaacaggcaatgaacaccagggaaagtggcaaagcttcatccagtctaggtcttcaggattttgatttgctccgggtaataggaagaggaagttatgccaaagtactgttggttcgattaaaaaaaacagatcgtatttatgcaatgaaagttgtgaaaaaagagcttgttaatgatgatgaggatattgattgggtacagacagagaagcatgtgtttgagcaggcatccaatcatcctttccttgttgggctgcattcttgctttcagacagaaagcagattgttctttgttatagagtatgtaaatggaggagacctaatgtttcatatgcagcgacaaagaaaacttcctgaagaacatgccagattttactctgcagaaatcagtctagcattaaattatcttcatgagcgagggataatttatagagatttgaaactggacaatgtattactggactctgaaggccacattaaactcactgactacggcatgtgtaaggaaggattacggccaggagatacaaccagcactttctgtggtactcctaattacattgctcctgaaattttaagaggagaagattatggtttcagtgttgactggtgggctcttggagtgctcatgtttgagatgatggcaggaaggtctccatttgatattgttgggagctccgataaccctgaccagaacacagaggattatctcttccaagttattttggaaaaacaaattcgcataccacgttctctgtctgtaaaagctgcaagtgttctgaagagttttcttaataaggaccctaaggaacgattgggttgtcatcctcaaacaggatttgctgatattcagggacacccgttcttccgaaatgttgattgggatatgatggagcaaaaacaggtggtacctccctttaaaccaaatatttctggggaatttggtttggacaactttgattctcagtttactaatgaacctgtccagctcactccagatgacgatgacattgtgaggaagattgatcagtctgaatttgaaggttttgagtatatcaatcctcttttgatgtctgcagaagaatgtgtctgatcctcatttttcaaccatgtattctactcatgttgccatttaatgcatggataaacttgctgcaagcctggatacaattaaccattttatatttgccacctacaaaaaaacacccaatatcttctcttgtagactatatgaatcaattattacatctgttttactatgaaaaaaaaattaatactactagcttccagacaatcatgtcaaaatttagttgaactggtttttcagtttttaaaaggcctacagatgagtaatgaagttatcttttttgttta

SEQ ID NO: 73792 - DNA, 2304 bp, Homo sapiens
cggggtgtcttgggcccgggcggctgtagaggcggcggcgcctacgggcagtgggaggagccgcgcggttccggctgctccggcgaggcgacccttgggtcggcgctgcgggcgaggtgggcaggtaggtgggcggacggccgcggttctccggcaagcgcaggcggcggagtcccccacggcgcccgaagcgcccccccgcacccccggcctccagcgttgaggcgggggagtgaggagatgccgacccagagggacagcagcaccatgtcccacacggtcgcaggcggcggcagcggggaccattcccaccaggtccgggtgaaagcctactaccgcggggatatcatgataacacattttgaaccttccatctcctttgagggcctttgcaatgaggttcgagacatgtgttcttttgacaacgaacagctcttcaccatgaaatggatagatgaggaaggagacccgtgtacagtatcatctcagttggagttagaagaagcctttagactttatgagctaaacaaggattctgaactcttgattcatgtgttcccttgtgtaccagaacgtcctgggatgccttgtccaggagaagataaatccatctaccgtagaggtgcacgccgctggagaaagctttattgtgccaatggccacactttccaagccaagcgtttcaacaggcgtgctcactgtgccatctgcacagaccgaatatggggacttggacgccaaggatataagtgcatcaactgcaaactcttggttcataagaagtgccataaactcgtcacaattgaatgtgggcggcattctttgccacaggaaccagtgatgcccatggatcagtcatccatgcattctgaccatgcacagacagtaattccatataatccttcaagtcatgagagtttggatcaagttggtgaagaaaaagaggcaatgaacaccagggaaagtggcaaagcttcatccagtctaggtcttcaggattttgatttgctccgggtaataggaagaggaagttatgccaaagtactgttggttcgattaaaaaaaacagatcgtatttatgcaatgaaagttgtgaaaaaagagcttgttaatgatgatgaggatattgattgggtacagacagagaagcatgtgtttgagcaggcatccaatcatcctttccttgttgggctgcattcttgctttcagacagaaagcagattgttctttgttatagagtatgtaaatggaggagacctaatgtttcatatgcagcgacaaagaaaacttcctgaagaacatgccagattttactctgcagaaatcagtctagcattaaattatcttcatgagcgagggataatttatagagatttgaaactggacaatgtattactggactctgaaggccacattaaactcactgactacggcatgtgtaaggaaggattacggccaggagatacaaccagcactttctgtggtactcctaattacattgctcctgaaattttaagaggagaagattatggtaataaataaattggtggtattattttagctattgctagatgggtggtaaaatgtggtaccaattgcattacagtacactaatgcattttgacgtgatcttattaatataaggattcttgatcctgttaaaaactacatggagagtcccagactttgaaatcgagacagtgggaccttggcagtatttgggggtaccaagctgaataatattttattagtggcaaacactaaacagtagcaggcactattctaagcagtttacatatattaactaagttaatcctcttaacaaccctgtgaggtaagtactattaattctccttttacagttgaagaaactgacatacggaaagtttaaataactcgcctaaggtcaaggattcagaacagcacccatgtgactccagagtcatgaacccctggaaaatttttcagatttcctgggatatttgccccaggaatctgaaagatggtggaaagattaactgtatctcaggcacccaaagatacacttatcttgagaaaacatttgactttttgggttttggccctctgccttcagcagatataaaggacaatgtggtacttgtgagagctgctcaaagtctgaatccactgtccttcactggtctttatcagctagcaaaagatcaagtttaagaccaaggaggcaggagaatggcgtgaacccgggaggcggacgcttgcagtgaaccgagattgtgccactgcactccagcctgggcgacagagtgaaactctgtctcaaaa

SEQ ID NO: 73793 - DNA, 372 bp, Homo sapiens
tatcctgcattcttcaaagggtaaacattcacataatttgatcaatgcggggaggcgtacagtgaaaaccaatgctgtcaataatccttgctcatgacaacaagaagaggcccaaaatgaccctccacacgagcgagacgtgagcttttgttgagagatttcagccgaacacatagggtcaaggatgcccactcgggaatatgcccactgcacccacctcctcctagctgtaccctcagttgctgattcagagctggcagctgagggatgggggcacctgtgactttgaaggtggcccttgaggcgggagcttctcctgtgccccgtgggtgccaggacaggaggcccgggcactgggggactccgagggag

SEQ ID NO: 73794 - DNA, 424 bp, Homo sapiens
caaaggagaaattcaacagtgtcaagaaattttttaaaaatactaaagtaattggtacatttaaaaatgtgattttccttaattatacaggttagggaaacagggtaatgtttcaaacactatggttactttacttaacagtagttatattttttaattacttgaaattataagcactatgattacatgggaggcttgctgtaaaggctgccttatcagaagggccttttggctattggtaaccactttccagagtctacggtggaacagcaatatgctgaattacagggaagtgcattttatggtgcgattgtaatgattccacgtgacagtaaatagaagtcctataattttctttatattcactcattcattcattcttagtaaaaataatttaccataaaacttacactgtggagaagca

SEQ ID NO: 73795 - DNA, 601 bp, Homo sapiens
gccagatgtgatgcccataaccctaaattcttgaatgagtatttcctgacaaaaacactttccaacatagtgacagtgcagcatccaaagcaacattcacagcgatgcagtactgccatctaatccggagacccactgaaactgaccagttactgtaactatgtcctttatggcacagaacaaagtcagtctggttcagtatccagcatttagttgtcatctcttgttagtctcctttattctgaaacagttcctcagtctctccttgtctttcatgaccttggcattttgaagaacacaggccagttattttatagaatgtttcctcatgattagattcaggctatacatttttggcaggaataccacagaaatgctggcctaatgatacctttttaaagtttcaagtagccacagcctaggtgtcctaatacattaaaaccacgcaaactcagatgatatggggatgtcaatctaaattacacaagccatttttaaagaaatacagttttgtcatcttcaggggcacgcattaccttgagtttgattaaagttgttgccaagtgtcctttgggaattgacattactaaatagataataa

SEQ ID NO: 73796 - DNA, 1077 bp, Homo sapiens
ctttctcagggggaattgggtttttttacatacaactgagttttcgcttacacgttctttaatttcttttaattcctgtttcatcaccaggctggaatgtagtggtgcaataacagctcactgtagcctcgacctcctgggctcaagccatccccaacctcaccctcccgagtagctgggaccacaggcgtgtgccaccacactcagctaatttatttaaaacaattttttttagagatgaggtctccctttgttgcccagctggtctgaaattcctggtttcaagtgaccctcacacgtcagcctcctaaagaggtgaagttataagcatgaaccattgtggccagcggtgggactgatccttacaaggtcttgtgtgcttcttatctctcttggaaccacgtcatggccatgaaaacaagctcaagctagcctactgaaggatacaagaaccatagaggaaagctgagtcactttagctgaggccataatagactgatcagccccctgccaacaaccagtgatggcagatgcttgatcgggccccagaaagttcatcagaaatgagtgagtcaaggtcacaataactgatcagctgaaccatggactcaggaaaaattttttttaaaggtagttgtttgttttgttttttaacataccagtagctacatagcccatattgcaaatgacatcaaattggacagaatggttactgggttgtaattttggaatgacggattctaagtatcaagaagaatctgaatgggaacaaatgtataattctcatgaagtgctgtacttgattaaaaactcaatacaaaactaagatggtctccagatacaaggatgtaatattttccaatatatttttagcaaactctctggaatagttggttgtacttcggaggctggtctagggaagaatggttagaatcagtctagaaatcatgtcaaattcttatcacttgctatcaaactagctggttcaattccttattagtgatctgcaataagataaaatcttgtgctacaacataaagcaactatctcaataaacacagtttaattcagctaact

SEQ ID NO: 73797 - DNA, 507 bp, Homo sapiens
aaaattaggagccatatgaactaattaattgtatggattaccataaaaatgtattcattcctgcagtgtttctaatattttgctattataaataatacagtgatggtcatttgtgttcagaaaacgataggtaatttcttaattacagcatcaaattttagaaaacttttcactgaactgttatgaatggaaaaatgtaggttagatgaaagcatctattggtagagtcataggtagctaaataacatattagaaaactgtcgaccaatgcatttgtaaggtctattgaggtcttctgtgaaaagcatttgtcaataccatgttcaaatttttaatgaataatttggaaggacacattggcattgtgatggttttatctttgttctcctccagatgcattttcaccttttttctgctttactctaggccagcggtgggactgatccttacaaggtcttgtgtgcttcttatctctcttggaaccacgtcatggccatgaaaacaagc

SEQ ID NO: 73798 - DNA, 340 bp, Homo sapiens
gaaggcaggtcaggagatacagcaaattgggatctgcgaagctgaacttcctcttgttaccagattttactgcttctcagtgccctcctgctgtaaacattcccaccaggtgactccctatgtggggaaacctgttgagtaactttttttttttaactcctaaccatttctgcattacagttctcctgctctggagattttaagagttgaaaactctttgggaattcttgtaaaaagtacattttgtctcatccccaaagaatttcccaggccccttacagaatatggttgtaacaaggcacatacatactctctggcagcagttctggaggtggggctt

SEQ ID NO: 73799 - DNA, 459 bp, Homo sapiens
ttttttgccttgccccccccccccaaaaaaaaaggcctttttaccttctcatccttggagccactggcattagttatgggcctgatagtttaagaaaacttgaaaatgaactatgtgaaccggtattctccaaagtaatattttgataaatagtgtaattctttattacagtaaaaccattgcttaagtgggcaaaactctagaggataggaaaaaacactcttgaaaacaggtggtgatgccctgaaattcagcaaactgcaggggcacgtgttgttctacccaaggtcagagtgtgtcactcaccacttgatgccactcacagaccaccaacttcagaatatctaggtgtaaagctctgtacaaaagttataacagaataatgtaaataaattattatttatattacactattacataatgtaaaggctattaaaacatgtttgtcttcaaaaaatg

SEQ ID NO: 73800 - DNA, 285 bp, Homo sapiens
cttgattaatagagatttgtatttgaaagaatgccaactaacagaaaatttctagtaaaaaatggagtatatcagcaaaattgacagaattatatccaatgtggctggcataaactcccattgagataaatggatgagatagatagatacatacattgatatctactattatagatatctatttatataataactctgtcaatgactaatgttctaactatttgttttggcaagtgaggcacagtgaatcagacataaaaataccaatcattaggatgctggatt

SEQ ID NO: 73801 - DNA, 462 bp, Homo sapiens
gcccactccttgtcacagactctcctggaggctgaaacaggggcagtctgcagagaggagaggtgtagagaggcgcgatttagaaataagaaaaccaaatcgtaaagaagcctaatgtcttgttgcaacatctgaaagaaacaagatgaatatattccactaggtgggaagcttagggtagtgggaagaacatggattcaggactttgagaaacatggatttaaattttgatccccaatgcctctctgcacttcactgttatctataaaatagaggaaataaaaatactatacattcaagtcttaacaccaacagttaactagttgtgtaaccttggacaagttatgtgacctctctgtctgagcattgtcatttgtatatgagatcatggaggttaaatgtccaacctgttgtcactgtgcacctcaaaataataaataaaacatttcatctctcaatcaa

SEQ ID NO: 73802 - DNA, 5300 bp, Homo sapiens
tcctccctcacctccccgacggggcgaggctccatggctgccccctcgctgcacccgtccctggggcctggcatcggctccccgggacagctgcattctcccatcagcaccctgagctcccccatcaacggcatgggcccgcctttctcggtcatcagctcccccatgggcccccactccatgtcggtgcccaccacacccaccctgggcttcagcactggcagcccccagctcagctcacctatgaaccccgtcagcagcagcgaggacatcaagccccccctgggcctcaatggcgtcctcaaggtccccgcccacccctcaggaaacatggcttccttcaccaagcacatctgcgccatctgcggggaccgctcctcaggcaagcactatggagtgtacagctgcgaggggtgcaagggcttcttcaagcggacggtgcgcaaggacctgacctacacctgccgcgacaacaaggactgcctgattgacaagcggcagcggaaccggtgccagtactgccgctaccagaagtgcctggccatgggcatgaagcgggaagccgtgcaggaggagcggcagcgtggcaaggaccggaacgagaatgaggtggagtcgaccagcagcgccaacgaggacatgccggtggagaggatcctggaggctgagctggccgtggagcccaagaccgagacctacgtggaggcaaacatggggctgaaccccagctcgccgaacgaccctgtcaccaacatttgccaagcagccgacaaacagcttttcaccctggtggagtgggccaagcggatcccacacttctcagagctgcccctggacgaccaggtcatcctgctgcgggcaggctggaatgagctgctcatcgcctccttctcccaccgctccatcgccgtgaaggacgggatcctcctggccaccgggctgcacgtccaccggaacagcgcccacagcgcaggggtgggcgccatctttgacagggtgctgacggagcttgtgtccaagatgcgggacatgcagatggacaagacggagctgggctgcctgcgcgccatcgtcctctttaaccctgactccaaggggctctcgaacccggccgaggtggaggcgctgagggagaaggtctatgcgtccttggaggcctactgcaagcacaagtacccagagcagccgggaaggttcgctaagctcttgctccgcctgccggctctgcgctccatcgggctcaaatgcctggaacatctcttcttcttcaagctcatcggggacacacccattgacaccttccttatggagatgctggaggcgccgcaccaaatgacttaggcctgcgggcccatcctttgtgcccacccgttctggccaccctgcctggacgccagctgttcttctcagcctgagccctgtccctgcccttctctgcctggcctgtttggactttggggcacagcctgtcactgctctgcctaagagatgtgttgtcaccctccttatttctgttactacttgtctgtggcccagggcagtggctttcctgaggcagcagccttcgtggcaagaactagcgtgagcccagccaggcgcctccccaccgggctctcaggacaccctgccacaccccacggggcttgggcgactacagggtcttcgggccccagccctggagctgcaggagttgggaacggggcttttgtttccgttgctgtttatcgatgctggttttcagaattcctgtgtggccctcctgtctggagtgacatcttcatctgctctgaatactggtgcccagccagcccgtgacagcttccccctaatcaggaggggacagctgggggcgcaagctggtgtgtcatcagcaaagacctcagccgcctcggggatgagaggggactcgtggggcaagcaagctgccctgtgctctgagtgagggggaaggtagcccctttttccaaagataactcacagttttgccctcgagccaatgagaacatgagctgccctctgtgcaaggtttcggggccacctccaggctgcaggggcgggtcactcgcccccctgttttctctctgccttggtgttctggtttcagactcccgactccccgttcagaccagagtgccccagcccctccccagcctgagtcttctccttgctctgcggggtgggctgagacttgtccttgtttcctgcagggctggccctggctcgggcagggtggggcatcaccacctcactggccttgctggaggcacagggctctgcggacctgcagccatctgtgaggcccgcggggatggggggggaggagggtggcctgttggtttccctcagagggggcaggtggcctggagagagaggggctcaggaactgggagcctggtgggtggggcagatgctccgcggcctggagtggttctgccggggcattggtgggacccctgctcaggccttctctctggctgccagttgtgtctaaaagactcttggaatctgagaacccggagtcgcagcgccctcgggcctgggccacacgcaggccctggtgggaccacccagcctggtattgtccacggacagcgttgttcacccagagccttacttgggagcctcactgaacgcctgctctggttgaaggtggggtgggggcggggcttggggcctccctggctcagcccagtgcggcctggcgctcctcccgcaggctctgcccccgggctccggtggtgcggggccctctcaggttgaactcgcctcttttgcactggaaggtcctccctttggcctgagtacttttcctgttcacgcctcagtcccgtggacccagcctttgtcagtggcaggtgcctgaacagagggtggatgggggggataccggagggggtcttgtcttcccagccgcagtctaggaatgatgcgggggggtggacgccttctccatagtctttccccacctggagcaggggcttcctcagtggtgaggggagctgcctacaggttggaccgggaggcagtggcttggagaggcagctttccagccttggtggggaagaaagtgtccattctttgccttcctggagctcccagccagagctgagcttaggcacccgagtggagcctgcagctgagtctgtgcccgagacaggctgtcagagattccagaagcctctcctccccgccgccctccacccctgcctttcagcgttgtggatccctagaggtggccccctgcccgatccaccgtcctgaggcagagtgttgagcctcatacctgtaccaggtccccggccagctgggcccctcccaggcactgccaggaagccccagctgcccctggcgggtgtggtggaaatggcaggagggtgcaggtactcttggggccccagcggtgggagtgcaaaagacccaacgccaacacctggtgccttttgcagccagcgcccacccatccgtgcccggacccttgggaatgcccgcggctccagaggaaaaagcccagggacggggcctccgttgcggggggtcggctgcttcttgggaactttgtcgtttccggcgctggctggctggctggctgtaaagcactgaagccccccggccgccaacccctgaaagcagaacctggcctccctggccacagcagccttacccaccgctctacgtgtcccgggcacttcccgcagccttcccgtccctttctcatcggccttgtagttgtacagtgctgttggtttgaaaaggtgatgtgtggggagtgcggctcatcactgagtagagaggtagaatttctatttaaccagacctgtagtagtattaccaatccagttcaattaaggtgattttttgtaattattattattttggtgggacaatctttaattttctaaagatagcactaacatcagctcattagccacctgtgcctgtccccgccttggcccggctggatgaagcggcttccccgcagggcccccacttcccagtggctgcttcctggggacccagggcaccccggcaccttcaggcacgctcctcagctggtcacctcccggctttgccgttcagatggggctcctgaggctcaggagtgaagatgccacagagccgggctcccctaggctgcgtcgggcatgcttggaagctggcctgccaggaccttccaccctggggcctgtgtcagccgccggccctccgcaccctggaagcacacggcctctgggaaggacagccctgaccttcggttttccgagcacggtgtttcccaagaattctgggctggcggcctggtggcagtgctggagatgaccccgagcccctccccgtggggcacccaggagggccctgccggaatgtgcagcctgtgggtagtcggctggtgtccctgtcgtggagctggggtgcgtgatctggtgctcgtccacgcaggtgtgtggtgtaaacatgtatgtgctgtacagagagacgcgtgtggagagagccgcacaccagcgccacccaggaaaggcggagcggttaccagtgttttgtgtttatttttaatcaagacgtttcccctgttttcctataaatttgcttcgtgtaagcaagtacataaggaccctcctttggtgaaatccgggttcgaatgaatatctcaaggcaggagatgcatctattttaagatgctttggagcagacagctttagccgttcccaatccttagcaatgccttagctgggacgcatagctaatactttagagaggatgacagatccataaagagagtaaagataagagaaaatgtctaaagcatctggaaaggtaaaaaaaaaaaatctatttttgtacaaatgtaattttatccctcatgtatacttggatatggcggggggagggctgggactgtttcgtttctgcttctagagattgaggtgaaagcttcgtccgagaaacgccaggacagacgatggcagaggagagggctcctgtgacggcggcgaggcttgggaggaaaccgccgcaatgggggtgtcttccctcggggcaggagggtgggcctgaggctttcaagggttttcttccctttcgagtaatttttaaagccttgctctgttgtgtcctgttgccggctctggccttcctgtgactgactgtgaagtggcttctccgtacgattgtctctgaaacatcgtggccgcaggtgccagggtttgatggacagtagcattagaattgtggaaaaggaacacgcaaagggagaagtgtgagaggagaaacaaaatatgagcgtttaaaatacatcgccattc

SEQ ID NO: 73803 - DNA, 4775 bp, Homo sapiens
tcctccctcacctccccgacggggcgaggctccatggctgccccctcgctgcacccgtccctggggcctggcatcggctccccgggacagctgcattctcccatcagcaccctgagctcccccatcaacggcatgggcccgcctttctcggtcatcagctcccccatgggcccccactccatgtcggtgcccaccacacccaccctgggcttcagcactggcagcccccagctcagctcacctatgaaccccgtcagcagcagcgaggacatcaagccccccctgggcctcaatggcgtcctcaaggtccccgcccacccctcaggaaacatggcttccttcaccaagcacatctgcgccatctgcggggaccgctcctcaggcaagcactatggagtgtacagctgcgaggggtgcaagggcttcttcaagcggacggtgcgcaaggacctgacctacacctgccgcgacaacaaggactgcctgattgacaagcggcagcggaaccggtgccagtactgccgctaccagaagtgcctggccatgggcatgaagcgggaagactccaaggggctctcgaacccggccgaggtggaggcgctgagggagaaggtctatgcgtccttggaggcctactgcaagcacaagtacccagagcagccgggaaggttcgctaagctcttgctccgcctgccggctctgcgctccatcgggctcaaatgcctggaacatctcttcttcttcaagctcatcggggacacacccattgacaccttccttatggagatgctggaggcgccgcaccaaatgacttaggcctgcgggcccatcctttgtgcccacccgttctggccaccctgcctggacgccagctgttcttctcagcctgagccctgtccctgcccttctctgcctggcctgtttggactttggggcacagcctgtcactgctctgcctaagagatgtgttgtcaccctccttatttctgttactacttgtctgtggcccagggcagtggctttcctgaggcagcagccttcgtggcaagaactagcgtgagcccagccaggcgcctccccaccgggctctcaggacaccctgccacaccccacggggcttgggcgactacagggtcttcgggccccagccctggagctgcaggagttgggaacggggcttttgtttccgttgctgtttatcgatgctggttttcagaattcctgtgtggccctcctgtctggagtgacatcttcatctgctctgaatactggtgcccagccagcccgtgacagcttccccctaatcaggaggggacagctgggggcgcaagctggtgtgtcatcagcaaagacctcagccgcctcggggatgagaggggactcgtggggcaagcaagctgccctgtgctctgagtgagggggaaggtagcccctttttccaaagataactcacagttttgccctcgagccaatgagaacatgagctgccctctgtgcaaggtttcggggccacctccaggctgcaggggcgggtcactcgcccccctgttttctctctgccttggtgttctggtttcagactcccgactccccgttcagaccagagtgccccagcccctccccagcctgagtcttctccttgctctgcggggtgggctgagacttgtccttgtttcctgcagggctggccctggctcgggcagggtggggcatcaccacctcactggccttgctggaggcacagggctctgcggacctgcagccatctgtgaggcccgcggggatggggggggaggagggtggcctgttggtttccctcagagggggcaggtggcctggagagagaggggctcaggaactgggagcctggtgggtggggcagatgctccgcggcctggagtggttctgccggggcattggtgggacccctgctcaggccttctctctggctgccagttgtgtctaaaagactcttggaatctgagaacccggagtcgcagcgccctcgggcctgggccacacgcaggccctggtgggaccacccagcctggtattgtccacggacagcgttgttcacccagagccttacttgggagcctcactgaacgcctgctctggttgaaggtggggtgggggcggggcttggggcctccctggctcagcccagtgcggcctggcgctcctcccgcaggctctgcccccgggctccggtggtgcggggccctctcaggttgaactcgcctcttttgcactggaaggtcctccctttggcctgagtacttttcctgttcacgcctcagtcccgtggacccagcctttgtcagtggcaggtgcctgaacagagggtggatgggggggataccggagggggtcttgtcttcccagccgcagtctaggaatgatgcgggggggtggacgccttctccatagtctttccccacctggagcaggggcttcctcagtggtgaggggagctgcctacaggttggaccgggaggcagtggcttggagaggcagctttccagccttggtggggaagaaagtgtccattctttgccttcctggagctcccagccagagctgagcttaggcacccgagtggagcctgcagctgagtctgtgcccgagacaggctgtcagagattccagaagcctctcctccccgccgccctccacccctgcctttcagcgttgtggatccctagaggtggccccctgcccgatccaccgtcctgaggcagagtgttgagcctcatacctgtaccaggtccccggccagctgggcccctcccaggcactgccaggaagccccagctgcccctggcgggtgtggtggaaatggcaggagggtgcaggtactcttggggccccagcggtgggagtgcaaaagacccaacgccaacacctggtgccttttgcagccagcgcccacccatccgtgcccggacccttgggaatgcccgcggctccagaggaaaaagcccagggacggggcctccgttgcggggggtcggctgcttcttgggaactttgtcgtttccggcgctggctggctggctggctgtaaagcactgaagccccccggccgccaacccctgaaagcagaacctggcctccctggccacagcagccttacccaccgctctacgtgtcccgggcacttcccgcagccttcccgtccctttctcatcggccttgtagttgtacagtgctgttggtttgaaaaggtgatgtgtggggagtgcggctcatcactgagtagagaggtagaatttctatttaaccagacctgtagtagtattaccaatccagttcaattaaggtgattttttgtaattattattattttggtgggacaatctttaattttctaaagatagcactaacatcagctcattagccacctgtgcctgtccccgccttggcccggctggatgaagcggcttccccgcagggcccccacttcccagtggctgcttcctggggacccagggcaccccggcaccttcaggcacgctcctcagctggtcacctcccggctttgccgttcagatggggctcctgaggctcaggagtgaagatgccacagagccgggctcccctaggctgcgtcgggcatgcttggaagctggcctgccaggaccttccaccctggggcctgtgtcagccgccggccctccgcaccctggaagcacacggcctctgggaaggacagccctgaccttcggttttccgagcacggtgtttcccaagaattctgggctggcggcctggtggcagtgctggagatgaccccgagcccctccccgtggggcacccaggagggccctgccggaatgtgcagcctgtgggtagtcggctggtgtccctgtcgtggagctggggtgcgtgatctggtgctcgtccacgcaggtgtgtggtgtaaacatgtatgtgctgtacagagagacgcgtgtggagagagccgcacaccagcgccacccaggaaaggcggagcggttaccagtgttttgtgtttatttttaatcaagacgtttcccctgttttcctataaatttgcttcgtgtaagcaagtacataaggaccctcctttggtgaaatccgggttcgaatgaatatctcaaggcaggagatgcatctattttaagatgctttggagcagacagctttagccgttcccaatccttagcaatgccttagctgggacgcatagctaatactttagagaggatgacagatccataaagagagtaaagataagagaaaatgtctaaagcatctggaaaggtaaaaaaaaaaaatctatttttgtacaaatgtaattttatccctcatgtatacttggatatggcggggggagggctgggactgtttcgtttctgcttctagagattgaggtgaaagcttcgtccgagaaacgccaggacagacgatggcagaggagagggctcctgtgacggcggcgaggcttgggaggaaaccgccgcaatgggggtgtcttccctcggggcaggagggtgggcctgaggctttcaagggttttcttccctttcgagtaatttttaaagccttgctctgttgtgtcctgttgccggctctggccttcctgtgactgactgtgaagtggcttctccgtacgattgtctctgaaacatcgtggccgcaggtgccagggtttgatggacagtagcattagaattgtggaaaaggaacacgcaaagggagaagtgtgagaggagaaacaaaatatgagcgtttaaaatacatcgccattc

SEQ ID NO: 73804 - DNA, 4253 bp, Homo sapiens
  misc_feature (1)..(1): n is a, c, g, or t
nttagaggatcccatagagacccaggtctgggtctccataactccaaggggctctcgaacccggccgaggtggaggcgctgagggagaaggtctatgcgtccttggaggcctactgcaagcacaagtacccagagcagccgggaaggttcgctaagctcttgctccgcctgccggctctgcgctccatcgggctcaaatgcctggaacatctcttcttcttcaagctcatcggggacacacccattgacaccttccttatggagatgctggaggcgccgcaccaaatgacttaggcctgcgggcccatcctttgtgcccacccgttctggccaccctgcctggacgccagctgttcttctcagcctgagccctgtccctgcccttctctgcctggcctgtttggactttggggcacagcctgtcactgctctgcctaagagatgtgttgtcaccctccttatttctgttactacttgtctgtggcccagggcagtggctttcctgaggcagcagccttcgtggcaagaactagcgtgagcccagccaggcgcctccccaccgggctctcaggacaccctgccacaccccacggggcttgggcgactacagggtcttcgggccccagccctggagctgcaggagttgggaacggggcttttgtttccgttgctgtttatcgatgctggttttcagaattcctgtgtggccctcctgtctggagtgacatcttcatctgctctgaatactggtgcccagccagcccgtgacagcttccccctaatcaggaggggacagctgggggcgcaagctggtgtgtcatcagcaaagacctcagccgcctcggggatgagaggggactcgtggggcaagcaagctgccctgtgctctgagtgagggggaaggtagcccctttttccaaagataactcacagttttgccctcgagccaatgagaacatgagctgccctctgtgcaaggtttcggggccacctccaggctgcaggggcgggtcactcgcccccctgttttctctctgccttggtgttctggtttcagactcccgactccccgttcagaccagagtgccccagcccctccccagcctgagtcttctccttgctctgcggggtgggctgagacttgtccttgtttcctgcagggctggccctggctcgggcagggtggggcatcaccacctcactggccttgctggaggcacagggctctgcggacctgcagccatctgtgaggcccgcggggatggggggggaggagggtggcctgttggtttccctcagagggggcaggtggcctggagagagaggggctcaggaactgggagcctggtgggtggggcagatgctccgcggcctggagtggttctgccggggcattggtgggacccctgctcaggccttctctctggctgccagttgtgtctaaaagactcttggaatctgagaacccggagtcgcagcgccctcgggcctgggccacacgcaggccctggtgggaccacccagcctggtattgtccacggacagcgttgttcacccagagccttacttgggagcctcactgaacgcctgctctggttgaaggtggggtgggggcggggcttggggcctccctggctcagcccagtgcggcctggcgctcctcccgcaggctctgcccccgggctccggtggtgcggggccctctcaggttgaactcgcctcttttgcactggaaggtcctccctttggcctgagtacttttcctgttcacgcctcagtcccgtggacccagcctttgtcagtggcaggtgcctgaacagagggtggatgggggggataccggagggggtcttgtcttcccagccgcagtctaggaatgatgcgggggggtggacgccttctccatagtctttccccacctggagcaggggcttcctcagtggtgaggggagctgcctacaggttggaccgggaggcagtggcttggagaggcagctttccagccttggtggggaagaaagtgtccattctttgccttcctggagctcccagccagagctgagcttaggcacccgagtggagcctgcagctgagtctgtgcccgagacaggctgtcagagattccagaagcctctcctccccgccgccctccacccctgcctttcagcgttgtggatccctagaggtggccccctgcccgatccaccgtcctgaggcagagtgttgagcctcatacctgtaccaggtccccggccagctgggcccctcccaggcactgccaggaagccccagctgcccctggcgggtgtggtggaaatggcaggagggtgcaggtactcttggggccccagcggtgggagtgcaaaagacccaacgccaacacctggtgccttttgcagccagcgcccacccatccgtgcccggacccttgggaatgcccgcggctccagaggaaaaagcccagggacggggcctccgttgcggggggtcggctgcttcttgggaactttgtcgtttccggcgctggctggctggctggctgtaaagcactgaagccccccggccgccaacccctgaaagcagaacctggcctccctggccacagcagccttacccaccgctctacgtgtcccgggcacttcccgcagccttcccgtccctttctcatcggccttgtagttgtacagtgctgttggtttgaaaaggtgatgtgtggggagtgcggctcatcactgagtagagaggtagaatttctatttaaccagacctgtagtagtattaccaatccagttcaattaaggtgattttttgtaattattattattttggtgggacaatctttaattttctaaagatagcactaacatcagctcattagccacctgtgcctgtccccgccttggcccggctggatgaagcggcttccccgcagggcccccacttcccagtggctgcttcctggggacccagggcaccccggcaccttcaggcacgctcctcagctggtcacctcccggctttgccgttcagatggggctcctgaggctcaggagtgaagatgccacagagccgggctcccctaggctgcgtcgggcatgcttggaagctggcctgccaggaccttccaccctggggcctgtgtcagccgccggccctccgcaccctggaagcacacggcctctgggaaggacagccctgaccttcggttttccgagcacggtgtttcccaagaattctgggctggcggcctggtggcagtgctggagatgaccccgagcccctccccgtggggcacccaggagggccctgccggaatgtgcagcctgtgggtagtcggctggtgtccctgtcgtggagctggggtgcgtgatctggtgctcgtccacgcaggtgtgtggtgtaaacatgtatgtgctgtacagagagacgcgtgtggagagagccgcacaccagcgccacccaggaaaggcggagcggttaccagtgttttgtgtttatttttaatcaagacgtttcccctgttttcctataaatttgcttcgtgtaagcaagtacataaggaccctcctttggtgaaatccgggttcgaatgaatatctcaaggcaggagatgcatctattttaagatgctttggagcagacagctttagccgttcccaatccttagcaatgccttagctgggacgcatagctaatactttagagaggatgacagatccataaagagagtaaagataagagaaaatgtctaaagcatctggaaaggtaaaaaaaaaaaatctatttttgtacaaatgtaattttatccctcatgtatacttggatatggcggggggagggctgggactgtttcgtttctgcttctagagattgaggtgaaagcttcgtccgagaaacgccaggacagacgatggcagaggagagggctcctgtgacggcggcgaggcttgggaggaaaccgccgcaatgggggtgtcttccctcggggcaggagggtgggcctgaggctttcaagggttttcttccctttcgagtaatttttaaagccttgctctgttgtgtcctgttgccggctctggccttcctgtgactgactgtgaagtggcttctccgtacgattgtctctgaaacatcgtggccgcaggtgccagggtttgatggacagtagcattagaattgtggaaaaggaacacgcaaagggagaagtgtgagaggagaaacaaaatatgagcgtttaaaatacatcgccattc

SEQ ID NO: 73805 - DNA, 4857 bp, Homo sapiens
tcctccctcacctccccgacggggcgaggctccatggctgccccctcgctgcacccgtccctggggcctggcatcggctccccgggacagctgcattctcccatcagcaccctgagctcccccatcaacggcatgggcccgcctttctcggtcatcagctcccccatgggcccccactccatgtcggtgcccaccacacccaccctgggcttcagcactggcagcccccagctcagctcacctatgaaccccgtcagcagcagcgaggacatcaagccccccctgggcctcaatggcgtcctcaaggtccccgcccacccctcaggaaacatggcttccttcaccaagcacatctgcgccatctgcggggaccgctcctcaggcaagcactatggagtgtacagctgcgaggggtgcaagggcttcttcaagcggacggtgcgcaaggacctgacctacacctgccgcgacaacaaggactgcctgattgacaagcggcagcggaaccggtgccagtactgccgctaccagaagtgcctggccatgggcatgaagcgggaagccgtgcaggaggagcggcagcgtggcaaggaccggaacgagaatgaggtggagtcgaccagcagcgccaacgaggacatgccggtggagaggatcctggaggctgagctggccgtggagcccaagaccgagacctacgtggaggcaaacatggggctgaaccccagctcgccgaacgaccctgtcaccaacatttgccaagcagccgacaaacagcttttcaccctggtggagtgggccaagcggatcccacacttctcagagctgcccctggacgaccaggtcatcctgctgcgggcaggctggaatgagctgctcatcgcctccttctcccaccgctccatcgccgtgaaggacgggatcctcctggccaccgggctgcacgtccaccggaacagcgcccacagcgcaggggtgggcgccatctttgacagctggcctgtttggactttggggcacagcctgtcactgctctgcctaagagatgtgttgtcaccctccttatttctgttactacttgtctgtggcccagggcagtggctttcctgaggcagcagccttcgtggcaagaactagcgtgagcccagccaggcgcctccccaccgggctctcaggacaccctgccacaccccacggggcttgggcgactacagggtcttcgggccccagccctggagctgcaggagttgggaacggggcttttgtttccgttgctgtttatcgatgctggttttcagaattcctgtgtggccctcctgtctggagtgacatcttcatctgctctgaatactggtgcccagccagcccgtgacagcttccccctaatcaggaggggacagctgggggcgcaagctggtgtgtcatcagcaaagacctcagccgcctcggggatgagaggggactcgtggggcaagcaagctgccctgtgctctgagtgagggggaaggtagcccctttttccaaagataactcacagttttgccctcgagccaatgagaacatgagctgccctctgtgcaaggtttcggggccacctccaggctgcaggggcgggtcactcgcccccctgttttctctctgccttggtgttctggtttcagactcccgactccccgttcagaccagagtgccccagcccctccccagcctgagtcttctccttgctctgcggggtgggctgagacttgtccttgtttcctgcagggctggccctggctcgggcagggtggggcatcaccacctcactggccttgctggaggcacagggctctgcggacctgcagccatctgtgaggcccgcggggatggggggggaggagggtggcctgttggtttccctcagagggggcaggtggcctggagagagaggggctcaggaactgggagcctggtgggtggggcagatgctccgcggcctggagtggttctgccggggcattggtgggacccctgctcaggccttctctctggctgccagttgtgtctaaaagactcttggaatctgagaacccggagtcgcagcgccctcgggcctgggccacacgcaggccctggtgggaccacccagcctggtattgtccacggacagcgttgttcacccagagccttacttgggagcctcactgaacgcctgctctggttgaaggtggggtgggggcggggcttggggcctccctggctcagcccagtgcggcctggcgctcctcccgcaggctctgcccccgggctccggtggtgcggggccctctcaggttgaactcgcctcttttgcactggaaggtcctccctttggcctgagtacttttcctgttcacgcctcagtcccgtggacccagcctttgtcagtggcaggtgcctgaacagagggtggatgggggggataccggagggggtcttgtcttcccagccgcagtctaggaatgatgcgggggggtggacgccttctccatagtctttccccacctggagcaggggcttcctcagtggtgaggggagctgcctacaggttggaccgggaggcagtggcttggagaggcagctttccagccttggtggggaagaaagtgtccattctttgccttcctggagctcccagccagagctgagcttaggcacccgagtggagcctgcagctgagtctgtgcccgagacaggctgtcagagattccagaagcctctcctccccgccgccctccacccctgcctttcagcgttgtggatccctagaggtggccccctgcccgatccaccgtcctgaggcagagtgttgagcctcatacctgtaccaggtccccggccagctgggcccctcccaggcactgccaggaagccccagctgcccctggcgggtgtggtggaaatggcaggagggtgcaggtactcttggggccccagcggtgggagtgcaaaagacccaacgccaacacctggtgccttttgcagccagcgcccacccatccgtgcccggacccttgggaatgcccgcggctccagaggaaaaagcccagggacggggcctccgttgcggggggtcggctgcttcttgggaactttgtcgtttccggcgctggctggctggctggctgtaaagcactgaagccccccggccgccaacccctgaaagcagaacctggcctccctggccacagcagccttacccaccgctctacgtgtcccgggcacttcccgcagccttcccgtccctttctcatcggccttgtagttgtacagtgctgttggtttgaaaaggtgatgtgtggggagtgcggctcatcactgagtagagaggtagaatttctatttaaccagacctgtagtagtattaccaatccagttcaattaaggtgattttttgtaattattattattttggtgggacaatctttaattttctaaagatagcactaacatcagctcattagccacctgtgcctgtccccgccttggcccggctggatgaagcggcttccccgcagggcccccacttcccagtggctgcttcctggggacccagggcaccccggcaccttcaggcacgctcctcagctggtcacctcccggctttgccgttcagatggggctcctgaggctcaggagtgaagatgccacagagccgggctcccctaggctgcgtcgggcatgcttggaagctggcctgccaggaccttccaccctggggcctgtgtcagccgccggccctccgcaccctggaagcacacggcctctgggaaggacagccctgaccttcggttttccgagcacggtgtttcccaagaattctgggctggcggcctggtggcagtgctggagatgaccccgagcccctccccgtggggcacccaggagggccctgccggaatgtgcagcctgtgggtagtcggctggtgtccctgtcgtggagctggggtgcgtgatctggtgctcgtccacgcaggtgtgtggtgtaaacatgtatgtgctgtacagagagacgcgtgtggagagagccgcacaccagcgccacccaggaaaggcggagcggttaccagtgttttgtgtttatttttaatcaagacgtttcccctgttttcctataaatttgcttcgtgtaagcaagtacataaggaccctcctttggtgaaatccgggttcgaatgaatatctcaaggcaggagatgcatctattttaagatgctttggagcagacagctttagccgttcccaatccttagcaatgccttagctgggacgcatagctaatactttagagaggatgacagatccataaagagagtaaagataagagaaaatgtctaaagcatctggaaaggtaaaaaaaaaaaatctatttttgtacaaatgtaattttatccctcatgtatacttggatatggcggggggagggctgggactgtttcgtttctgcttctagagattgaggtgaaagcttcgtccgagaaacgccaggacagacgatggcagaggagagggctcctgtgacggcggcgaggcttgggaggaaaccgccgcaatgggggtgtcttccctcggggcaggagggtgggcctgaggctttcaagggttttcttccctttcgagtaatttttaaagccttgctctgttgtgtcctgttgccggctctggccttcctgtgactgactgtgaagtggcttctccgtacgattgtctctgaaacatcgtggccgcaggtgccagggtttgatggacagtagcattagaattgtggaaaaggaacacgcaaagggagaagtgtgagaggagaaacaaaatatgagcgtttaaaatacatcgccattc

SEQ ID NO: 73806 - DNA, 5326 bp, Homo sapiens
tcctccctcacctccccgacggggcgaggctccatggctgccccctcgctgcacccgtccctggggcctggcatcggctccccgggacagctgcattctcccatcagcaccctgagctcccccatcaacggcatgggcccgcctttctcggtcatcagctcccccatgggcccccactccatgtcggtgcccaccacacccaccctgggcttcagcactggcagcccccagctcagctcacctatgaaccccgtcagcagcagcgaggacatcaagccccccctgggcctcaatggcgtcctcaaggtccccgcccacccctcaggaaacatggcttccttcaccaagcacatctgcgccatctgcggggaccgctcctcaggcaagcactatggagtgtacagctgcgaggggtgcaagggcttcttcaagcggacggtgcgcaaggacctgacctacacctgccgcgacaacaaggactgcctgattgacaagcggcagcggaaccggtgccagtactgccgctaccagaagtgcctggccatgggcatgaagcgggaagccgtgcaggaggagcggcagcgtggcaaggaccggaacgagaatgaggtggagtcgaccagcagcgccaacgaggacatgccggtggagaggatcctggaggctgagctggccgtggagcccaagaccgagacctacgtggaggcaaacatggggctgaaccccagctcgccgaacgaccctgtcaccaacatttgccaagcagccgacaaacagcttttcaccctggtggagtgggccaagcggatcccacacttctcagagctgcccctggacgaccaggtcatcctgctgcgggcaggctggaatgagctgctcatcgcctccttctcccaccgctccatcgccgtgaaggacgggatcctcctggccaccgggctgcacgtccaccggaacagcgcccacagcgcaggggtgggcgccatctttgacagggtgctgacggagcttgtgtccaagatgcgggacatgcagatggacaagacggagctgggctgcctgcgcgccatcgtcctctttaaccctgactccaaggggctctcgaacccggccgaggtggaggcgctgagggagaaggtctatgcgtccttggaggcctactgcaagcacaagtacccagagcagccgggaaggttcgctaagctcttgctccgcctgccggctctgcgctccatcgggctcaaatgcctggaacatctcttcttcttcaagctcatcggggacacacccattgacaccttccttatggagatgctggaggcgccgcaccaaatgacttaggcctgcgggcccatcctttgtgcccacccgttctggccaccctgcctggacgccagctgttcttctcagcctgagccctgtccctgcccttctctgcctggcctgtttggactttggggcacagcctgtcactgctctgcctaagagatgtgttgtcaccctccttatttctgttactacttgtctgtggcccagggcagtggctttcctgaggcagcagccttcgtggcaagaactagcgtgagcccagccaggcgcctccccaccgggctctcaggacaccctgccacaccccacggggcttgggcgactacagggtcttcgggccccagccctggagctgcaggagttgggaacggggcttttgtttccgttgctgtttatcgatgctggttttcagaattcctgtgtggccctcctgtctggagtgacatcttcatctgctctgaatactggtgcccagccagcccgtgacagcttccccctaatcaggaggggacagctgggggcgcaagctggtgtgtcatcagcaaagacctcagccgcctcggggatgagaggggactcgtggggcaagcaagctgccctgtgctctgagtgagggggaaggtagcccctttttccaaagataactcacagttttgccctcgagccaatgagaacatgagctgccctctgtgcaaggtttcggggccacctccaggctgcaggggcgggtcactcgcccccctgttttctctctgccttggtgttctggtttcagactcccgactccccgttcagaccagagtgccccagcccctccccagcctgagtcttctccttgctctgcggggtgggctgagacttgtccttgtttcctgcagggctggccctggctcgggcagggtggggcatcaccacctcactggccttgctggaggcacagggctctgcggacctgcagccatctgtgaggcccgcggggatggggggggaggagggtggcctgttggtttccctcagagggggcaggtggcctggagagagaggggctcaggaactgggagcctggtgggtggggcagatgctccgcggcctggagtggttctgccggggcattggtgggacccctgctcaggccttctctctggctgccagttgtgtctaaaagactcttggaatctgagaacccggagtcgcagcgccctcgggcctgggccacacgcaggccctggtgggaccacccagcctggtattgtccacggacagcgttgttcacccagagccttacttgggagcctcactgaacgcctgctctggttgaaggtggggtgggggcggggcttggggcctccctggctcagcccagtgcggcctggcgctcctcccgcaggctctgcccccgggctccggtggtgcggggccctctcaggttgaactcgcctcttttgcactggaaggtcctccctttggcctgagtacttttcctgttcacgcctcagtcccgtggacccagcctttgtcagtggcaggtgcctgaacagagggtggatgggggggataccggagggggtcttgtcttcccagccgcagtctaggaatgatgcgggggggtggacgccttctccatagtctttccccacctggagcaggggcttcctcagtggtgaggggagctgcctacaggttggaccgggaggcagtggcttggagaggcagctttccagccttggtggggaagaaagtgtccattctttgccttcctggagctcccagccagagctgagcttaggcacccgagtggagcctgcagctgagtctgtgcccgagacaggctgtcagagattccagaagcctctcctccccgccgccctccacccctgcctttcagcgttgtggatccctagaggtggccccctgcccgatccaccgtcctgaggcagagtgttgagcctcatacctgtaccaggtccccggccagctgggcccctcccaggcactgccaggaagccccagctgcccctggcgggtgtggtggaaatggcaggagggtgcaggtactcttggggccccagcggtgggagtgcaaaagacccaacgccaacacctggtgccttttgcagccagcgcccacccatccgtgcccggacccttgggaatgcccgcggctccagaggaaaaagcccagggacggggcctccgttgcggggggtcggctgcttcttgggaactttgtcgtttccggcgctggctggctggctggctgtaaagcactgaagccccccggccgccaacccctgaaagcagaacctggcctccctggccacagcagccttacccaccgctctacgtgtcccgggcacttcccgcagccttcccgtccctttctcatcggccttgtagttgtacagtgctgttggtttgaaaaggtgatgtgtggggagtgcggctcatcactgagtagagaggtagaatttctatttaaccagacctgtagtagtattaccaatccagttcaattaaggtgattttttgtaattattattattttggtgggacaatctttaattttctaaagatagcactaacatcagctcattagccacctgtgcctgtccccgccttggcccggctggatgaagcggcttccccgcagggcccccacttcccagtggctgcttcctggggacccagggcaccccggcaccttcaggcacgctcctcagctggtcacctcccggctttgccgttcagatggggctcctgaggctcaggagtgaagatgccacagagccgggctcccctaggctgcgtcgggcatgcttggaagctggcctgccaggaccttccaccctggggcctgtgtcagccgccggccctccgcaccctggaagcacacggcctctgggaaggacagccctgaccttcggttttccgagcacggtgtttcccaagaattctgggctggcggcctggtggcagtgctggagatgaccccgagcccctccccgtggggcacccaggagggccctgccggaatgtgcagcctgtgggtagtcggctggtgtccctgtcgtggagctggggtgcgtgatctggtgctcgtccacgcaggtgtgtggtgtaaacatgtatgtgctgtacagagagacgcgtgtggagagagccgcacaccagcgccacccaggaaaggcggagcggttaccagtgttttgtgtttatttttaatcaagacgtttcccctgttttcctataaatttgcttcgtgtaagcaagtacataaggaccctcctttggtgaaatccgggttcgaatgaatatctcaaggcaggagatgcatctattttaagatgctttggagcagacagctttagccgttcccaatccttagcaatgccttagctgggacgcatagctaatactttagagaggatgacagatccataaagagagtaaagataagagaaaatgtctaaagcatctggaaaggtaaaaaaaaaaaatctatttttgtacaaatgtaattttatccctcatgtatacttggatatggcggggggagggctgggactgtttcgtttctgcttctagagattgaggtgaaagcttcgtccgagaaacgccaggacagacgatggcagaggagagggctcctgtgacggcggcgaggcttgggaggaaaccgccgcaatgggggtgtcttccctcggggcaggagggtgggcctgaggctttcaagggttttcttccctttcgagtaatttttaaagccttgctctgttgtgtcctgttgccggctctggccttcctgtgactgactgtgaagtggcttctccgtacgattgtctctgaaacatcgtggccgcaggtgccagggtttgatggacagtagcattagaattgtggaaaaggaacacgcaaagggagaagtgtgagaggagaaacaaaatatgagcgtttaaaatacatcgccattcgatagggtaccagctcgatcgtatta

SEQ ID NO: 73807 - DNA, 5243 bp, Homo sapiens
  misc_feature (5230)..(5230): n is a, c, g, or t
tcctccctcacctccccgacggggcgaggctccatggctgccccctcgctgcacccgtccctggggcctggcatcggctccccgggacagctgcattctcccatcagcaccctgagctcccccatcaacggcatgggcccgcctttctcggtcatcagctcccccatgggcccccactccatgtcggtgcccaccacacccaccctgggcttcagcactggcagcccccagctcagctcacctatgaaccccgtcagcagcagcgaggacatcaagccccccctgggcctcaatggcgtcctcaaggtccccgcccacccctcaggaaacatggcttccttcaccaagcacatctgcgccatctgcggggaccgctcctcaggcaagcactatggagtgtacagctgcgaggggtgcaagggcttcttcaagcggacggtgcgcaaggacctgacctacacctgccgcgacaacaaggactgcctgattgacaagcggcagcggaaccggtgccagtactgccgctaccagaagtgcctggccatgggcatgaagcgggaagccgtgcaggaggagcggcagcgtggcaaggaccggaacgagaatgaggtggagtcgaccagcagcgccaacgaggacatgccggtggagaggatcctggaggctgagctggccgtggagcccaagaccgagacctacgtggaggcaaacatggggctgaaccccagctcgccgaacgaccctgtcaccaacatttgccaagcagccgacaaacagcttttcaccctggtggagtgggccaagcggatcccacacttctcagagctgcccctggacgaccaggtcatcctgctgcgggcaggctggaatgagctgctcatcgcctccttctcccaccgctccatcgccgtgaaggacgggatcctcctggccaccgggctgcacgtccaccggaacagcgcccacagcgcaggggtgggcgccatctttgacagggtgctgacggagcttgtgtccaagatgcgggacatgcagatggacaagacggagctgggctgcctgcgcgccatcgtcctctttaaccctgactccaaggggctctcgaacccggccgaggtggaggcgctgagggagaaggtctatgcgtccttggaggcctactgcaagcacaagtacccagagcagccgggaaggttcgctaagctcttgctccgcctgccggctctgcgctccatcgggctcaaatgcctggaacatctcttcttcttcaagctcatcggggacacacccattgacaccttccttatggagatgctggaggcgccgcaccaaatgacttaggcctgcgggcccatcctttgtgcccacccgttctggccaccctgcctggacgccagctgttcttctcagcctgagccctgtccctgcccttctctgcctggcctgtttggactttggggcacagcctgtcactgctctgcctaagagatgtgttgtcaccctccttatttctgttactacttgtctgtggcccagggcagtggctttcctgaggcagcagccttcgtggcaagaactagcgtgagcccagccaggcgcctccccaccgggctctcaggacaccctgccacaccccacggggcttgggcgactacagggtcttcgggccccagccctggagctgcaggagttgggaacggggcttttgtttccgttgctgtttatcgatgctggttttcagaattcctgtgtggccctcctgtctggagtgacatcttcatctgctctgaatactggtgcccagccagcccgtgacagcttccccctaatcaggaggggacagctgggggcgcaagctggtgtgtcatcagcaaagacctcagccgcctcggggatgagaggggactcgtggggcaagcaagctgccctgtgctctgagtgagggggaaggtagcccctttttccaaagataactcacagttttgccctcgagccaatgagaacatgagctgccctctgtgcaaggtttcggggccacctccaggctgcaggggcgggtcactcgcccccctgttttctctctgccttggtgttctggtttcagactcccgactccccgttcagaccagagtgccccagcccctccccagcctgagtcttctccttgctctgcggggtgggctgagacttgtccttgtttcctgcagggctggccctggctcgggcagggtggggcatcaccacctcactggccttgctggaggcacagggctctgcggacctgcagccatctgtgaggcccgcggggatggggggggaggagggtggcctgttggtttccctcagagggggcaggtggcctggagagagaggggctcaggaactgggagcctggtgggtggggcagatgctccgcggcctggagtggttctgccggggcattggtgggacccctgctcaggccttctctctggctgccagttgtgtctaaaagactcttggaatctgagaacccggagtcgcagcgccctcgggcctgggccacacgcaggccctggtgggaccacccagcctggtattgtccacggacagcgttgttcacccagagccttacttgggagcctcactgaacgcctgctctggttgaaggtggggtgggggcggggcttggggcctccctggctcagcccagtgcggcctggcgctcctcccgcaggctctgcccccgggctccggtggtgcggggccctctcaggttgaactcgcctcttttgcactggaaggtcctccctttggcctgagtacttttcctgttcacgcctcagtcccgtggacccagcctttgtcagtggcaggtgcctgaacagagggtggatgggggggataccggagggggtcttgtcttcccagccgcagtctaggaatgatgcgggggggtggacgccttctccatagtctttccccacctggagcaggggcttcctcagtggtgaggggagctgcctacaggttggaccgggaggcagtggcttggagaggcagctttccagccttggtggggaagaaagtgtccattctttgccttcctggagctcccagccagagctgagcttaggcacccgagtggagcctgcagctgagtctgtgcccgagacaggctgtcagagattccagaagcctctcctccccgccgccctccacccctgcctttcagcgttgtggatccctagaggtggccccctgcccgatccaccgtcctgaggcagagtgttgagcctcatacctgtaccaggtccccggccagctgggcccctcccaggcactgccaggaagccccagctgcccctggcgggtgtggtggaaatggcaggagggtgcaggtactcttggggccccagcggtgggagtgcaaaagacccaacgccaacacctggtgccttttgcagccagcgcccacccatccgtgcccggacccttgggaatgcccgcggctccagaggaaaaagcccagggacggggcctccgttgcggggggtcggctgcttcttgggaactttgtcgtttccggcgctggctggctggctggctgtaaagcactgaagccccccggccgccaacccctgaaagcagaacctggcctccctggccacagcagccttacccaccgctctacgtgtcccgggcacttcccgcagccttcccgtccctttctcatcggccttgtagttgtacagtgctgttggtttgaaaaggtgatgtgtggggagtgcggctcatcactgagtagagaggtagaatttctatttaaccagacctgtagtagtattaccaatccagttcaattaaggtgattttttgtaattattattattttggtgggacaatctttaattttctaaagatagcactaacatcagctcattagccacctgtgcctgtccccgccttggcccggctggatgaagcggcttccccgcagggcccccacttcccagtggctgcttcctggggacccagggcaccccggcaccttcaggcacgctcctcagctggtcacctcccggctttgccgttcagatggggctcctgaggctcaggagtgaagatgccacagagccgggctcccctaggctgcgtcgggcatgcttggaagctggcctgccaggaccttccaccctggggcctgtgtcagccgccggccctccgcaccctggaagcacacggcctctgggaaggacagccctgaccttcggttttccgagcacggtgtttcccaagaattctgggctggcggcctggtggcagtgctggagatgaccccgagcccctccccgtggggcacccaggagggccctgccggaatgtgcagcctgtgggtagtcggctggtgtccctgtcgtggagctggggtgcgtgatctggtgctcgtccacgcaggtgtgtggtgtaaacatgtatgtgctgtacagagagacgcgtgtggagagagccgcacaccagcgccacccaggaaaggcggagcggttaccagtgttttgtgtttatttttaatcaagacgtttcccctgttttcctataaatttgcttcgtgtaagcaagtacataaggaccctcctttggtgaaatccgggttcgaatgaatatctcaaggcaggagatgcatctattttaagatgctttggagcagacagctttagccgttcccaatccttagcaatgccttagctgggacgcatagctaatactttagagaggatgacagatccataaagagagtaaagataagagaaaatgtctaaagcatctggaaaggtaaaaaaaaaaaatctatttttgtacaaatgtaattttatccctcatgtatacttggatatggcggggggagggctgggactgtttcgtttctgcttctagagattgaggtgaaagcttcgtccgagaaacgccaggacagacgatggcagaggagagggctcctgtgacggcggcgaggcttgggaggaaaccgccgcaatgggggtgtcttccctcggggcaggagggtgggcctgaggctttcaagggttttcttccctttcgagtaatttttaaagccttgctctgttgtgtcctgttgccggctctggccttcctgtgactgactgtgaagtggcttctccgtacgattgtctctgaaacatcgtggccgcaggtgccagggtttgatggacaccgtgggggtaccgagctngaattcgaatcgg

SEQ ID NO: 73808 - DNA, 1202 bp, Homo sapiens
tcgactcataaaccaatacggtcagtagcgaggccctcccggtgttaattggaagctggcctgccaggaccttccaccctggggcctgtgtcagccgccggccctccgcaccctggaagcacacggcctctgggaaggacagccctgaccttcggttttccgagcacggtgtttcccaagaattctgggctggcggcctggtggcagtgctggagatgaccccgagcccctccccgtggggcacccaggagggccctgccggaatgtgcagcctgtgggtagtcggctggtgtccctgtcgtggagctggggtgcgtgatctggtgctcgtccacgcaggtgtgtggtgtaaacatgtatgtgctgtacagagagacgcgtgtggagagagccgcacaccagcgccacccaggaaaggcggagcggttaccagtgttttgtgtttatttttaatcaagacgtttcccctgttttcctataaatttgcttcgtgtaagcaagtacataaggaccctcctttggtgaaatccgggttcgaatgaatatctcaaggcaggagatgcatctattttaagatgctttggagcagacagctttagccgttcccaatccttagcaatgccttagctgggacgcatagctaatactttagagaggatgacagatccataaagagagtaaagataagagaaaatgtctaaagcatctggaaaggtaaaaaaaaaaaatctatttttgtacaaatgtaattttatccctcatgtatacttggatatggcggggggagggctgggactgtttcgtttctgcttctagagattgaggtgaaagcttcgtccgagaaacgccaggacagacgatggcagaggagagggctcctgtgacggcggcgaggcttgggaggaaaccgccgcaatgggggtgtcttccctcggggcaggagggtgggcctgaggctttcaagggttttcttccctttcgagtaatttttaaagccttgctctgttgtgtcctgttgccggctctggccttcctgtgactgactgtgaagtggcttctccgtacgattgtctctgaaacatcgtggccgcaggtgccagggtttgatggacagtagcattagaattgtggaaaaggaacacgcaaagggagaagtgtgagaggagaaacaaaatatgagcgtttaaaatacatcgccattc

SEQ ID NO: 73809 - DNA, 1938 bp, Homo sapiens
tcctccctcacctccccgacggggcgaggctccatggctgccccctcgctgcacccgtccctggggcctggcatcggctccccgggacagctgcattctcccatcagcaccctgagctcccccatcaacggcatgggcccgcctttctcggtcatcagctcccccatgggcccccactccatgtcggtgcccaccacacccaccctgggcttcagcactggcagcccccagctcagctcacctatgaaccccgtcagcagcagcgaggacatcaagccccccctgggcctcaatggcgtcctcaaggtccccgcccacccctcaggaaacatggcttccttcaccaagcacatctgcgccatctgcggggaccgctcctcaggcaagcactatggagtgtacagctgcgaggggtgcaagggcttcttcaagcggacggtgcgcaaggacctgacctacacctgccgcgacaacaaggactgcctgattgacaagcggcagcggaaccggtgccagtactgccgctaccagaagtgcctggccatgggcatgaagcgggaagccgtgcaggaggagcggcagcgtggcaaggaccggaacgagaatgaggtggagtcgaccagcagcgccaacgaggacatgccggtggagaggatcctggaggctgagctggccgtggagcccaagaccgagacctacgtggaggcaaacatggggctgaaccccagctcgccgaacgaccctgtcaccaacatttgccaagcagccgacaaacagcttttcaccctggtggagtgggccaagcggatcccacacttctcagagctgcccctggacgaccaggtcatcctgctgcgggcaggctggaatgagctgctcatcgcctccttctcccaccgctccatcgccgtgaaggacgggatcctcctggccaccgggctgcacgtccaccggaacagcgcccacagcgcaggggtgggcgccatctttgacagggtgctgacggagcttgtgtccaagatgcgggacatgcagatggacaagacggagctgggctgcctgcgcgccatcgtcctctttaaccctgactccaaggggctctcgaacccggccgaggtggaggcgctgagggagaaggtctatgcgtccttggaggcctactgcaagcacaagtacccagagcagccgggaaggttcgctaagctcttgctccgcctgccggctctgcgctccatcgggctcaaatgcctggaacatctcttcttcttcaagctcatcggggacacacccattgacaccttccttatggagatgctggaggcgccgcaccaaatgacttaggcctgcgggcccatcctttgtgcccacccgttctggccaccctgcctggacgccagctgttcttctcagcctgagccctgtccctgcccttctctgcctggcctgtttggactttggggcacagcctgtcactgctctgcgtaattttatccctcatgtatacttggatatggcggggggagggctgggactgtttcgtttctgcttctagagattgaggtgaaagcttcgtccgagaaacgccaggacagacgatggcagaggagagggctcctgtgacggcggcgaggcttgggaggaaaccgccgcaatgggggtgtcttccctcggggcaggagggtgggcctgaggctttcaagggttttcttccctttcgagtaatttttaaagccttgctctgttgtgtcctgttgccggctctggccttcctgtgactgactgtgaagtggcttctccgtacgattgtctctgaaacatcgtggccgcaggtgccagggtttgatggacagtagcattagaattgtggaaaaggaacacgcaaagggagaagtgtgagaggagaaacaaaatatgagcgtttaaaatacatcgccattc

SEQ ID NO: 73810 - DNA, 1771 bp, Homo sapiens
tcctccctcacctccccgacggggcgaggctccatggctgccccctcgctgcacccgtccctggggcctggcatcggctccccgggacagctgcattctcccatcagcaccctgagctcccccatcaacggcatgggcccgcctttctcggtcatcagctcccccatgggcccccactccatgtcggtgcccaccacacccaccctgggcttcagcactggcagcccccagctcagctcacctatgaaccccgtcagcagcagcgaggacatcaagccccccctgggcctcaatggcgtcctcaaggtccccgcccacccctcaggaaacatggcttccttcaccaagcacatctgcgccatctgcggggaccgctcctcaggcaagcactatggagtgtacagctgcgaggggtgcaagggcttcttcaagcggacggtgcgcaaggacctgacctacacctgccgcgacaacaaggactgcctgattgacaagcggcagcggaaccggtgccagtactgccgctaccagaagtgcctggccatgggcatgaagcgggaagccgtgcaggaggagcggcagcgtggcaaggaccggaacgagaatgaggtggagtcgaccagcagcgccaacgaggacatgccggtggagaggatcctggaggctgagctggccgtggagcccaagaccgagacctacgtggaggcaaacatggggctgaaccccagctcgccgaacgaccctgtcaccaacatttgccaagcagccgacaaacagcttttcaccctggtggagtgggccaagcggatcccacacttctcagagctgcccctggacgaccaggtcatcctgctgcgggcaggctggaatgagctgctcatcgcctccttctcccaccgctccatcgccgtgaaggacgggatcctcctggccaccgggctgcacgtccaccggaacagcgcccacagcgcaggggtgggcgccatctttgacagggtgctgacggagcttgtgtccaagatgcgggacatgcagatggacaagacggagctgggctgcctgcgcgccatcgtcctctttaaccctgactccaaggggctctcgaacccggccgaggtggaggcgctgagggagaaggtctatgcgtccttggaggcctactgcaagcacaagtacccagagcagccgggaaggttcgctaagctcttgctccgcctgccggctctgcgctccatcgggctcaaatgcctggaacatctcttcttcttcaagctcatcggggacacacccattgacaccttccttatggagatgctggaggcgccgcaccaaatgacttaggcctgcgggcccatcctttgtgcccacccgttctggccaccctgcctggacgccagctgttcttctcagcctgagccctgtccctgcccttctctgcctggcctgtttggactttggggcacagcctgtcactgctctgcctaagagatgtgttgtcaccctccttatttctgttactacttgtctgtggcccagggcagtggctttcctgaggcagcagccttcgtggcaagaactagcgtgagggagaaggtctatgcgtccttggaggcctactgcaagcacaagtacccagagcagccgggaaggttcgctaagctcttgctccgcctgccggctctgcgctccttcgggctcaaatgcctggaacatctcttcttcttcaagctcatcggggacacacccattgacacctcctttatgattaacg

SEQ ID NO: 73811 - DNA, 761 bp, Homo sapiens
aaattttataagctgcatagaataggctttaaaatatcagaattaggaaaataaaatatagatggtaaaaattcaaatatttatcaagacttttttcttcactaatgatggggtaaagaatttttaaatggataatataaaacagacagttcaaaaattatttttggaaaatatatgcatcgggaaacataccccacacggtgccatggtttaattattccccagctctacttttgggagcctggaacttgtcagggttgtgaaatagatctcagactattaaggacattcagaaactggctaagccattcaaggaaaatcaggaatttacgtaatatattggactacagtctcaaaggacagagagaaaatcagtcaaatgggttttgatatttttttttcctagaaatgtgtagcaaatgtgattttacaaagcagctaaaaatacaactatctctctggaattgaaaatgtgtaaaataagaccacacactttcaatatgcacaaaatatattttaaatgtttaagttgtattggtaatttactatgttctcctgtagaaaatcataattaaagttggtgctcgtgttgctaaagttttttttctcatgtcaggaacttgcagcttgttctatatagtttggtgaaacaaacaaaacagtttttatctgctgtgacatttaagtttgttgttagctggagttaaatctacatacataaaagtaaaacaataaatatggaaacatcccaaaagtctttc

SEQ ID NO: 73812 - DNA, 463 bp, Homo sapiens
gtagatgggctgtacccaatctgcgaaaggtgccggctgactgtgaactgtctatacctattatcagtatttaggacacctcatcttcttatgttcactgtcacctgtctactcataagagagtatctaagatctatccctttatttgaaagtcaagtgtatttctgtgtctttgccacatcaattttacttaaagacttaattccccaaagccagaatgacaaaatccacagtttagagtcatttcttaaaatgtaaagcctcagtttaattgaagaaagctgttaggggatcttgtggtctgtgacttgaagacaattatttttctgtaacagtaatatcaataacttaaaatgttgcttctctgcctgtaatacatagtaactgtaatcatagcctttctactgaggtctttttctgccatctgataaatcatacagtagatataaactcaccccactcc

SEQ ID NO: 73813 - DNA, 692 bp, Homo sapiens
aaagattattctaatatttttaaaggattattaggtgaaaacagtacaaaagaagccaggagttaactttctgtgtgtttttttttaaatcaaccagttatttgttaaaattattttgttaacttaagatcagacaatcattcagagtgagataaatcactgaaagccctaatgactctgttgtttacaaatcctgggcttgaaatcagactttgcaccaaagagctccctgtgggggcatctttgggctgtatttaaatagtggccccttggccttgtcaccatttgtttaccatcacagcatgtgaggtcatggcctcccagatcaaagtatgctgtcattcctgccacataaaaagcatctgcagtcctaagacataaaaattccagtaggttacttgaaaacattattctagtgaaagtagtcagatacaaaaggccacatgttgtatgactccgttgatatggaatgtcagaattggcaaatccatcaaaagcagattggtggcttaggggaggggtaatgaggagtgcctactgatgggtagggggcttccctttggggtgacagaaatgttctggaactatatagaggtgatggttgcacaacacggggaattcactaagtatcactcatggtacattttgtgttatgtgtgttttaccacaataaaaaagttaaaagctggcca

SEQ ID NO: 73814 - DNA, 482 bp, Homo sapiens
ttaggattcccagaaacgggagcatggtgagacggggagggagagatgctactgacagcattgctctctccctactcctgcttaaatatgggaacaaggagaaattattaacttagccaaatcatacagagtagggtgaaactaggctcaaaaaatgaaatgaagttacatataaatgaatgaacaaataaaaagatatgcaaggccaggcgtggtggctcacacctgtaatcctagcattttgggaggccaaggtgggtggatcatgcagtcaggatatagagaccatcctggccaacatggtgaaaccccgtctctactaaaaatacaaaaattagctgggcgtggtggcatgtgcctgtagtcccagctactctggaggctgagacaggagaatcgcttgaaccagagaggcagaagttgcagtaagccgagatcatgccactgcactcctgcctggcgacagtgcgagactccgtctc

SEQ ID NO: 73815 - DNA, 464 bp, Homo sapiens
caacttttccccaagcccaccaacttggattcagattgcgacatgcaggacaggccagtcattctctctctctgactttctgtttaatcatctgtgggctaattcccccttctctggtgccataaattatgtggctcatagtaggtgcaccatccaaggagaaggtccctttttccaacttgtaatgatcactaattattattgccggctgtcatgtcagcctccttaccagccactttcctttggaaataacttttttattgttccacaaatagtatgtgctcattgtagtacattttttaaaaaccacaaatgagcaaagatttttttaaaaccttaaatgtctggccgggtgtggtggctcatccctataatcctacactttgggaggccaaggtgggcggatcacttgagctcaggagtttaagaccagcctgggaaatgtggtaaaactccgactctat

SEQ ID NO: 73816 - DNA, 766 bp, Homo sapiens
ctccccaaaacaaacaccctgcacaaagatagctttcaatgaccctgacaggcttcaaaggacgctgcggaaatctctctggaaaataggaagggccaattactttaatttcttacatgccgtctcttcctactccggtgactaccctccactctcccagctccgcctgggataattttaggctcgtggaagttgtgtctcgcagggcgccccggcccacttcctgctcccttagttggtgaatcttggaaatgtctgcagatccggcgaggagcaagagggctggttctgtaaaagcccccgtgattactgcttgtaaacttgttaaaaggacaattttctgtcacagtcataaactctttgtaaaacccctggcactaaatccagagcgcgcatattccagatgtgtttaataagaaattgcacaatgtgcctccttccgccatcctcggctcagtctgggtaaaaggggcgagcaggaggaggcgagaaagctggatattgctttgagtttttttggcaatcatttcagagagatcattaggggaaactaaccatatttttttcttccctcgaggaaatcttcgagaaccagctgttaagggacctccagtttaccttctgggcgtcgcagtttaactgaatctaaagccacttttcgtttctcctctacagatgtcataacggtagccaaaagtaatgaacaacggcttataaatagtttgtaggacgaaaccatacagcattgtgccaagtgaaatgaaaa

SEQ ID NO: 73817 - DNA, 710 bp, Homo sapiens
atgtgacaccacgcccggctaattttgtatttttagtagagatggggttttaccatgttggtcaggctggtatcaaagtcctgacctcaggtaatccacccacctcggcctcccgaagtgttgggattacaggcatgagccaccactcccggccttaactattcttttggagttaatgtttgcactgatgactttgttttatattagtatattacttagtaatacagtattaggtaaaaagattatagatccttaatgatctgtgaagggaaaggtgttttctggttaggaatttaggcagttgccatatttgtgaaaatgttcacaaagtcataattaaaaacctcggatgtggagttgagctgttttggagttaactttgaatgatattgataattggtttaagacttggtttaggaaatgggaagtgcactagtttatattacagaatatatagataattgtgagttgtaatatgacatttgacatcacttcatgactagtttttcagatcctgaaattgggctgcactgtgaaataattctaaaatttaggtaattgctgtttggtggtgaagatacttggcaagaagaccacttttacttgagtttcagactttaatctgagtttagacttagttattatagatgtaaataccaaaacggttgataatagatggatcatcctagagaaaaattttaaaaatatga

SEQ ID NO: 73818 - DNA, 631 bp, Homo sapiens
tcagttaattagtaagaggaagcagaaatatcaagggacttaagaattggcaggcatgagccaccactcccggccttaactattcttttggagttaatgtttgcactgatgactttgttttatattagtatattacttagtaatacagtattaggtaaaaagattatagatccttaatgatctgtgaagggaaaggtgttttctggttaggaatttaggcagttgccatatttgtgaaaatgttcacaaagtcataattaaaaacctcggatgtggagttgagctgttttggagttaactttgaatgatattgataattggtttaagacttggtttaggaaatgggaagtgcactagtttatattacagaatatatagataattgtgagttgtaatatgacatttgacatcacttcatgactagtttttcagatcctgaaattgggctgcactgtgaaataattctaaaatttaggtaattgctgtttggtggtgaagatacttggcaagaagaccacttttacttgagtttcagactttaatctgagtttagacttagttattatagatgtaaataccaaaacggttgataatagatggatcatcctagagaaaaattttaaaaatatga

SEQ ID NO: 73819 - DNA, 614 bp, Homo sapiens
ttggacaggatcttgctccatcacccaggctggagtgcagtggtgcgatctcggctcaccgcagcctcaacctcctgggtccaagccatccttccagatagctgggaccacatgtgcatgccaccctgactggctataattttttatttttttattctgtttctgagaccaagtctcactctgttgcccaggctggaatgcagtggcacgatctcatctcactgcaacctccgcctcccaggttcaagtgattctcctgcctcagcctcccaagtagctgggattacaggcacccgccgccatgcccagctaatttttgtactttttggtacagatggggtctcaccatcttggccaggctggtcttgaactcctgacctcaggtgatctgcctgcctcagcctcccaaagtgctgggatgacaggcgtgagccactgcacttggccttatatatatatatttttagagatagggtctcgctatgttgcccagggtggtcttgaactccttggctcaagtgatcctcctgcctcggcctcccaaagcactaggtttaactgacatgagccactgcgcccaggctggtgtgtgcttttatttaaattgttccgca

SEQ ID NO: 73820 - DNA, 1343 bp, Homo sapiens
  misc_feature (120)..(120): n is a, c, g, or t
gtttccatatggaaccatctgtgtgaattagtcatcagttaggtatagttaacgtaaagagcccctgccattgaaactttgcacaccttctctgctttattgaaggcaagggccagtggnagtgatagcaggggagggctcctccaagaacccccccagcctccagagggccaataagcatggatatcatgtcaggagctgagctgacatatatttactcagaggacattggggtctgtagctaatcctaaagaatgctccgcaacagaaggaaaccaatgcattgtagaaaacaaagggagatggtgcccgaagtctgcctgtttctcttctcttttctttcccatctcaccaccatgtcctctctaacagaattatatttcatctcatatattatatgttactagaaaagtcatttggttccttggtttctctctttatcagtgggctggaaattcctccaaattaaatataactaccagtagcagctcccctgtgtccagccagtttctcaaatgctgtccacctggtcttactgtccacctaacataacttggaggctttggctggctcaaccacctgttcactttattttgttttcatttccatttgaacttgaagtgaggctatggaaaggtggaaatcatgggcaaggtttggaggctgcaattctagggcatagcttgtcaggagtttatattatctaaaatatatctttctataccccttttcattttaatctgttgccctgattataatttctttatatttgtggttatttttataagaatagagtccatttgctatgtctatttgagtactttttttctattgtccccacatggatgcagtaccaacctgttaatgaaatatctttttattatattattaatatgtaattctactgtagaccaaaaatataaaaacaaatttgttcattttaaagatataaagaactagggagtaaaagattaaaagttgaaggaaaagacagaagagcagtggttaactatgttgagttagaaatctaagagtagccttacctgttttttaaccagtgcttgccaatcataccatagttggaattatgtaatcttggctccttcatacttatgttctataattcttgtttgtctatttgttttctttgatgtaattgaggttgcacatcatgctattcttggcaatgcctgattctattgtattgtacttttgttagtcatttcctttagaaagatggggggaaacgtttatttcttcttttaatttaaaatttgtttaatgcactggaaataaaattggacatatttcactgtttaaaaaatcagaaacaaaacaaagca

SEQ ID NO: 73821 - DNA, 2023 bp, Homo sapiens
  misc_feature (2)..(2): n is a, c, g, or t
tnggacggctgcttcccaccagcaaagaccacgactggagagccgagccggaggcagctgggaaacatgaagagcgtcttgctgctgaccacgctcctcgtgcctgcacacctggtggccgcctggagcaataattatgcggtggactgccctcaacactgtgacagcagtgagtgcaaaagcagcccgcgctgcaagaggacagtgctcgacgactgtggctgctgccgagtgtgcgctgcagggcggggagaaacttgctaccgcacagtctcaggcatggatggcatgaagtgtggcccggggctgaggtgtcagccttctaatggggaggatccttttggtgaagagtttggtatctgcaaagactgtccctacggcaccttcgggatggattgcagagagacctgcaactgccagtcaggcatctgtgacagggggacgggaaaatgcctgaaattccccttcttccaatattcagtaaccaagtcttccaacagatttgtttctctcacggagcatgacatggcatctggagatggcaatattgtgagagaagaagttgtgaaagagaatgctgccgggtctcccgtaatgaggaaatggttaaatccacgctgatcccggctgtgatttctgagagaaggctctattttcgtgattgttcaacacacagccaacattttaggaactttctagattatagcataaggacatgtaatttttgaagaccaaatgtgatgcatggtggatccagaaaacaaaaagtaggatacttacaatccataacatccatatgactgaacacttgtatgtgtttgttaaatattcgaatgcatgtagatttgttaaatgtgtgtgtatagtaacactgaagaactaaaaatgcaatttaggtaatcttacatggagacaggtcaaccaaagagggagctaggcaaagctgaagaccgcagtgagtcaaattagttctttgactttgatgtacattaatgttgggatatggaatgaagacttaagagcaggagaagatggggagggggtgggagtgggaaataaaatatttagcccttccttggtaggtagcttctctagaatttaattgtgctttttttttttttttggctttgggaaaagtcaaaataaaacaaccagaaaacccctgaaggaagtaagatgtttgaagcttatggaaatttgagtaacaaacagctttgaactgagagcaatttcaaaaggctgctgatgtagttcccgggttacctgtatctgaaggacggttctggggcataggaaacacatacacttccataaatagctttaacgtatgccacctcagagataaatctaagaagtattttacccactggtggtttgtgtgtgtatgaaggtaaatatttatatatttttataaataaatgtgttagtgcaagtcatcttccctacccatatttatcatcctcttgaggaaagaaatctagtattatttgttgaaaatggttagaataaaactatgactctataaggttttcaaacatctgaggcatgataaatttattatccataattataagagtcactctggatttcaaaaatgtcaaaaaatgagcaacagagggtccttatttaaacataagtgctgtgacttaggtgaattttcaatttaaggtagaaaataagtttttaggaggtttgtaaaagaagaatcaattttcagcagaaaacatgtcaactttaaaatatatggaattaggagtatatttgaaagaatcttagcacaaacaggactgttgtactagatgttcttaggaaatatctcagaagtattttatttgaagtgaagaacttatttaagaattatttcagtatttacctgtattttattcttgaagttggccaacagagttgtgaatgtgtgtgggaaggcctttgaatgtaaagctgcataagctgttaggttttgttttaaaaggacatgtttattattgttcaataaaaaagaacaagatacagcttctctgtg

SEQ ID NO: 73822 - DNA, 2096 bp, Homo sapiens
  misc_feature (2)..(2): n is a, c, g, or t
tnggacggctgcttcccaccagcaaagaccacgactggagagccgagccggaggcagctgggaaacatgaagagcgtcttgctgctgaccacgctcctcgtgcctgcacacctggtggccgcctggagcaataattatgcggtggactgccctcaacactgtgacagcagtgagtgcaaaagcagcccgcgctgcaagaggacagtgctcgacgactgtggctgctgccgagtgtgcgctgcagggcggggagaaacttgctaccgcacagtctcaggcatggatggcatgaagtgtggcccggggctgaggtgtcagccttctaatggggaggatccttttggtgaagagtttggtatctgcaaagactgtccctacggcaccttcgggatggattgcagagagacctgcaactgccagtcaggcatctgtgacagggggacgggaaaatgcctgaaattccccttcttccaatattcagtaaccaagtcttccaacagatttgtttctctcacggagcatgacatggcatctggagatggcaatattgtgagagaagaagttgtgaaagagaatgctgccgggtctcccgtaatgaggaaatggttaaatccacgctgatcccggctgtgatttctgagagaaggctctattttcgtgattgttcaacacacagccaacattttaggaactttctagattatagcataaggacatgtaatttttgaagaccaaatgtgatgcatggtggatccagaaaacaaaaagtaggatacttacaatccataacatccatatgactgaacacttgtatgtgtttgttaaatattcgaatgcatgtagatttgttaaatgtgtgtgtatagtaacactgaagaactaaaaatgcaatttaggtaatcttacatggagacaggtcaaccaaagagggagctaggcaaagctgaagaccgcagtgagtcaaattagttctttgactttgatgtacattaatgttgggatatggaatgaagacttaagagcaggagaagatggggagggggtgggagtgggaaataaaatatttagcccttccttggtaggtagcttctctagaatttaattgtgctttttttttttttttggctttgggaaaagtcaaaataaaacaaccagaaaacccctgaaggaagtaagatgtttgaagcttatggaaatttgagtaacaaacagctttgaactgagagcaatttcaaaaggctgctgatgtagttcccgggttacctgtatctgaaggacggttctggggcataggaaacacatacacttccataaatagctttaacgtatgccacctcagagataaatctaagaagtattttacccactggtggtttgtgtgtgtatgaaggtaaatatttatatatttttataaataaatgtgttagtgcaagtcatcttccctacccatatttatcatcctcttgaggaaagaaatctagtattatttgttgaaaatggttagaataaaactatgactctataaggttttcaaacatctgaggcatgataaatttattatccataattatagtaataataaccttaataagcataagaaaaacagagtcactctggatttcaaaaatgtcaaaaaatgagcaacagagggtccttatttaaacataagtgctgtgacttaggtgaattttcaatttaaggtagaaaataagtttttaggaggtttgtaaaagaagaatcaattttcagcagaaaacatgtcaactttaaaatatagtttattttcatatttttttcttttaaacttggttgataagtggaattaggagtatatttgaaagaatcttagcacaaacaggactgttgtactagatgttcttaggaaatatctcagaagtattttatttgaagtgaagaacttatttaagaattatttcagtatttacctgtattttattcttgaagttggccaacagagttgtgaatgtgtgtgggaaggcctttgaatgtaaagctgcataagctgttaggttttgttttaaaaggacatgtttattattgttcaataaaaaagaacaagatacagcttctctgtg

SEQ ID NO: 73823 - DNA, 641 bp, Homo sapiens
gggatcacaccctttgggaacacatccaagcttaagacggtgaggtcagcttcacattctcaggaactctccttctttgggccacggaattaacccgagcaggcatggaggcctctgctctcacctcatcagcagtgaccagtgtggccaaagtggtcagggtggcctctggctctgccgtagttttgcccctggccaggattgctacagttgtgattggaggagttgtggccatggcggctgtgcccatggtgctcagtgccatgggcttcactgcggcgggaatcgcctcgtcctccatagcagccaagatgatgtccgcggcggccattgccaatgggggtggagttgcctcgggcagccttgtggctactctgcagtcactgggagcaactggactctccggattgaccaagttcatcctgggctccattgggtctgccattgcggctgtcattgcgaggttctactagctccctgcccctcgccctgcagagaagagaaccatgccaggggagaaggcacccagccatcctgacccagcgaggagccaactatcccaaatatacctggggtgaaatataccaaattctgcatctccagaggaaaataagaaataaagatgaattgttgcaactctt

SEQ ID NO: 73824 - DNA, 675 bp, Homo sapiens
gggatcacaccctttgggaacacatccaagcttaagacggtgaggtcagcttcacattctcaggaactctccttctttgggtctggctgaagttgaggatctcttactctctaggccacggaattaacccgagcaggcatggaggcctctgctctcacctcatcagcagtgaccagtgtggccaaagtggtcagggtggcctctggctctgccgtagttttgcccctggccaggattgctacagttgtgattggaggagttgtggccatggcggctgtgcccatggtgctcagtgccatgggcttcactgcggcgggaatcgcctcgtcctccatagcagccaagatgatgtccgcggcggccattgccaatgggggtggagttgcctcgggcagccttgtggctactctgcagtcactgggagcaactggactctccggattgaccaagttcatcctgggctccattgggtctgccattgcggctgtcattgcgaggttctactagctccctgcccctcgccctgcagagaagagaaccatgccaggggagaaggcacccagccatcctgacccagcgaggagccaactatcccaaatatacctggggtgaaatataccaaattctgcatctccagaggaaaataagaaataaagatgaattgttgcaactctt

SEQ ID NO: 73825 - DNA, 526 bp, Homo sapiens
gggatcacaccctttgggaacacatccaagcttaagacggtgaggtcagcttcacattctcaggaactctccttctttggccaggattgctacagttgtgattggaggagttgtggccatggcggctgtgcccatggtgctcagtgccatgggcttcactgcggcgggaatcgcctcgtcctccatagcagccaagatgatgtccgcggcggccattgccaatgggggtggagttgcctcgggcagccttgtggctactctgcagtcactgggagcaactggactctccggattgaccaagttcatcctgggctccattgggtctgccattgcggctgtcattgcgaggttctactagctccctgcccctcgccctgcagagaagagaaccatgccaggggagaaggcacccagccatcctgacccagcgaggagccaactatcccaaatatacctggggtgaaatataccaaattctgcatctccagaggaaaataagaaataaagatgaattgttgcaactctt

SEQ ID NO: 73826 - DNA, 725 bp, Homo sapiens
ggcaggagctacccttcccgtggccccggaccttgggtgggctgtgggctcagggagcggaggggaggccttaagcatccactctctgcccggtgtttttgttctcatcagggagcctcagatgggaagggactcgagccccacctgtccctggactctggaatgccacggaattaacccgagcaggcatggaggcctctgctctcacctcatcagcagtgaccagtgtggccaaagtggtcagggtggcctctggctctgccgtagttttgcccctggccaggattgctacagttgtgattggaggagttgtggccatggcggctgtgcccatggtgctcagtgccatgggcttcactgcggcgggaatcgcctcgtcctccatagcagccaagatgatgtccgcggcggccattgccaatgggggtggagttgcctcgggcagccttgtggctactctgcagtcactgggagcaactggactctccggattgaccaagttcatcctgggctccattgggtctgccattgcggctgtcattgcgaggttctactagctccctgcccctcgccctgcagagaagagaaccatgccaggggagaaggcacccagccatcctgacccagcgaggagccaactatcccaaatatacctggggtgaaatataccaaattctgcatctccagaggaaaataagaaataaagatgaattgttgcaactctt

SEQ ID NO: 73827 - DNA, 728 bp, Homo sapiens
gggatcacaccctttgggaacacatccaagcttaagacggtgaggtcagcttcacattctcaggaactctccttctttggggagcctcagatgggaagggactcgagccccacctgtccctggactctggaatgtctggctgaagttgaggatctcttactctctaggccacggaattaacccgagcaggcatggaggcctctgctctcacctcatcagcagtgaccagtgtggccaaagtggtcagggtggcctctggctctgccgtagttttgcccctggccaggattgctacagttgtgattggaggagttgtggccatggcggctgtgcccatggtgctcagtgccatgggcttcactgcggcgggaatcgcctcgtcctccatagcagccaagatgatgtccgcggcggccattgccaatgggggtggagttgcctcgggcagccttgtggctactctgcagtcactgggagcaactggactctccggattgaccaagttcatcctgggctccattgggtctgccattgcggctgtcattgcgaggttctactagctccctgcccctcgccctgcagagaagagaaccatgccaggggagaaggcacccagccatcctgacccagcgaggagccaactatcccaaatatacctggggtgaaatataccaaattctgcatctccagaggaaaataagaaataaagatgaattgttgcaactctt

SEQ ID NO: 73828 - DNA, 969 bp, Homo sapiens
gggatcacaccctttgggaacacatccaagcttaagacggtgaggtcagcttcacattctcaggaactctccttctttgggtctggctgaagttgaggatctcttactctctaggccacggaattaacccgagcaggcatggaggcctctgctctcacctcatcagcagtgaccagtgtggccaaagtggtcagggtggcctctggctctgccgtagttttgcccctggccaggattgctacagttgtgattggaggagttgtggccatggcggctgtgcccatggtgctcagtgccatgggcttcactgcggcgggaatcgcctcgtcctccatagcagccaagatgatgtccgcggcggccattgccaatgggggtggagttgcctcgggcagccttgtggctactctgcagtcactgggagcaactggactctccggattgaccaagttcatcctgggctccattgggtctgccattgcggctgtcattgcgaggttctactagctccctgcccctcgccctgcagagaagagaaccatgccaggggagaaggcacccagccatcctgacccagcgaggagccaactatcccaaatatacctggggtgaaatataccaaattctgcatctccagaggaaaataagaaataaagatgaattgttgcaactcttaaaaaaaaaaaaaaaaaactccggggcactcaatgccggggggcaaacgaggtcacggaaggcgcatgggataagtggttctggaccagtttcggtacaggggaattggcggtccccaaagggacgaataattcgaaaggcggtaactgtagctgtcggcaaacgaaagacacaagacgaggcgggggacacaatgtcaacacggggggagagcacactagaaacatccacacgagcacatcacgtcaaaacacgacgagacttgcaggcaacagagagacacgacgacgacga

SEQ ID NO: 73829 - DNA, 540 bp, Homo sapiens
cgtgcccatagtctctcccaagctcaaagttcacctctttctccagatcccctggggtccccaagcctgactcagtgtatctgggggggtcccttctgagcccacgcaccgacccagctcctcttccctgcagtggcggctgtgcccatggtgctcagtgccatgggcttcactgcggcgggaatcgcctcgtcctccatagcagccaagatgatgtccgcggcggccattgccaatgggggtggagttgcctcgggcagccttgtggctactctgcagtcactgggagcaactggactctccggattgaccaagttcatcctgggctccattgggtctgccattgcggctgtcattgcgaggttctactagctccctgcccctcgccctgcagagaagagaaccatgccaggggagaaggcacccagccatcctgacccagcgaggagccaactatcccaaatatacctggggtgaaatataccaaattctgcatctccagaggaaaataagaaataaagatgaattgttgcaactctt

SEQ ID NO: 73830 - DNA, 740 bp, Homo sapiens
cggggcttgctggggagggcgatgaggagggcaagagcctccaaggacccagtcccaatctcaaccctatgaacctcaatctccctgttcctctgtctctctctacacattctctcagggtttctctgagggagatggaggagggagggaaggagcccaagccaggaacagtgcactcaggaagactcagcccgaagcagatttgctgggttacctggggcgtctcctcccctctggggtgcagcctccttccctgaagagcgaggctgcttctagctctggagttcaccatgggggttcatgcctgcagcagcctctccccaaacaaagaccccgagggtactgggaaacagagaggggaactgggtggggtctgtaagcctcagcccctgctgagggtcactggagtctctgaccccacagtcctgcccacagagcttccccgacaggcatgtcccactctgtccaccctctgcttcttcccaggagcaactggactctccggattgaccaagttcatcctgggctccattgggtctgccattgcggctgtcattgcgaggttctactagctccctgcccctcgccctgcagagaagagaaccatgccaggggagaaggcacccagccatcctgacccagcgaggagccaactatcccaaatatacctggggtgaaatataccaaattctgcatctccagaggaaaataagaaataaagatgaattgttgcaactctt

SEQ ID NO: 73831 - DNA, 869 bp, Homo sapiens
gggatcacaccctttgggaacacatccaagcttaagacggtgaggtcagcttcacattctcaggaactctccttctttgggccacggaattaacccgagcaggcatggaggcctctgctctcacctcatcagcagtgaccagtgtggccaaagtggtcagggtggcctctggctctgccgtagttttgcccctggccaggattgctacagttgtgattggaggagttgtggccatgccatgggcttcactgcggcgggaatcgcctcgtcctccatagcagccaagatgatgtccgcggcggccattgccaatgggggtggagttgcctcgggcagccttgtggctactctgcagtcactgggagcaactggactctccggattgaccaagttcatcctgggctccattgggtctgccattgcggctgtcattgcgaggttctactagctccctgcccctcgccctgcagagaagagaaccatgccaggggagaaggcacccagccatcctgacccagcgaggagccaactatcccaaatatacctggggtgaaatataccaaattctgcatctccagaggaaaataagaaataaagatgaattgttgcaactcttaagaaaaaacaaagaacaatcaatccaagcactaagcacaaatcaaagaagtaaatatatgacataacagtataaaagagaagggggggggccgtgtatatgaatatcccagtgggaggggcgacatattcgtctggcgcaccattgttttgtgagacagggggccccgtaagagagggtcgtctattgatacgaggacggctcggtgttttataaggtctttggtgaaacacgtctctgtgtgttctcgttg

SEQ ID NO: 73832 - DNA, 404 bp, Homo sapiens
gcggccgcctactactactaaattcgcggccgcgtcgaccaagttcatcctgggcttcattgggtctgccattgcggctgtcattgcgaggttctacagttgtgattggaggagttgtggccatggcggctgtgcccatggtgctcagtgccatgggcttcactgcggcgggaatcgcctcgtcctccatagcagccaagatgatgtccgcggcggccattgccaatgggggtggagttgcctcgggcagccttgtggctactctgcagtcactgggggagaaggcacccagccatcctgacccagcgaggagccaactatcccaaatatacctggggtgaaatataccaaattctgcatctccagaggaaaataagaaataaagatgaattgttgcaactctt

SEQ ID NO: 73833 - DNA, 849 bp, Homo sapiens
  misc_feature (795)..(795): n is a, c, g, or t
  misc_feature (849)..(849): n is a, c, g, or t
gggatcacaccctttgggaacacatccaagcttaagacggtgaggtcagcttcacattctcaggaactctccttctttgggtctggctgaagttgaggatctcttactctctaggccacggaattaacccgagcaggcatggaggcctctgctctcacctcatcagcagtgaccagtgtggccaaagtggtcagggtggcctctggctctgccgtagttttgcccctggccaggattgctacagttgtgattggaggagttgtggccatggcggctgtgcccatggtgctcagtgccatgggcttcactgcggcgggaatcgcctcgtcctccatagcagccaagatgatgtccgcggcggccattgccaatgggggtggagttgcctcgggcagccttgtggctactctgcagtcactgggagcaactggactctccggattgaccaagttcatcctgggctccattgggtctgccattgcggctgtcattgcgaggttctactagctccctgcccctcgccctgcagagaagagaaccatgccaggggagaaggcacccagccatcctgacccagcgaggagccaactatcccaaatatacctggggtgaaatataccaaattctgcatctccagaggaaaataagaaataaagatgaattgttgcaactcttaaaaaaaaaaaaaaaaattaatatttaggacacttcagagcaccttatacttctaatcagattttgggtaactggttttaaagtgttacttgaatatttttctcatactggctttcaggnaaagtacttctcagagacttgttaagagatgttaatttgattaaacaagttatn

SEQ ID NO: 73834 - DNA, 815 bp, Homo sapiens
  misc_feature (761)..(761): n is a, c, g, or t
  misc_feature (815)..(815): n is a, c, g, or t
gggatcacaccctttgggaacacatccaagcttaagacggtgaggtcagcttcacattctcaggaactctccttctttgggccacggaattaacccgagcaggcatggaggcctctgctctcacctcatcagcagtgaccagtgtggccaaagtggtcagggtggcctctggctctgccgtagttttgcccctggccaggattgctacagttgtgattggaggagttgtggccatggcggctgtgcccatggtgctcagtgccatgggcttcactgcggcgggaatcgcctcgtcctccatagcagccaagatgatgtccgcggcggccattgccaatgggggtggagttgcctcgggcagccttgtggctactctgcagtcactgggagcaactggactctccggattgaccaagttcatcctgggctccattgggtctgccattgcggctgtcattgcgaggttctactagctccctgcccctcgccctgcagagaagagaaccatgccaggggagaaggcacccagccatcctgacccagcgaggagccaactatcccaaatatacctggggtgaaatataccaaattctgcatctccagaggaaaataagaaataaagatgaattgttgcaactcttaaaaaaaaaaaaaaaaattaatatttaggacacttcagagcaccttatacttctaatcagattttgggtaactggttttaaagtgttacttgaatatttttctcatactggctttcaggnaaagtacttctcagagacttgttaagagatgttaatttgattaaacaagttatn

SEQ ID NO: 73835 - DNA, 659 bp, Homo sapiens
gggatcacaccctttgggaacacatccaagcttaagacggtgaggtcagcttcacattctcaggaactctccttctttgggccacggaattaacccgagcaggcatggaggcctctgctctcacctcatcagcagtgaccagtgtggccaaagtggtcagggtggcctctggctctgccgtagttttgcccctggccaggattgctacagttgtgattggaggagttgtggccatggcggctgtgcccatggtgctcagtgccatgggcttcactgcggcgggaatcgcctcgtcctccatagcagccaagatgatgtccgcggcggccattgccaatgggggtggagttgcctcgggcagccttgtggctactctgcagtcactgggagcaactggactctccggattgaccaagttcatcctgggctccattgggtctgccattgcggctgtcattgcgaggttctactagctccctgcccctcgccctgcagagaagagaaccatgccaggggagaaggcacccagccatcctgacccagcgaggagccaactatcccaaatatacctggggtgaaatataccaaattctgcatctccccaggccttttaatattaaaacagaattgttgcccctctggattaaaaaaacaaaagg

SEQ ID NO: 73836 - DNA, 299 bp, Homo sapiens
gggaaataaagtccctcagggccctgacctaacacaggtcctttggtagccccaactccccaacatccctccctccctcaccccaggatcctttcaaggcctgctgctccacaagctcagagcagcctccctagccccctggagcccgtcacatttttcaggacagtgggaagcaagtcaggttgtgtgcccatcccgtcctcagagctccatcccttcggcaggtctggctgaagttgaggatctcttactctctaggccacggaattaacccgagcaggcatggaggcctctgctct

SEQ ID NO: 73837 - DNA, 654 bp, Homo sapiens
tccagcccaccctccacaaaatggtatactatttgaaagcagagactgttgatcttattcactgaagtatttctatgtctagaattgtgccctgcacttagttgctactcaataaatgtttgcagagggacagattgacacatagtagatgtaaatgttaccagctctctgcaatgcagcacattgaccttccctagtcctatccaagaagtagattctagacatatcatgtcatgttatactttgcatatctctgttacccaggtaacagcaggtttctttgtatttgacatccctgcaaacttgggtgggcagcagagaaccacagcatagagggctgaggaagaagacgtctcgcagaaggcactgggaccaggggactgctgttgtcttttgctcactgtgtggcttagaaagcaaaagaggatcccagacactgtgcacagttatggtgtgagctcagccaagggggattggagcagatgatgaccaaatctgaaggccagccagtggggagggggttccagccatggggcttctgtcccaggaagggcgctcgtcctggatccagtaggaacaagcaagagagccaggctacaaaaagaaaccatgtaggttttcaaaaagaaaaaccatgtaggctttgaaccagga

SEQ ID NO: 73838 - DNA, 587 bp, Homo sapiens
acttgtgaaaattctcaccaaaatgttcacaagttcttttgaaggagaggggatgtggggagggagaagaggttatatgagattgtctttaatgttttgtactttttgcatttttaagctttttgacaacatgtattttataatcagagaaaaatgctgacttttataaagtgccattattatgattatgagctgcctcgtgtgtgtgggcatgggtttgccatgaaaactatgaagaactttgagatgggcaagacaattcctgggtgtcttctggacaagatctagggagttacctagcagaccttccggactgacgtgatgctacaggggtcccatctttccttgtcattgagctattttacagttctgtgaattgtaaagaactgagggtaatgcgaatgactcttgttcatagaggcaaatgaattttgtcccatggagatttaattgatattactctgtggatgttgacaagttttgtgtctgttagcaaattaatttcagtgttcttatttgtctttgaattgtttctttttaaaattttactggttcctttataaatttacctttttgaaaaagtattg

SEQ ID NO: 73839 - DNA, 2075 bp, Homo sapiens
aaaaaggcagaaacttttaaaattagaaattggataatttttaagaatctttagagaaaacattggtttatcatagtctttttctttcattgagttttcatttagactagcatggcaagcagggtggccttggactttgatttaggggatcgtgctttggcctggaaaataagcactggcctgcatgcctagaacctgagtgaaggcagtcaacatcctagtatgaatcagacctagcagaaatgtaaattatttcaagtacttcagggtttagttttcttagtgacaccctggaccctggatgctgctttctaaagtgcacctgatccatgcagttttatgtcttcatataactggtatcttgtgagtttgcaagcaatgggatgagcaagaaaaaaaggacgcatggaggagaaaaatttgaacgaggctagtgcaatgttttgctgatagattacattgttagggagctggtgattttttgccatggtcgtatcgtggacagcttttccgtggaaattcaaggcatctgtattaggcaaatgtgagtgcccttgatcttgtattgatcagtgccaatgtactgggaaagcaggtaccccagtgaaactggtctgtgcttggtttaacagctccaacaatttcagatccatggggctgcttggccatagaccctgtttactccatgcctgttcaaaagtcattttgacttctagctttgtttcactttcttctttcaatacttctgtttccgcgtccttttccttcatattccatggctatttctttcctactttacagtttcccccagacccagattttttcacacctctgcatcatagacaactgagtatctcccttggcccctcctccatcctctcacaccctgtgctccattcctcagccgtttggacagggagctccgctgtcaccaaggagcccatgtgagacacactgctatgactgcctcttgttaatgtcagcatcacctcatcacttaagcaaaaggaaaatccataaaagagatggaaaatacgtctctttttattttattttaagaagattgggcggggtggggggggggttcttattctaggccttctcaatttctcatagattttaccttaaactaattaaggccattctcttgataaatttgtacatcagaccgggtcaccagctatgatgcagaacgccagatttttgaatctcaagtaactttctgtgctgctggacaaattgacttaattctgtgcaggcaaacactttgaatcataaggatttttattgccactccattcttactactattcatgattcaaacatctacccctgttctgaatcaggatgttgacacttcttggttattttcagatgaacagtaactgctacactcttgaaagcacttaaaagtgcaagcatgtcctaaatagccatttaacctggtaaaacataggcttttctgtttaattaagtattagaccagtctgtagatataatctgaaaagattttaggcagtaatgaagacagttggggaaaggagaaggccctttaaagacatgaaaccttacacgctcttgggatatttttaagcataataagctcattggattcaggtatttttccctttgcatttttaaaaatacgtatttctaatttgtttgcatatttaattttgtcaaagctgagaaatgctcatgagttgaatttataaatgtcatttgcaaccaaatgaagtatttatttttaaaaagagagtgaaggaaccaacactgatttgtacataataaaaatgtgtgtattatatatatattttttttcctccttgacagtacttggtcacaatatcaagtgtatttttgtacataatatatattgattagaaaaacgtcaattgtctattcaaaaaattctatctctgtgatagattatatttatcctaatctgttgatacctctgttaatttgttttaagagatagaattatattttttggaatttacagagaattgcattcatggctttcaattgtaaatatgctaagagtattttaataaatcttggtttcatgtcca

SEQ ID NO: 73840 - DNA, 969 bp, Homo sapiens
gcacttgtctattaagtaaaggagttaagtgtttcttaaaagggctattccaagcatgacgtcttttaattttatgcttagccagcctccaaatctaaagccatctgtaaagaaggtagtaatcctctcgtgaaaatgcaggggccatagatgtcaaatgcatattgttctgattgattgattgattgattgagaggaggtcttgctctgtcatctaggctggagtgcagtgacccagtcatggcttactgctgtcttgacttcctgggctcaggtgattgtcctgcctcagcctcctgagtagctgggatcacaggcacatgccaccacgcctatatcatttattattattattattatttggagagatggagactccctctgttactcaggctggtcttgaactactggcctcaagcaattctcccaccttgaagaacaggattttcaagttcttctctgggcttcagtttccttatttggaatatgtggataataactgcttaacaaagtccatttaggatcaaatgagataatgtatgtgaaaatactgtgtaaattatgaaaaatgtatacctaatacataaaactctttgcactgcataatttttggaaattaccttgaggggctgagtgcggtggctcatgcatgtaattccaacactttgggaggcaaagtctggaggatcccttgagccttggagttcaagaagatcagcatgggttacatggtgagatcctgtctctacagaaaattaaaaagaaaaaaaagaaattaacttgaggaactaaaggcctaatcactatataaattcatggtttaaaattaagtttgttcctggctctattttatgtctctaccttttttcctatgtatgattcataatattttgttatattttctataaacctataatctcttaaatcttcgaaaaaatacagggtataaataaaaatcacataaacctc

SEQ ID NO: 73841 - DNA, 4518 bp, Homo sapiens
agcggcccagacaggggctggcggcccggccggccccggctcaccgactcgggcagcatccacctgccccagccaacacccttctctcgccccaggtcctttctcagcctccagctgggctgtccccaagctgagctgaggctcttctcctccgatccccacctctgcccggacatccaccatggggacagccaccaggaggaagccacacctgctgctggtagctgctgtggcccttgtctcctcttcagcttggagttcagccctgggatcccaaaccaccttcgggcctgtctttgaagaccagcccctcagtgtgctattcccagaggagtccacggaggagcaggtgttgctggcatgccgcgcccgggccagccctccagccacctatcggtggaagatgaatggtaccgagatgaagctggagccaggttcccgtcaccagctggtggggggcaacctggtcatcatgaaccccaccaaggcacaggatgccggggtctaccagtgcctggcctccaacccagtgggcaccgttgtcagcagggaggccatcctccgcttcggctttctgcaggaattctccaaggaggagcgagacccagtgaaagctcatgaaggctggggggtgatgttgccctgtaacccacctgcccactacccaggcttgtcctaccgctggctcctcaacgagttccccaacttcatcccgacggacgggcgtcacttcgtgtcccagaccacagggaacctgtacattgcccgaaccaatgcctcagacctgggcaactactcctgtttggccaccagccacatggacttctccaccaagagcgtcttcagcaagtttgctcagctcaacctggctgctgaagatacccggctctttgcacccagcatcaaggcccggttcccagcagagacctatgcactggtggggcagcaggtcaccctggagtgcttcgcctttgggaaccctgtcccccggatcaagtggcgcaaagtggacggctccctgtccccgcagtggaccacagctgagcccaccctgcagatccccagcgtcagctttgaggatgagggcacctacgagtgtgaggcggagaactccaagggccgagacaccgtgcagggccgcatcatcgtgcaggctcagcctgagtggctaaaagtgatctcggacacagaggctgacattggctccaacctgcgttggggctgtgcagccgccggcaagccccggcctacagtgcgctggctgcggaacggggagcctctggcctcccagaaccgggtggaggtgttggctggggacctgcggttctccaagctgagcctggaagactcgggcatgtaccagtgtgtggcagagaataagcacggtaccatctacgccagcgccgagctagccgtgcaagcactcgcccctgacttcaggctgaatcccgtgaggcgtctgatccccgcggcccgcgggggagagatccttatcccctgccagccccgggcagctccaaaggccgtggtgctctggagcaaaggcacggagattttggtcaacagcagcagagtgactgtaactccagatggcaccttgatcataagaaacatcagccggtcagatgaaggcaaatacacctgctttgctgagaacttcatgggcaaagccaacagcactggaatcctatctgtgcgagatgcaaccaaaatcactctagccccctcaagtgccgacatcaacttgggtgacaacctgaccctacagtgccatgcctcccacgaccccaccatggacctcaccttcacctggaccctggacgacttccccatcgactttgataagcctggagggcactaccggagaactaatgtgaaggagaccattggggatctgaccatcctgaacgcccagctgcgccatggggggaagtacacgtgcatggcccagacggtggtggacagcgcgtccaaggaggccacagtcctggtccgaggtccgccaggtcccccaggaggtgtggtggtgagggacattggcgacaccaccatccagctcagctggagccgtggcttcgacaaccacagccccatcgctaagtacaccctgcaagctcgcactccacctgcagggaagtggaagcaggttcggaccaatcctgcaaacatcgagggcaatgccgagactgcacaggtgctgggcctcaccccctggatggactatgagttccgggtcatagccagcaacattctgggcactggggagcctagtgggccctccagcaaaatccggaccagggaagcagccccctcggtggcaccctcaggactcagcggaggaggtggagcccccggagagctcatcgtcaactggacgcccatgtcacgggagtaccagaacggagacggcttcggctacctgctgtccttccgcaggcagggcagcactcactggcagaccgcccgggtgcctggcgccgatgcccagtactttgtctacagcaacgagagcgtccggccctacacgccctttgaggtcaagatccgcagctacaaccgccgcggggatgggcccgagagcctcactgcactcgtgtactcagctgaggaagagcccagggtggcccctaccaaggtgtgggccaaaggggtctcatcctcagagatgaacgtgacctgggaacccgtgcagcaggacatgaatggtatcctcctggggtatgagatccgctactggaaagctggggacaaagaagcagctgcggaccgagtgaggacagcagggctggacaccagtgcccgagtcagtggcctgcatcccaacaccaagtaccatgtgaccgtgagggcctacaaccgggctggcactgggcctgccagcccttctgccaacgccacgaccatgaagccccctccgcggcgacctcctggcaacatctcctggactttctcaagctctagtcttagcattaagtgggaccctgtggtccctttccgaaatgagtctgcagtcaccggctataagatgctgtaccagaatgacttacacctgactcccacgctccacctcaccggcaagaactggatagaaatcccagtgcctgaagacattggccatgccctggtacaaattcggaccacagggcccggaggggatgggatccctgcagaagtccacatcgtgaggaatggaggcacaagcatgatggtggagaacatggcagtccgcccagcaccacaccctggcaccgtcatttcccactccgtggcgatgctgatcctcataggctccctggagctctgatcctggaacccctccctctgcgccgcagctggacgccacctccgacggacacagccagccccttcctgctgccaaggtggcctgacactgtgccagagagtggctggttttaaatacctactttaaacagtgccctttttgtaggaggtaggatattttatattctgccgcaggatagaacccacgcaaggattttctttaaattgagaggcaccaggcagtaacttccatgatgacactgacgcctatacctgagctctaggctgcctggagggaaggaacaggcccatgggaagaagggggttttaaaaacatgtcttcaactcagcagagatggccctctgggaccctatacgcactccgccacttgagagcagtcctaggcccggcaggaacaccagacatgaacaggttgaagaactggagcgaagtgcacacctcaccatccttcagtctaaggaagaagggcaagccctgggaccaagagctctcccgccttctccctcgagcagcagcaaggaccctgacgctgtccccgataactccctaggggctcctgcctgcccaagcggctgagaaccagcgccccgatgcctgaggctgggagcctgagccccttcagctttgaggggggtgatactccaggctgtttggggtgggagccaaaaagagttgagaggccagggcccttggtggaaaggggcaccagccttggtctgagatagtcacaacccaggtgacgatgccctctcagccaacactgccaacctgaccctgtcatcccgattgacagcgccacttcaggtggctgggtgactaaagggcttgtcttggtggggtctcccacccctccaagacccattctgcacagtccctccagggtttgggcaggagatggccaatcatgcgcccacctctccagtgctgcctgcagtcagctcggcctccccgacctgcagccccagactctgctctcccagcactgactcactcctgcctgggaggggaatgcagcattcatgctggtgtgtcctggtattgggaggtttctgggaagggcagaggataaatgtggccctgcctgctcccaggtatacctaggaccacctggccagatccgctcccagacggccttggactgcttgcatttccccggagaaaaaggggttaataaatgggccatcctttcctgaaaaaaaaaacccccccccccc

SEQ ID NO: 73842 - DNA, 439 bp, Homo sapiens
atagttcccaccatgacctttgcagacttgccctcgagcactggaacagcctcgccagtacaccctcaatcctgcagctgctcactgatacaggaacccagaagcccagctccttgcctgtgcgctacagctccccacgggctactcagaagctgtggtttcatctgaaagcgcacccttgtttggctcctttcatttccgtgtcctgtttcatacccctcaccccatactgctctcccctgggagcacttccttcacatcatttgctcctgaactcttggctccgttcttctgagagaatcttaatgcaatgcacaaaaaggcataaaagaggcaaatactaataaactcactttggtattatggactttggtgttaacttgtgttttttctttttttaaaaaaaattgttaattccaaagtaatacgtgtacattgt

SEQ ID NO: 73843 - DNA, 356 bp, Homo sapiens
tcttttggtggggagtatgtttatcagatgacagtattactgatactctataccttactgaaaagctccaagcacattcatgtgcactagatcaatgattaataagaataaataataaacatggagatggataagttttactgtaatcgttttacctctcacacattaagctccattgctttttcttcatacaagaggcaccttacaaaataaataaataaatctcctttaggtataactggtggaattccctctctaaggagcaggcattggcattataaaactataaaagtcaatgatttctgaacttattcccctttaatactttaaccaaacttaacaagtaccatgcttac

SEQ ID NO: 73844 - DNA, 876 bp, Homo sapiens
gaataatcattcgtttagtaagataagatgaaccaaggaagcccatggtaagaccgtgtaacctcctaggtatcggagtatgaaggtggtaactttcatattgagagcttgagtccctctggtgcaaagcatagaatatgaactttaagtatctttgttacaatctatatattttattttcttatggatattaaatatttcaggaacattagagcttctctttctaagggagagaaaaggggataattatactgtctgacttctatgaaaaataaaagtttaaaaacaaaacattgggagtagagagaggaatgatgcttcctagctagtgtaataactgttggaatattattaaataaattcacatgtttgccttagggtatatgttggaaccagaccctgacaaaaggccggatatttaccaggtgtcctacttctcatttaagctactcaagaaagagtgcccaattccaaatgtacaggtacgtgaatggtgctatttaaagggagtaaacattatcaaattgccattttgagctcctggggtgttaatcagctgtttaaatgaatttagatgtcccttgctttatctactgggggtagtcaagcaaagctaactgtgaagcagttgccataaagggaatccagttttcccatggaatttaattataaaactgaagcaattgtactgaacaaaaaaatgccctagggattgagttggacgctttggatgaagattgaccaacttcatgtctgtcaactcttctagttctctgagagccacatgcctgttgtagtcacctggaggtgattacaggcaggctactttcccgaggcaatgccttggacatgcccccatgcctgttagaacctacg

SEQ ID NO: 73845 - DNA, 795 bp, Homo sapiens
ggactcagcagaaaaacagagcaaactattgatacttgcgaccacacggatgactttcatctcaaaggcattatgccaaaggaaggaaaccacacacaaaagactacatactctgtggttccatttataggaaattctggaaaaggcaaagctgtagggacagaaagcagatctgttgttaccagggtctgtggtgagaggaaggcactgactgtaaagggttatgaaggaattttctcaggttttggaaatgttctgtatcatttcagtggtaatgatatgaatgtatacatttgtccagactaaccacattgtacacttaaaatgggcgacttttattgtatgcaaattacacctcaaataaaaacaagcagacgcacccaggacagcatcttgaatgccttacaaagtgactacttcacttgaggaagtaatcatttttaaacttccaattttgaaaacctgttgttaacaagatattaatagcattcatttttatggtgaacctgtaccaaatattgacccctaaaatgtgtttgcttaaagaatagtgaatgatccgctggctttaatatcttactacatttttgctttctttttgtctctctgcccaacgtagaaaaactaattgagggactcaaatctcctgacacttctcttctgctcccacgagccgctcttagggtggtcagcggcgcaggtcacaaaactgggccataggcatgaaagtggcaggcacaattttcatgagtttggccaagacgctcttcgtagaaatcaggttctggttgggct

SEQ ID NO: 73846 - DNA, 2107 bp, Homo sapiens
gaggtacccggctcgacttaggtcggactctcaacaaaacgtttataatccttcagaagggtctacgtggaatccctttgatgacgataatttctccaaactcacagctgaagaactgctaaacaaggactttgccaagcttggggaaggcaaacatcccgagaagcttggaggctcagctgagagtttgatcccaggctttcaatcaacccaaggtgatgcttttgctacgacctcattttctgctggaactgctgaaaaaaggaagggtgggcagactgtggactctggcctcccgcttctaagcgtgtctgatcctttcattcctcttcaagtacctgatgcaccagaaaaactaattgagggactcaaatctcctgacacttctcttctgctccctgacctcttgcctatgacagatccttttggtagcacttctgatgctgtaattggtaaagtcatcatctctgtttcttcagtcatgcatgatatgtgtgcctgtttcaagaatgacaagtacctagttaaccaatccctggggaatagccctgccaccccagaagccaaggctatttaatctcacttgtatcactccaaatgaagtgttttccttgcttttcgggggtacaacgtctattttttgcctttcttgatatctggagatttctagagtggatctcttatgaatgaggaggaatgtggaaagtttcacatttagttagaagaactttaaaaaattggtttctaactagactacctttactgaacttaatgaaatttagcagattcttcttttttttttttttgtttgagacagagtttcactcttgttgcctgggctggagtgcagtggcaagatctcggctcactgcagcctccatctcccgggttcaggcaattctcctgcctcagcctcccgagtagctggggttacaggcgtgcaccaccatgcctggctaatttttatatttttagtagagatggggtttctccatgttggtcaggctggtctcgaactcctgacctcaggtgatccgcctgccttggcctcccaaagtgctgggattgcaggggtgagccaccatgcccagcccagattcttctttggaaggcccatgtacatccagctgcagtgggacgagcctgggaagcatgggaagaccccatccctacaaaaaaagtgttgttaattggccaggtgtgggggtgcacgcctgtgctaccagctctttgggaggctgagacggaagatcactttgagccagggggtttgaggctgcagtgagccctgatcatgccactgccctccagcttaggtgacagagacccatcttaaacaaaattaaaaaatttaaaaaggtccatgtatataccaagtatcagtaactgagaaaacattttgcccactggttaagccccataaatagaatccagggcaggggcttggtctgcttcctctctcacattttcctatgttccaacagcaaggcaggcaagatttgcaaaatgtccaaggcccctgtactccaggagggtccaatcatgaggcacctaataatgcctttgggcagaaagtcctagaactcagaagtgccatgaccttgcataggggtaggcctgcagctgaggggtgtcacgtggtgcaaaaggcctcccagctacatcctgggatggggtttgagatggattaatggcctttgcatggcacagaggatgtttgcccccaggtttatcccttaataaaagtgaaattaccagaaaaaattaaggtgcctttcagcccatctcttctgacatggaagaggtttgctgagcggcttatgttctgaatttgtttatgagaactgatcattagtgagactggccacagtatttaaccttgcacatgcatgctcagtgaagcctagacattcagagcagcagaaataaagtaacttatttttctttccaccttgcctgagactggcattttagagacctgttaaaagaaagtcttcacatggctgggtgcagtggctcacacttgtaaccacaggactttgggaggccaaggtgggatagatcgcttgagctcaggagcaagacaccatctcaaaaaatgagaatt

SEQ ID NO: 73847 - DNA, 4869 bp, Homo sapiens
atgtggaggccacacggctgccgcctcgccctctcctccaggagtatgctgggattgtagtccagcagccggactgtgccgagctacctttcccagcttgccctgcggctcgggtgatatcaacagtcttttccagaactctgtctgcactgagaccctcttcccccagtcctcttctcgcggtcgactccttcccatccgtggcgacagaacggcggttgcaggagaggccccggtccctcgccgcgccgccccgaggggcacttccggcggcggttcacttcctggttgggtggatggagccgggcgggagcgcgcgcgggggaggggcggcgggtcagtctccgcccggcgctcccgggatcagctggcgggcgggcgggagccgagcgcggccccggctctcgctgcagcgccgcctcttctctgcgtcgcaggccggcccggcggccgtgacaatgtcgcggggctggtagcagggcgccggccgccgagccgtctcaagtttaaacttacacgaatcgctttctggaggaggaggggacccgctgcgcgattgacacgcatattcctataggcatcctccctcagcccccacccccacggccggattcgggtggctcctctccgaggtgaaatctgagaagaaatccttggatctcttttcttaaaaaaaaaaaaaaaaaaaaaaaaaaaaaaatctagaaaccatcggtattttgctttgctgctccctattcgcaagatgaagaagtttttcgactcccggcgagagcagggcggctctggcctgggctccggctccagcggaggagggggcagcacctcgggcctgggcagtggctacatcggaagagtcttcggcatcgggcgacagcaggtcacagtggacgaggtgttggcggaaggtggatttgctattgtatttctggtgaggacaagcaatgggatgaaatgtgccttgaaacgcatgtttgtcaacaatgagcatgatctccaggtgtgcaagagagaaatccagataatgagggatctttcagggcacaagaatattgtgggttacattgattctagtatcaacaacgtgagtagcggtgatgtatgggaagtgctcattctgatggacttttgtagaggtggccaggtggtaaacctgatgaaccagcgcctgcaaacaggctttacagagaatgaagtgctccagatattttgtgatacctgtgaagctgttgcccgcctgcatcagtgcaaaactcctattatccaccgggacctgaaggttgaaaacatcctcttgcatgaccgaggccactatgtcctgtgtgactttggaagcgccaccaacaaattccagaatccacaaactgagggagtcaatgcagtagaagatgagattaagaaatacacaacgctgtcctatcgagcaccagaaatggtcaacctgtacagtggcaaaatcatcactacgaaggcagacatttgggctcttggatgtttgttgtataaattatgctacttcactttgccatttggggaaagtcaggtggcaatttgtgatggaaacttcacaattcctgataattctcgatattctcaagacatgcactgcctaattaggtatatgttggaaccagaccctgacaaaaggccggatatttaccaggtgtcctacttctcatttaagctactcaagaaagagtgcccaattccaaatgtacagaactctcccattcctgcaaagcttcctgaaccagtgaaagccagtgaggcagctgcaaaaaagacccagccaaaggccagactgacagatcccattcccaccacagagacttcaattgcaccccgccagaggcctaaagctgggcagactcagccgaacccaggaatccttcccatccagccagcgctgacaccccggaagagggccactgttcagcccccacctcaggctgcaggatccagcaatcagcctggccttttagccagtgttccccaaccaaaaccccaagccccacccagccagcctctgccgcaaactcaggccaagcagccacaggctcctcccactccacagcagacgccttctactcaggcccagggtctgcccgctcaggcccaggccacaccccagcaccagcagcaactcttcctcaagcagcaacagcagcagcaacagccaccgccagcacagcagcagccggcaggcacgttttaccagcagcagcaggcccagactcagcagtttcaggcagtacatccagcaacccagcaaccagcaattgctcagttccctgtggtgtcccaaggaggctctcaacagcagctaatgcagaatttctaccagcagcagcagcagcagcacaacaacagcaacagcaacagctggccacagccctgcatcaacaacagctgatgactcagcaggctgccttgcagcaaaagcccactatggcagcaggacagcagccccagccacagccagctgcagccccacagccagcccctgcccaggagccagcgcagattcaagccccagtaagacaacagccaaaggttcagacaaccccacctcctgccgtccaggggcagaaagttggatctctcactccaccctcatcccccaaaacccaacgtgctgggcacaggcgtattctcagtgacgtaacccacagtgcagtctttggggtccctgccagcaaatcaacccagctgctccaggcagctgcagctgaggccagtctcaataagtccaagtctgcaaccaccactccatcaggctctcctcggacctctcaacaaaacgtttataatccttcagaagggtctacgtggaatccctttgatgacgataatttctccaaactcacagctgaagaactgctaaacaaggactttgccaagcttggggaaggcaaacatcccgagaagcttggaggctcagctgagagtttgatcccaggctttcaatcaacccaaggtgatgcttttgctacgacctcattttctgctggaactgctgaaaaaaggaagggtgggcagactgtggactctggcctcccgcttctaagcgtgtctgatcctttcattcctcttcaagtacctgatgcaccagaaaaactaattgagggactcaaatctcctgacacttctcttctgctccctgacctcttgcctatgacagatccttttggtagcacttctgatgctgtaattggtaaagtcatcatctctgtttcttcagtcatgcatgatatgtgtgcctgtttcaagaatgacaagtacctagttaaccaatccctggggaatagccctgccaccccagaagccaaggctatttaatctcacttgtatcactccaaatgaagtgttttccttgcttttcgggggtacaacgtctattttttgcctttcttgatatctggagatttctagagtggatctcttatgaatgaggaggaatgtggaaagtttcacatttagttagaagaactttaaaaaattggtttctaactagactacctttactgaacttaatgaaatttagcagattcttcttttttttttttttgtttgagacagagtttcactcttgttgcctgggctggagtgcagtggcaagatctcggctcactgcagcctccatctcccgggttcaggcaattctcctgcctcagcctcccgagtagctggggttacaggcgtgcaccaccatgcctggctaatttttatatttttagtagagatggggtttctccatgttggtcaggctggtctcgaactcctgacctcaggtgatccgcctgccttggcctcccaaagtgctgggattgcaggggtgagccaccatgcccagcccagattcttctttggaaggcccatgtacatccagctgcagtgggacgagcctgggaagcatgggaagaccccatccctacaaaaaaagtgttgttaattggccaggtgtgggggtgcacgcctgtgctaccagctctttgggaggctgagacggaagatcactttgagccagggggtttgaggctgcagtgagccctgatcatgccactgccctccagcttaggtgacagagacccatcttaaacaaaattaaaaaatttaaaaaggtccatgtatataccaagtatcagtaactgagaaaacattttgcccactggttaagccccataaatagaatccagggcaggggcttggtctgcttcctctctcacattttcctatgttccaacagcaaggcaggcaagatttgcaaaatgtccaaggcccctgtactccaggagggtccaatcatgaggcacctaataatgcctttgggcagaaagtcctagaactcagaagtgccatgaccttgcataggggtaggcctgcagctgaggggtgtcacgtggtgcaaaaggcctcccagctacatcctgggatggggtttgagatggattaatggcctttgcatggcacagaggatgtttgcccccaggtttatcccttaataaaagtgaaattaccagaaaaaattaaggtgcctttcagcccatctcttctgacatggaagaggtttgctgagcggcttatgttctgaatttgtttatgagaactgatcattagtgagactggccacagtatttaaccttgcacatgcatgctcagtgaagcctagacattcagagcagcagaaataaagtaacttatttttctttccaccttgcctgagactggcattttagagacctgttaaaagaaagtcttcacatggctgggtgcagtggctcacacttgtaaccacaggactttgggaggccaaggtgggatagatcgcttgagctcaggagcaagacaccatctcaaaaaatgagaatt

SEQ ID NO: 73848 - DNA, 2168 bp, Homo sapiens
atgtggaggccacacggctgccgcctcgccctctcctccaggagtatgctgggattgtagtccagcagccggactgtgccgagctacctttcccagcttgccctgcggctcgggtgatatcaacagtcttttccagaactctgtctgcactgagaccctcttcccccagtcctcttctcgcggtcgactccttcccatccgtggcgacagaacggcggttgcaggagaggccccggtccctcgccgcgccgccccgaggggcacttccggcggcggttcacttcctggttgggtggatggagccgggcgggagcgcgcgcgggggaggggcggcgggtcagtctccgcccggcgctcccgggatcagctggcgggcgggcgggagccgagcgcggccccggctctcgctgcagcgccgcctcttctctgcgtcgcaggccggcccggcggccgtgacaatgtcgcggggctggtagcagggcgccggccgccgagccgtctcaagtttaaacttacacgaatcgctttctggaggaggaggggacccgctgcgcgattgacacgcatattcctataggcatcctccctcagcccccacccccacggccggattcgggtggctcctctccgaggtgaaatctgagaagaaatccttggatctcttttcttaaaaaaaaaaaaaaaaaaaaaaaaaaaaaaatctagaaaccatcggtattttgctttgctgctccctattcgcaagatgaagaagtttttcgactcccggcgagagcagggcggctctggcctgggctccggctccagcggaggagggggcagcacctcgggcctgggcagtggctacatcggaagagtcttcggcatcgggcgacagcaggtcacagtggacgaggtgttggcggaaggtggatttgctattgtatttctggtgaggacaagcaatgggatgaaatgtgccttgaaacgcatgtttgtcaacaatgagcatgatctccaggtgtgcaagagagaaatccagataatgagggatctttcagggcacaagaatattgtgggttacattgattctagtatcaacaacgtgagtagcggtgatgtatgggaagtgctcattctgatggacttttgtagaggtggccaggtggtaaacctgatgaaccagcgcctgcaaacaggctttacagagaatgaagtgctccagatattttgtgatacctgtgaagctgttgcccgcctgcatcagtgcaaaactcctattatccaccgggacctgaaggttgaaaacatcctcttgcatgaccgaggccactatgtcctgtgtgactttggaagcgccaccaacaaattccagaatccacaaactgagggagtcaatgcagtagaagatgagattaagaaatacacaacgctgtcctatcgagcaccagaaatggtcaacctgtacagtggcaaaatcatcactacgaaggcagacatttgggctcttggatgtttgttgtataaattatgctacttcactttgccatttggggaaagtcaggtggcaatttgtgatggaaacttcacaattcctgataattctcgatattctcaagacatgcactgcctaattaggtatatgttggaaccagaccctgacaaaaggccggatatttaccaggtgtcctacttctcatttaagctactcaagaaagagtgcccaattccaaatgtacagaactctcccattcctgcaaagcttcctgaaccagtgaaagccagtgaggcagctgcaaaaaagacccagccaaaggccagactgacagatcccattcccaccacagagacttcaattgcaccccgccagaggcctaaagctgggcagactcagccgaacccaggaatccttcccatccagccagcgctgacaccccggaagagggccactgttcagcccccacctcaggctgcaggatccagcaatcagcctggccttttagccagtgttccccaaccaaaaccccaagccccacccagccagcctctgccgcaaactcaggccaagcagccacaggctcctcccactccacagcagacgccttctactcaggcccagggtctgcccgctcaggcccaggccacaccccagcaccagcagcatacaataaaacttagtatgaaacttt

SEQ ID NO: 73849 - DNA, 2468 bp, Homo sapiens
atgtggaggccacacggctgccgcctcgccctctcctccaggagtatgctgggattgtagtccagcagccggactgtgccgagctacctttcccagcttgccctgcggctcgggtgatatcaacagtcttttccagaactctgtctgcactgagaccctcttcccccagtcctcttctcgcggtcgactccttcccatccgtggcgacagaacggcggttgcaggagaggccccggtccctcgccgcgccgccccgaggggcacttccggcggcggttcacttcctggttgggtggatggagccgggcgggagcgcgcgcgggggaggggcggcgggtcagtctccgcccggcgctcccgggatcagctggcgggcgggcgggagccgagcgcggccccggctctcgctgcagcgccgcctcttctctgcgtcgcaggccggcccggcggccgtgacaatgtcgcggggctggtagcagggcgccggccgccgagccgtctcaagtgggtgctgccaggatgccgcctcgaggggcggcggggagacccgggaggagcgggaggcagtgcccgggagggtcggcgctgccggagcagctcggatccctcctttctccgagctcccggctcgggggtcccgggttctggggccggggtcgcgttttcagccccacggtttttctcgccgggaaaatacatgaagcgtttccccaggatgatggcttttgctccccctaggactcagcggttgaatttttaagcgtgttactgattcatcctctctttcttcctctgtcatcacaggtttaaacttacacgaatcgctttctggaggaggaggggacccgctgcgcgattgacacgcatattcctataggcatcctccctcagcccccacccccacggccggattcgggtggctcctctccgaggtgaaatctgagaagaaatccttggatctcttttcttaaaaaaaaaaaaaaaaaaaaaaaaaaaaaaatctagaaaccatcggtattttgctttgctgctccctattcgcaagatgaagaagtttttcgactcccggcgagagcagggcggctctggcctgggctccggctccagcggaggagggggcagcacctcgggcctgggcagtggctacatcggaagagtcttcggcatcgggcgacagcaggtcacagtggacgaggtgttggcggaaggtggatttgctattgtatttctggtgaggacaagcaatgggatgaaatgtgccttgaaacgcatgtttgtcaacaatgagcatgatctccaggtgtgcaagagagaaatccagataatgagggatctttcagggcacaagaatattgtgggttacattgattctagtatcaacaacgtgagtagcggtgatgtatgggaagtgctcattctgatggacttttgtagaggtggccaggtggtaaacctgatgaaccagcgcctgcaaacaggctttacagagaatgaagtgctccagatattttgtgatacctgtgaagctgttgcccgcctgcatcagtgcaaaactcctattatccaccgggacctgaaggttgaaaacatcctcttgcatgaccgaggccactatgtcctgtgtgactttggaagcgccaccaacaaattccagaatccacaaactgagggagtcaatgcagtagaagatgagattaagaaatacacaacgctgtcctatcgagcaccagaaatggtcaacctgtacagtggcaaaatcatcactacgaaggcagacatttgggctcttggatgtttgttgtataaattatgctacttcactttgccatttggggaaagtcaggtggcaatttgtgatggaaacttcacaattcctgataattctcgatattctcaagacatgcactgcctaattaggtatatgttggaaccagaccctgacaaaaggccggatatttaccaggtgtcctacttctcatttaagctactcaagaaagagtgcccaattccaaatgtacagaactctcccattcctgcaaagcttcctgaaccagtgaaagccagtgaggcagctgcaaaaaagacccagccaaaggccagactgacagatcccattcccaccacagagacttcaattgcaccccgccagaggcctaaagctgggcagactcagccgaacccaggaatccttcccatccagccagcgctgacaccccggaagagggccactgttcagcccccacctcaggctgcaggatccagcaatcagcctggccttttagccagtgttccccaaccaaaaccccaagccccacccagccagcctctgccgcaaactcaggccaagcagccacaggctcctcccactccacagcagacgccttctactcaggcccagggtctgcccgctcaggcccaggccacaccccagcaccagcagcatacaataaaacttagtatgaaacttt

SEQ ID NO: 73850 - DNA, 1992 bp, Homo sapiens
gaggaaaaaaacagcagaatctatttttcattgtgggagagcccaggttgtcctgcttatctgaaattaagcccaaatcctaaaatttctgaatacctgctgtcagcttcctgcaaacgggccaggttgcctaaggaatgtcatgagagagctggcagaggcaggggacaggacaggcaccagcaaacaccacttcaccatgcagctattttcatgtcctcccagcccactgaagtgctgataatggcttggatcaattcaacaaacacatttcgtatacctcctttgcaccagacagtgttcaccgaggcacgcagggtggccgcaggtttaaacttacacgaatcgctttctggaggaggaggggacccgctgcgcgattgacacgcatattcctataggcatcctccctcagcccccacccccacggccggattcgggtggctcctctccgaggtgaaatctgagaagaaatccttggatctcttttcttaaaaaaaaaaaaaaaaaaaaaaaaaaaaaaatctagaaaccatcggtattttgctttgctgctccctattcgcaagatgaagaagtttttcgactcccggcgagagcagggcggctctggcctgggctccggctccagcggaggagggggcagcacctcgggcctgggcagtggctacatcggaagagtcttcggcatcgggcgacagcaggtcacagtggacgaggtgttggcggaaggtggatttgctattgtatttctggtgaggacaagcaatgggatgaaatgtgccttgaaacgcatgtttgtcaacaatgagcatgatctccaggtgtgcaagagagaaatccagataatgagggatctttcagggcacaagaatattgtgggttacattgattctagtatcaacaacgtgagtagcggtgatgtatgggaagtgctcattctgatggacttttgtagaggtggccaggtggtaaacctgatgaaccagcgcctgcaaacaggctttacagagaatgaagtgctccagatattttgtgatacctgtgaagctgttgcccgcctgcatcagtgcaaaactcctattatccaccgggacctgaaggttgaaaacatcctcttgcatgaccgaggccactatgtcctgtgtgactttggaagcgccaccaacaaattccagaatccacaaactgagggagtcaatgcagtagaagatgagattaagaaatacacaacgctgtcctatcgagcaccagaaatggtcaacctgtacagtggcaaaatcatcactacgaaggcagacatttgggctcttggatgtttgttgtataaattatgctacttcactttgccatttggggaaagtcaggtggcaatttgtgatggaaacttcacaattcctgataattctcgatattctcaagacatgcactgcctaattaggtatatgttggaaccagaccctgacaaaaggccggatatttaccaggtgtcctacttctcatttaagctactcaagaaagagtgcccaattccaaatgtacagaactctcccattcctgcaaagcttcctgaaccagtgaaagccagtgaggcagctgcaaaaaagacccagccaaaggccagactgacagatcccattcccaccacagagacttcaattgcaccccgccagaggcctaaagctgggcagactcagccgaacccaggaatccttcccatccagccagcgctgacaccccggaagagggccactgttcagcccccacctcaggctgcaggatccagcaatcagcctggccttttagccagtgttccccaaccaaaaccccaagccccacccagccagcctctgccgcaaactcaggccaagcagccacaggctcctcccactccacagcagacgccttctactcaggcccagggtctgcccgctcaggcccaggccacaccccagcaccagcagcatacaataaaacttagtatgaaacttt

SEQ ID NO: 73851 - DNA, 3039 bp, Homo sapiens
atgtggaggccacacggctgccgcctcgccctctcctccaggagtatgctgggattgtagtccagcagccggactgtgccgagctacctttcccagcttgccctgcggctcgggtgatatcaacagtcttttccagaactctgtctgcactgagaccctcttcccccagtcctcttctcgcggtcgactccttcccatccgtggcgacagaacggcggttgcaggagaggccccggtccctcgccgcgccgccccgaggggcacttccggcggcggttcacttcctggttgggtggatggagccgggcgggagcgcgcgcgggggaggggcggcgggtcagtctccgcccggcgctcccgggatcagctggcgggcgggcgggagccgagcgcggccccggctctcgctgcagcgccgcctcttctctgcgtcgcaggccggcccggcggccgtgacaatgtcgcggggctggtagcagggcgccggccgccgagccgtctcaagtttaaacttacacgaatcgctttctggaggaggaggggacccgctgcgcgattgacacgcatattcctataggcatcctccctcagcccccacccccacggccggattcgggtggctcctctccgaggtgaaatctgagaagaaatccttggatctcttttcttaaaaaaaaaaaaaaaaaaaaaaaaaaaaaaatctagaaaccatcggtattttgctttgctgctccctattcgcaagatgaagaagtttttcgactcccggcgagagcagggcggctctggcctgggctccggctccagcggaggagggggcagcacctcgggcctgggcagtggctacatcggaagagtcttcggcatcgggcgacagcaggtcacagtggacgaggtgttggcggaaggtggatttgctattgtatttctggtgaggacaagcaatgggatgaaatgtgccttgaaacgcatgtttgtcaacaatgagcatgatctccaggtgtgcaagagagaaatccagataatgagggatctttcagggcacaagaatattgtgggttacattgattctagtatcaacaacgtgagtagcggtgatgtatgggaagtgctcattctgatggacttttgtagaggtggccaggtggtaaacctgatgaaccagcgcctgcaaacaggctttacagagaatgaagtgctccagatattttgtgatacctgtgaagctgttgcccgcctgcatcagtgcaaaactcctattatccaccgggacctgaaggttgaaaacatcctcttgcatgaccgaggccactatgtcctgtgtgactttggaagcgccaccaacaaattccagaatccacaaactgagggagtcaatgcagtagaagatgagattaagaaatacacaacgctgtcctatcgagcaccagaaatggtcaacctgtacagtggcaaaatcatcactacgaaggcagacatttgggctcttggatgtttgttgtataaattatgctacttcactttgccatttggggaaagtcaggtggcaatttgtgatggaaacttcacaattcctgataattctcgatattctcaagacatgcactgcctaattaggtatatgttggaaccagaccctgacaaaaggccggatatttaccaggtgtcctacttctcatttaagctactcaagaaagagtgcccaattccaaatgtacagaactctcccattcctgcaaagcttcctgaaccagtgaaagccagtgaggcagctgcaaaaaagacccagccaaaggccagactgacagatcccattcccaccacagagacttcaattgcaccccgccagaggcctaaagctgggcagactcagccgaacccaggaatccttcccatccagccagcgctgacaccccggaagagggccactgttcagcccccacctcaggctgcaggatccagcaatcagcctggccttttagccagtgttccccaaccaaaaccccaagccccacccagccagcctctgccgcaaactcaggccaagcagccacaggctcctcccactccacagcagacgccttctactcaggcccagggtctgcccgctcaggcccaggccacaccccagcaccagcagcaactcttcctcaagcagcaacagcagcagcaacagccaccgccagcacagcagcagccggcaggcacgttttaccagcagcagcaggcccagactcagcagtttcaggcagtacatccagcaacccagcaaccagcaattgctcagttccctgtggtgtcccaaggaggctctcaacagcagctaatgcagaatttctaccagcagcagcagcagcagcacaacaacagcaacagcaacagctggccacagccctgcatcaacaacagctgatgactcagcaggctgccttgcagcaaaagcccactatggcagcaggacagcagccccagccacagccagctgcagccccacagccagcccctgcccaggagccagcgcagattcaagccccagtaagacaacagccaaaggttcagacaaccccacctcctgccgtccaggggcagaaagttggatctctcactccaccctcatcccccaaaacccaacgtgctgggcacaggcgtattctcagtgacgtaacccacagtgcagtctttggggtccctgccagcaaatcaacccagctgctccaggcagctgcagctgaggccagtctcaataagtccaagtctgcaaccaccactccatcaggctctcctcggacctctcaacaaaacgtttataatccttcagaagggtctacgtggaatccctttgatgacgataatttctccaaactcacagctgaagaactgctaaacaaggactttgccaagcttggggaaggcaaacatcccgagaagcttggaggctcagctgagagtttgatcccaggctttcaatcaacccaaggtgatgcttttgctacgacctcattttctgctggaactggttagtatggcaaatacctggaa

SEQ ID NO: 73852 - DNA, 2389 bp, Homo sapiens
atgtggaggccacacggctgccgcctcgccctctcctccaggagtatgctgggattgtagtccagcagccggactgtgccgagctacctttcccagcttgccctgcggctcgggtgatatcaacagtcttttccagaactctgtctgcactgagaccctcttcccccagtcctcttctcgcggtcgactccttcccatccgtggcgacagaacggcggttgcaggagaggccccggtccctcgccgcgccgccccgaggggcacttccggcggcggttcacttcctggttgggtggatggagccgggcgggagcgcgcgcgggggaggggcggcgggtcagtctccgcccggcgctcccgggatcagctggcgggcgggcgggagccgagcgcggccccggctctcgctgcagcgccgcctcttctctgcgtcgcaggccggcccggcggccgtgacaatgtcgcggggctggtagcagggcgccggccgccgagccgtctcaagtttaaacttacacgaatcgctttctggaggaggaggggacccgctgcgcgattgacacgcatattcctataggcatcctccctcagcccccacccccacggccggattcgggtggctcctctccgaggtgaaatctgagaagaaatccttggatctcttttcttaaaaaaaaaaaaaaaaaaaaaaaaaaaaaaatctagaaaccatcggtattttgctttgctgctccctattcgcaagatgaagaagtttttcgactcccggcgagagcagggcggctctggcctgggctccggctccagcggaggagggggcagcacctcgggcctgggcagtggctacatcggaagagtcttcggcatcgggcgacagcaggtcacagtggacgaggtgttggcggaaggtggatttgctattgtatttctggtgaggacaagcaatgggatgaaatgtgccttgaaacgcatgtttgtcaacaatgagcatgatctccaggtgtgcaagagagaaatccagataatgagggatctttcagggcacaagaatattgtgggttacattgattctagtatcaacaacgtgagtagcggtgatgtatgggaagtgctcattctgatggacttttgtagaggtggccaggtggtaaacctgatgaaccagcgcctgcaaacaggctttacagagaatgaagtgctccagatattttgtgatacctgtgaagctgttgcccgcctgcatcagtgcaaaactcctattatccaccgggacctgaaggttgaaaacatcctcttgcatgaccgaggccactatgtcctgtgtgactttggaagcgccaccaacaaattccagaatccacaaactgagggagtcaatgcagtagaagatgagattaagaaatacacaacgctgtcctatcgagcaccagaaatggtcaacctgtacagtggcaaaatcatcactacgaaggcagacatttgggctcttggatgtttgttgtataaattatgctacttcactttgccatttggggaaagtcaggtggcaatttgtgatggaaacttcacaattcctgataattctcgatattctcaagacatgcactgcctaattaggtatatgttggaaccagaccctgacaaaaggccggatatttaccaggtgtcctacttctcatttaagctactcaagaaagagtgcccaattccaaatgtacagaactctcccattcctgcaaagcttcctgaaccagtgaaagccagtgaggcagctgcaaaaaagacccagccaaaggccagactgacagatcccattcccaccacagagacttcaattgcaccccgccagaggcctaaagctgggcagactcagccgaacccaggaatccttcccatccagccagcgctgacaccccggaagagggccactgttcagcccccacctcaggctgcaggatccagcaatcagcctggccttttagccagtgttccccaaccaaaaccccaagccccacccagccagcctctgccgcaaactcaggccaagcagccacaggctcctcccactccacagcagacgccttctactcaggcccagggtctgcccgctcaggcccaggccacaccccagcaccagcagcaactcttcctcaagcagcaacagcagcagcaacagccaccgccagcacacagcagcacaacaacagcaacagcaacagctggccacagccctgcatcaacaacagctgatgactcagcaggctgccttgcagcaaaagcccactatggcagcaggacagcagccccagccacagccagctgcagccccacagccagcccctgcccaggagccagcgcagctcgctcctgagttgggatcctctagatc

SEQ ID NO: 73853 - DNA, 1871 bp, Homo sapiens
atgtggaggccacacggctgccgcctcgccctctcctccaggagtatgctgggattgtagtccagcagccggactgtgccgagctacctttcccagcttgccctgcggctcgggtgatatcaacagtcttttccagaactctgtctgcactgagaccctcttcccccagtcctcttctcgcggtcgactccttcccatccgtggcgacagaacggcggttgcaggagaggccccggtccctcgccgcgccgccccgaggggcacttccggcggcggttcacttcctggttgggtggatggagccgggcgggagcgcgcgcgggggaggggcggcgggtcagtctccgcccggcgctcccgggatcagctggcgggcgggcgggagccgagcgcggccccggctctcgctgcagcgccgcctcttctctgcgtcgcaggccggcccggcggccgtgacaatgtcgcggggctggtagcagggcgccggccgccgagccgtctcaagtttaaacttacacgaatcgctttctggaggaggaggggacccgctgcgcgattgacacgcatattcctataggcatcctccctcagcccccacccccacggccggattcgggtggctcctctccgaggtgaaatctgagaagaaatccttggatctcttttcttaaaaaaaaaaaaaaaaaaaaaaaaaaaaaaatctagaaaccatcggtattttgctttgctgctccctattcgcaagatgaagaagtttttcgactcccggcgagagcagggcggctctggcctgggctccggctccagcggaggagggggcagcacctcgggcctgggcagtggctacatcggaagagtcttcggcatcgggcgacagcaggtcacagtggacgaggtgttggcggaaggtggatttgctattgtatttctggtgaggacaagcaatgggatgaaatgtgccttgaaacgcatgtttgtcaacaatgagcatgatctccaggtgtgcaagagagaaatccagataatgagggatctttcagggcacaagaatattgtgggttacattgattctagtatcaacaacgtgagtagcggtgatgtatgggaagtgctcattctgatggacttttgtagaggtggccaggtggtaaacctgatgaaccagcgcctgcaaacaggctttacagagaatgaagtgctccagatattttgtgatacctgtgaagctgttgcccgcctgcatcagtgcaaaactcctattatccaccgggacctgaaggttgaaaacatcctcttgcatgaccgaggccactatgtcctgtgtgactttggaagcgccaccaacaaattccagaatccacaaactgagggagtcaatgcagtagaagatgagattaagaaatacacaacgctgtcctatcgagcaccagaaatggtcaacctgtacagtggcaaaatcatcactacgaaggcagacatttgggctcttggatgtttgttgtataaattatgctacttcactttgccatttggggaaagtcaggtggcaatttgtgatggaaacttcacaattcctgataattctcgatattctcaagacatgcactgcctaattaggtatatgttggaaccagaccctgacaaaaggccggatatttaccaggtgtcctacttctcatttaagctactcaagaaagagtgcccaattccaaatgtacagaactctccctaacatcttacaaagtcttatcaacaggaatattaatattattttcagtatcagaaaaaaaaaaacagttgagcagcacaggcaaaaatatatctgcactacgtttctgtcgttgccaaaaatatacacatcttcttttctt

SEQ ID NO: 73854 - DNA, 1668 bp, Homo sapiens
atgtggaggccacacggctgccgcctcgccctctcctccaggagtatgctgggattgtagtccagcagccggactgtgccgagctacctttcccagcttgccctgcggctcgggtgatatcaacagtcttttccagaactctgtctgcactgagaccctcttcccccagtcctcttctcgcggtcgactccttcccatccgtggcgacagaacggcggttgcaggagaggccccggtccctcgccgcgccgccccgaggggcacttccggcggcggttcacttcctggttgggtggatggagccgggcgggagcgcgcgcgggggaggggcggcgggtcagtctccgcccggcgctcccgggatcagctggcgggcgggcgggagccgagcgcggccccggctctcgctgcagcgccgcctcttctctgcgtcgcaggccggcccggcggccgtgacaatgtcgcggggctggtagcagggcgccggccgccgagccgtctcaagtttaaacttacacgaatcgctttctggaggaggaggggacccgctgcgcgattgacacgcatattcctataggcatcctccctcagcccccacccccacggccggattcgggtggctcctctccgaggtgaaatctgagaagaaatccttggatctcttttcttaaaaaaaaaaaaaaaaaaaaaaaaaaaaaaatctagaaaccatcggtattttgctttgctgctccctattcgcaagatgaagaagtttttcgactcccggcgagagcagggcggctctggcctgggctccggctccagcggaggagggggcagcacctcgggcctgggcagtggctacatcggaagagtcttcggcatcgggcgacagcaggtcacagtggacgaggtgttggcggaaggtggatttgctattgtatttctggtgaggacaagcaatgggatgaaatgtgccttgaaacgcatgtttgtcaacaatgagcatgatctccaggtgtgcaagagagaaatccagataatgagggatctttcagggcacaagaatattgtgggttacattgattctagtatcaacaacgtgagtagcggtgatgtatgggaagtgctcattctgatggacttttgtagaggtggccaggtggtaaacctgatgaaccagcgcctgcaaacaggctttacagagaatgaagtgctccagatattttgtgatacctgtgaagctgttgcccgcctgcatcagtgcaaaactcctattatccaccgggacctgaaggttgaaaacatcctcttgcatgaccgaggccactatgtcctgtgtgactttggaagcgccaccaacaaattccagaatccacaaactgagggagtcaatgcagtagaagatgagattaagaaatacacaacgctgtcctatcgagcaccagaaatggtcaacctgtacagtggcaaaatcatcactacgaaggcagacatttgggctcttggatgtttgttgtataaattatgctacttcactttgccatttggggaaagtcaggtggcaatttgtgatggaaacttcacaattcctgataattctcgatattctcaagacatgcactgcctaattaggtatatgttggaaccagacctgactatagccgcatccaaagcgggatcctt

SEQ ID NO: 73855 - DNA, 1533 bp, Homo sapiens
atgtggaggccacacggctgccgcctcgccctctcctccaggagtatgctgggattgtagtccagcagccggactgtgccgagctacctttcccagcttgccctgcggctcgggtgatatcaacagtcttttccagaactctgtctgcactgagaccctcttcccccagtcctcttctcgcggtcgactccttcccatccgtggcgacagaacggcggttgcaggagaggccccggtccctcgccgcgccgccccgaggggcacttccggcggcggttcacttcctggttgggtggatggagccgggcgggagcgcgcgcgggggaggggcggcgggtcagtctccgcccggcgctcccgggatcagctggcgggcgggcgggagccgagcgcggccccggctctcgctgcagcgccgcctcttctctgcgtcgcaggccggcccggcggccgtgacaatgtcgcggggctggtagcagggcgccggccgccgagccgtctcaagtttaaacttacacgaatcgctttctggaggaggaggggacccgctgcgcgattgacacgcatattcctataggcatcctccctcagcccccacccccacggccggattcgggtggctcctctccgaggtgaaatctgagaagaaatccttggatctcttttcttaaaaaaaaaaaaaaaaaaaaaaaaaaaaaaatctagaaaccatcggtattttgctttgctgctccctattcgcaagatgaagaagtttttcgactcccggcgagagcagggcggctctggcctgggctccggctccagcggaggagggggcagcacctcgggcctgggcagtggctacatcggaagagtcttcggcatcgggcgacagcaggtcacagtggacgaggtgttggcggaaggtggatttgctattgtatttctggtgaggacaagcaatgggatgaaatgtgccttgaaacgcatgtttgtcaacaatgagcatgatctccaggtgtgcaagagagaaatccagataatgagggatctttcagggcacaagaatattgtgggttacattgattctagtatcaacaacgtgagtagcggtgatgtatgggaagtgctcattctgatggacttttgtagaggtggccaggtggtaaacctgatgaaccagcgcctgcaaacaggctttacagagaatgaagtgctccagatattttgtgatacctgtgaagctgttgcccgcctgcatcagtgcaaaactcctattatccaccgggacctgaaggttgaaaacatcctcttgcatgaccgaggccactatgtcctgtgtgactttggaagcgccaccaacaaattccagaatccacaaactgagggagtcaatgcagtagaagatgagattaagaagtaagctttttctcctttcatggagttttgtccacaatcagatgagcaactttaccttcagcttatggatgagaaggtcagggtggggagagaatggtgatagtcagttgtccttcatctcagagcatcatg

SEQ ID NO: 73856 - DNA, 1087 bp, Homo sapiens
  misc_feature (1087)..(1087): n is a, c, g, or t
atgtggaggccacacggctgccgcctcgccctctcctccaggagtatgctgggattgtagtccagcagccggactgtgccgagctacctttcccagcttgccctgcggctcgggtgatatcaacagtcttttccagaactctgtctgcactgagaccctcttcccccagtcctcttctcgcggtcgactccttcccatccgtggcgacagaacggcggttgcaggagaggccccggtccctcgccgcgccgccccgaggggcacttccggcggcggttcacttcctggttgggtggatggagccgggcgggagcgcgcgcgggggaggggcggcgggtcagtctccgcccggcgctcccgggatcagctggcgggcgggcgggagccgagcgcggccccggctctcgctgcagcgccgcctcttctctgcgtcgcaggccggcccggcggccgtgacaatgtcgcggggctggtagcagggcgccggccgccgagccgtctcaagtttaaacttacacgaatcgctttctggaggaggaggggacccgctgcgcgattgacacgcatattcctataggcatcctccctcagcccccacccccacggccggattcgggtggctcctctccgaggtgaaatctgagaagaaatccttggatctcttttcttaaaaaaaaaaaaaaaaaaaaaaaaaaaaaaatctagaaaccatcggtattttgctttgctgctccctattcgcaagatgaagaagtttttcgactcccggcgagagcagggcggctctggcctgggctccggctccagcggaggagggggcagcacctcgggcctgggcagtggctacatcggaagagtcttcggcatcgggcgacagcaggtcacagtggacgaggtgttggcggaaggtggatttgctattgtatttctggtgaggacaagcaatgggatgaaatgtgccttgaaacgcatgtttgtcaacaatgagcatgatctccaggtgtgcaagagagaaatccagataatgagggatctttcaggcacaagaatatttggggttagtctgggggtcctctagagtacccgn

SEQ ID NO: 73857 - DNA, 121 bp, Homo sapiens
ctgccagcaaatcaacccagctgctccaggcagctgcagctgaggccagtctcaataagtccaagtatgtggtgcttcctctttgttgttcttacctctgtgggcaaagtcctggcggctg

SEQ ID NO: 73858 - DNA, 540 bp, Homo sapiens
agggatctttcagggcacaagaatattgtgggttacattgattctagtatcaacaacgtgagtagcggtgatgtatgggaagtgctcattctgatggacttttgtagaggtatgtatatgaaccattcccttaagctgtcatttctctagcattttgattgtcatggttagggtggtcatttcacttaatgtgcactgcactctatgatatgttctggtttgacagatgagaaaactaaaagatacagtctgctgtcaactcttagttattcttataacggtacaaacgtagataatatagaactccatttttgttaggtttgggaaggtttggtgtttgtatataaatgaagatgtgtaagaatgagaatgaatatgttctttgtgatgctttataacaaatgatgaaggcacataataaaggctgaactccagatggatgaaagaaacagtgcagcttccccaactccctcacttgtgtgttctctttcccactcatgccatcattcatgtgttacggggtaaaagcatcctttttgt

SEQ ID NO: 73859 - DNA, 744 bp, Homo sapiens
gctcctggtttttaattatagtattgacatatttaataaaaaatgaatctcttgattgtagatacacaacgctgtcctatcgagcaccagaaatggtcaacctgtacagtggcaaaatcatcactacgaaggcagacatttgggtaggtgtcaggtaacctatccatacctcagatagcagcagtcttgactgtgaattcccaaggttaatgcacacagcgctatagcatggtggctactgtaccatatcatggtctacttacccctcaaggttattcttgatgtgagaataccagccactgcttcttgaagcatgataaagaaaattacttccaagctctgtgaaaattatttagattttttttcatgtatatgttactggttcttaagagcaaaacaggtaaatacttattatttactggaacacgatttggtaataatggtagaaataatgtaactcagctgctaacagtggtgttgggttctaaaactcatgtttctaatacattaatagtctatagtttttgtatctgctagtaaatgtggatggtgccagtttctcattagatccatttagagtcatgataaataagccactagtagcaatctgctatctttattttttaggctcttggatgtttgttgtataaattatgctacttcactttgccatttggggaaagtcaggtggcaatttgtgatggaaacttcacaattcctgataattctcgatattctcaagac

SEQ ID NO: 73860 - DNA, 1951 bp, Homo sapiens
atgtggaggccacacggctgccgcctcgccctctcctccaggagtatgctgggattgtagtccagcagccggactgtgccgagctacctttcccagcttgccctgcggctcgggtgatatcaacagtcttttccagaactctgtctgcactgagaccctcttcccccagtcctcttctcgcggtcgactccttcccatccgtggcgacagaacggcggttgcaggagaggccccggtccctcgccgcgccgccccgaggggcacttccggcggcggttcacttcctggtttaaacttacacgaatcgctttctggaggaggaggggacccgctgcgcgattgacacgcatattcctataggcatcctccctcagcccccacccccacggccggattcgggtggctcctctccgaggtgaaatctgagaagaaatccttggatctcttttcttaaaaaaaaaaaaaaaaaaaaaaaaaaaaaaatctagaaaccatcggtattttgctttgctgctccctattcgcaagatgaagaagtttttcgactcccggcgagagcagggcggctctggcctgggctccggctccagcggaggagggggcagcacctcgggcctgggcagtggctacatcggaagagtcttcggcatcgggcgacagcaggtcacagtggacgaggtgttggcggaaggtggatttgctattgtatttctggtgaggacaagcaatgggatgaaatgtgccttgaaacgcatgtttgtcaacaatgagcatgatctccaggtgtgcaagagagaaatccagataatgagggatctttcagggcacaagaatattgtgggttacattgattctagtatcaacaacgtgagtagcggtgatgtatgggaagtgctcattctgatggacttttgtagaggtggccaggtggtaaacctgatgaaccagcgcctgcaaacaggctttacagagaatgaagtgctccagatattttgtgatacctgtgaagctgttgcccgcctgcatcagtgcaaaactcctattatccaccgggacctgaaggttgaaaacatcctcttgcatgaccgaggccactatgtcctgtgtgactttggaagcgccaccaacaaattccagaatccacaaactgagggagtcaatgcagtagaagatgagattaagaaatacacaacgctgtcctatcgagcaccagaaatggtcaacctgtacagtggcaaaatcatcactacgaaggcagacatttgggctcttggatgtttgttgtataaattatgctacttcactttgccatttggggaaagtcaggtggcaatttgtgatggaaacttcacaattcctgataattctcgatattctcaagacatgcactgcctaattaggtatatgttggaaccagaccctgacaaaaggccggatatttaccaggtgtcctacttctcatttaagctactcaagaaagagtgcccaattccaaatgtacagaactctcccattcctgcaaagcttcctgaaccagtgaaagccagtgaggcagctgcaaaaaagacccagccaaaggccagactgacagatcccattcccaccacagagacttcaattgcaccccgccagaggcctaaagctgggcagactcagccgaacccaggaatccttcccatccagccagcgctgacaccccggaagagggccactgttcagcccccacctcaggctgcaggatccagcaatcagcctggccttttagccagtgttccccaaccaaaaccccaagccccacccagccagcctctgccgcaaactcaggccaagcagccacaggctcctcccactccacagcagacgccttctactcaggcccagggtctgcccgctcaggcccaggccacaccccagcaccagcagcatacaataaaacttagtatgaaacttt

SEQ ID NO: 73861 - DNA, 2387 bp, Homo sapiens
atgtggaggccacacggctgccgcctcgccctctcctccaggagtatgctgggattgtagtccagcagccggactgtgccgagctacctttcccagcttgccctgcggctcgggtgatatcaacagtcttttccagaactctgtctgcactgagaccctcttcccccagtcctcttctcgcggtcgactccttcccatccgtggcgacagaacggcggttgcaggagaggccccggtccctcgccgcgccgccccgaggggcacttccggcggcggttcacttcctggttgggtggatggagccgggcgggagcgcgcgcgggggaggggcggcgggtcagtctccgcccggcgctcccgggatcagctggcgggcgggcgggagccgagcgcggccccggctctcgctgcagcgccgcctcttctctgcgtcgcaggccggcccggcggccgtgacaatgtcgcggggctggtagcagggcgccggccgccgagccgtctcaagtttaaacttacacgaatcgctttctggaggaggaggggacccgctgcgcgattgacacgcatattcctataggcatcctccctcagcccccacccccacggccggattcgggtggctcctctccgaggtgaaatctgagaagaaatccttggatctcttttcttaaaaaaaaaaaaaaaaaaaaaaaaaaaaaaatctagaaaccatcggtattttgctttgctgctccctattcgcaagatgaagaagtttttcgactcccggcgagagcagggcggctctggcctgggctccggctccagcggaggagggggcagcacctcgggcctgggcagtggctacatcggaagagtcttcggcatcgggcgacagcaggtcacagtggacgaggtgttggcggaaggtggatttgctattgtatttctggtgaggacaagcaatgggatgaaatgtgccttgaaacgcatgtttgtcaacaatgagcatgatctccaggtgtgcaagagagaaatccagataatgagggatctttcagggcacaagaatattgtgggttacattgattctagtatcaacaacgtgagtagcggtgatgtatgggaagtgctcattctgatggacttttgtagaggtggccaggtggtaaacctgatgaaccagcgcctgcaaacaggctttacagagaatgaagtgctccagatattttgtgatacctgtgaagctgttgcccgcctgcatcagtgcaaaactcctattatccaccgggacctgaaggttgaaaacatcctcttgcatgaccgaggccactatgtcctgtgtgactttggaagcgccaccaacaaattccagaatccacaaactgagggagtcaatgcagtagaagatgagattaagaaatacacaacgctgtcctatcgagcaccagaaatggtcaacctgtacagtggcaaaatcatcactacgaaggcagacatttgggctcttggatgtttgttgtataaattatgctacttcactttgccatttggggaaagtcaggtggcaatttgtgatggaaacttcacaattcctgataattctcgatattctcaagacatgcactgcctaattaggtatatgttggaaccagaccctgacaaaaggccggatatttaccaggtgtcctacttctcatttaagctactcaagaaagagtgcccaattccaaatgtacagaactctcccattcctgcaaagcttcctgaaccagtgaaagccagtgaggcagctgcaaaaaagacccagccaaaggccagactgacagatcccattcccaccacagagacttcaattgcaccccgccagaggcctaaagctgggcagactcagccgaacccaggaatccttcccatccagccagcgctgacaccccggaagagggccactgttcagcccccacctcaggctgcaggatccagcaatcagcctggccttttagccagtgttccccaaccaaaaccccaagccccacccagccagcctctgccgcaaactcaggccaagcagccacaggctcctcccactccacagcagacgccttctactcaggcccagggtctgcccgctcaggcccaggccacaccccagcaccagcagcaactcttcctcaagcagcaacagcagcagcaacagccaccgccagcacagcagcagccggcaggcacgttttaccagcagcagcaggcccagactcagcagacaccacccctatcccctgcctccccatctcagaagagggtggaagatgaaatgaaagctatgggactcttggaggatacccagtgtctattctgggttagagaagtgcttactaaggggttttctaataaaaacaaatgccaca

SEQ ID NO: 73862 - DNA, 1833 bp, Homo sapiens
atgtggaggccacacggctgccgcctcgccctctcctccaggagtatgctgggattgtagtccagcagccggactgtgccgagctacctttcccagcttgccctgcggctcgggtgatatcaacagtcttttccagaactctgtctgcactgagaccctcttcccccagtcctcttctcgcggtcgactccttcccatccgtggcgacagaacggcggttgcaggagaggccccggtccctcgccgcgccgccccgaggggcacttccggcggcggttcacttcctggttgggtggatggagccgggcgggagcgcgcgcgggggaggggcggcgggtcagtctccgcccggcgctcccgggatcagctggcgggcgggcgggagccgagcgcggccccggctctcgctgcagcgccgcctcttctctgcgtcgcaggccggcccggcggccgtgacaatgtcgcggggctggtagcagggcgccggccgccgagccgtctcaagtttaaacttacacgaatcgctttctggaggaggaggggacccgctgcgcgattgacacgcatattcctataggcatcctccctcagcccccacccccacggccggattcgggtggctcctctccgaggtgaaatctgagaagaaatccttggatctcttttcttaaaaaaaaaaaaaaaaaaaaaaaaaaaaaaatctagaaaccatcggtattttgctttgctgctccctattcgcaagatgaagaagtttttcgactcccggcgagagcagggcggctctggcctgggctccggctccagcggaggagggggcagcacctcgggcctgggcagtggctacatcggaagagtcttcggcatcgggcgacagcaggtcacagtggacgaggtgttggcggaaggtggatttgctattgtatttctggtgaggacaagcaatgggatgaaatgtgccttgaaacgcatgtttgtcaacaatgagcatgatctccaggtgtgcaagagagaaatccagataatgagggatctttcagggcacaagaatattgtgggttacattgattctagtatcaacaacgtgagtagcggtgatgtatgggaagtgctcattctgatggacttttgtagaggtggccaggtggtaaacctgatgaaccagcgcctgcaaacaggctttacagagaatgaagtgctccagatattttgtgatacctgtgaagctgttgcccgcctgcatcagtgcaaaactcctattatccaccgggacctgaaggttgaaaacatcctcttgcatgaccgaggccactatgtcctgtgtgactttggaagcgccaccaacaaattccagaatccacaaactgagggagtcaatgcagtagaagatgagattaagaaatacacaacgctgtcctatcgagcaccagaaatggtcaacctgtacagtggcaaaatcatcactacgaaggcagacatttgggctcttggatgtttgttgtataaattatgctacttcactttgccatttggggaaagtcaggtggcaatttgtgatggaaacttcacaattcctgataattctcgatattctcaagacatgcactgcctaattaggtatatgttggaaccagaccctgacaaaaggccggatatttaccaggtgtcctacttctcatttaagctactcaagaaagagtgcccaattccaaatgtacagaactctcccattcctgcaaagcttcctgaaccagtgaaagccagtgaggcagctgcaaaaaagacccagccaaaggccagatgaaggagatctacaccagcaaacacatctgg

SEQ ID NO: 73863 - DNA, 1959 bp, Homo sapiens
agccgggtactctgaggatcccgctgactgtgctgatctgatggacttttgtagaggtggccaggtggtaaacctgatgaaccagcgcctgcaaacaggctttacagagaatgaagtgctccagatattttgtgatacctgtgaagctgttgcccgcctgcatcagtgcaaaactcctattatccaccgggacctgaaggttgaaaacatcctcttgcatgaccgaggccactatgtcctgtgtgactttggaagcgccaccaacaaattccagaatccacaaactgagggagtcaatgcagtagaagatgagattaagaaatacacaacgctgtcctatcgagcaccagaaatggtcaacctgtacagtggcaaaatcatcactacgaaggcagacatttgggctcttggatgtttgttgtataaattatgctacttcactttgccatttggggaaagtcaggtggcaatttgtgatggaaacttcacaattcctgataattctcgatattctcaagacatgcactgcctaattaggtatatgttggaaccagaccctgacaaaaggccggatatttaccaggtgtcctacttctcatttaagctactcaagaaagagtgcccaattccaaatgtacagaactctcccattcctgcaaagcttcctgaaccagtgaaagccagtgaggcagctgcaaaaaagacccagccaaaggccagactgacagatcccattcccaccacagagacttcaattgcaccccgccagaggcctaaagctgggcagactcagccgaacccaggaatccttcccatccagccagcgctgacaccccggaagagggccactgttcagcccccacctcaggctgcaggatccagcaatcagcctggccttttagccagtgttccccaaccaaaaccccaagccccacccagccagcctctgccgcaaactcaggccaagcagccacaggctcctcccactccacagcagacgccttctactcaggcccagggtctgcccgctcaggcccaggccacaccccagcaccagcagcaactcttcctcaagcagcaacagcagcagcaacagccaccgccagcacagcagcagccggcaggcacgttttaccagcagcagcaggcccagactcagcagtttcaggcagtacatccagcaacccagcaaccagcaattgctcagttccctgtggtgtcccaaggaggctctcaacagcagctaatgcagaatttctaccagcagcagcagcagcagcacaacaacagcaacagcaacagctggccacagccctgcatcaacaacagctgatgactcagcaggctgccttgcagcaaaagcccactatggcagcaggacagcagccccagccacagccagctgcagccccacagccagcccctgcccaggagccagcgcagattcaagccccagtaagacaacagccaaaggttcagacaaccccacctcctgccgtccaggggcagaaagttggatctctcactccaccctcatcccccaaaacccaacgtgctgggcacaggcgtattctcagtgacgtaacccacagtgcagtctttggggtccctgccagcaaatcaacccagctgctccaggcagctgcagctgaggccagtctcaataagtccaagtctgcaaccaccactccatcaggctctcctcggacctctcaacaaaacgtttataatccttcagaagggtctacgtggaatccctttgatgacgataatttctccaaactcacagctgaagaactgctaaacaaggactttgccaagcttggggaaggcaaacatcccgagaagcttggaggctcagctgagagtttgatcccaggctttcaatcaacccaaggtgatgcttttgctacgacctcattttctgctggaactggttagtatggcaaatacctggaa

SEQ ID NO: 73864 - DNA, 1189 bp, Homo sapiens
aactcaggggcgagctgcagctgataaaacgtgccctgccggctgctgctgtgctggcggtggctgttgctgctgctgttgctgcttgaggaagagttgctgcaggatccagcaatcagcctggccttttagccagtgttccccaaccaaaaccccaagccccacccagccagcctctgccgcaaactcaggccaagcagccacaggctcctcccactccacagcagacgccttctactcaggcccagggtctgcccgctcaggcccaggccacaccccagcaccagcagcaactcttcctcaagcagcaacagcagcagcaacagccaccgccagcacagcagcagccggcaggcacgttttaccagcagcagcaggcccagactcagcagtttcaggcagtacatccagcaacccagcaaccagcaattgctcagttccctgtggtgtcccaaggaggctctcaacagcagctaatgcagaatttctaccagcagcagcagcagcagcacaacaacagcaacagcaacagctggccacagccctgcatcaacaacagctgatgactcagcaggctgccttgcagcaaaagcccactatggcagcaggacagcagccccagccacagccagctgcagccccacagccagcccctgcccaggagccagcgcagattcaagccccagtaagacaacagccaaaggttcagacaaccccacctcctgccgtccaggggcagaaagttggatctctcactccaccctcatcccccaaaacccaacgtgctgggcacaggcgtattctcagtgacgtaacccacagtgcagtctttggggtccctgccagcaaatcaacccagctgctccaggcagctgcagctgaggccagtctcaataagtccaagtctgcaaccaccactccatcaggctctcctcggacctctcaacaaaacgtttataatccttcagaagggtctacgtggaatccctttgatgacgataatttctccaaactcacagctgaagaactgctaaacaaggactttgccaagcttggggaaggcaaacatcccgagaagcttggaggctcagctgagagtttgatcccaggctttcaatcaacccaaggtgatgcttttgctacgacctcattttctgctggaactggttagtatggcaaatacctggaa

SEQ ID NO: 73865 - DNA, 841 bp, Homo sapiens
atgtggaggccacacggctgccgcctcgccctctcctccaggagtatgctgggattgtagtccagcagccggactgtgccgagctacctttcccagcttgccctgcggctcgggtgatatcaacagtcttttccagaactctgtctgcactgagaccctcttcccccagtcctcttctcgcggtcgactccttcccatccgtggcgacagaacggcggttgcaggagaggccccggtccctcgccgcgccgccccgaggggcacttccggcggcggttcacttcctggttgggtggatggagccgggcgggagcgcgcgcgggggaggggcggcgggtcagtctccgcccggcgctcccgggatcagctggcgggcgggcgggagccgagcgcggccccggctctcgctgcagcgccgcctcttctctgcgtcgcaggccggcccggcggccgtgacaatgtcgcggggctggtagcagggcgccggccgccgagccgtctcaagtttaaacttacacgaatcgctttctggaggaggaggggacccgctgcgcgattgacacgcatattcctataggcatcctccctcagcccccacccccacggccggattcgggtggctcctctccgaggtgaaatctgagaagaaatccttggatctcttttcttaaaaaaaaaaaaaaaaaaaaaaaaaaaaaaatctagaaaccatcggtattttgctttgctgctccctattcgcaagatgaagaagtttttcgactcccggcgagagcagggcggctctggcctgggctccggctccagcaggtaatctccagcaggtagcacagggtgcgag

SEQ ID NO: 73866 - DNA, 951 bp, Homo sapiens
taggttaagcagggcaagacaagtcacagagacgagttaggaggcagggcaggagcccaggctgcagctaataagtaagtgagccaccgtcattgcgggggtagggaagaagagatggatttggaggttttggaggtgggttttataaggacttgttttctacagcaatcctttcttgggttttactttgctaggctaagcgggaagtacaaagatgaaattgaactttttccctcaaagagcacatctctttgtagataaaccatagtcaggaaagagtattttcagtatggttgataattccaagtaatgtgttagtgcctcatgttttccagacagacttccaaaagaggtcatgagtaaagttataaaaaagaaaaatgatttgacaaccttaccaaagaatttttacctgacacattgaattgccttattctttaattcaaaaaatatttatgaacctttaaaagccttaagttgctaacactctgtccagtgtccagtgtgaaagctcatttcacaccaatgagctttctgtgggcggtcagcactatggctgtattctccttttccttagtgatcctccctgcccacagtctgatttgagttagtcttgatttctttcagaacgtgggcctgtgaacttggctggttttcttagccagataaatagtggagcatggatggaggtatgtggcagaagggtcacagtggtgatcccccagcccaaaagtgaaaggcactcaggaggtgcttcactaccgggttccattagtggatttaatcacaggtgatccaaggctttcagaacactgggcaattcttcacaagctccttgagggcagaagtagtgtgttcctcacctaagtatccatgtgggctccacactctgctccccattctccccgcggccatatgcctcaaatggtgctgggacatgggagacactca

SEQ ID NO: 73867 - DNA, 298 bp, Homo sapiens
aattgctggataatatggcaattctattttaattatttgagaaagcttcacagtgtttctgtaatggttgtaccaatatttctgtatttttaagtgtatgttgtactctgttgggagccaatttttatagacctgttggttaatttgttttacatcttatataagcttccatttggacaatcttttcaaggatgtttttaaataactaacagccttgtgtgaagtgagtagtgtctctttttagagcagaggtcaaatacatacataaataatttaataaaattatgttttccccaga

SEQ ID NO: 73868 - DNA, 264 bp, Homo sapiens
gttagtggtagcctgggcctaggcgtggaagcaaggactgcctgcaaagaggtacaagatggatatcttttggggtggtggtaatattctaaaactggattgtggtgatagttatgcagcttcacaaatttaccaaaaacagctgaattgcatactctttttttttttttttgagacagagttttgctcttgttgcccaggctggaatgcaatggtgcgatcttggctcacggcaacctccgcctcctaggttcaagcgattct

SEQ ID NO: 73869 - DNA, 606 bp, Homo sapiens
gttagtggtagcctgggcctaggcgtggaagcaaggactgcctgcaaagaggtacaagatggatatcttttggggtggtggtaatattctaaaactggattgtggtgatagttatgcagcttcacaaatttaccaaaaacagctgaattgcatactctttttttttttttttgagacagagttttgctcttgttgcccaggctggaatggcaatcctcgtgcttcagctacccaagtacctgggactacaggcatgcaccacaatgcctggctaatttttgtatttttagtagagacagggtttcaccatgttgtccttgctggtctcgaactcctggcctcaagagatctgcctgccttggcctcccaaagtactgggattacaggcataagccactgcgcccagcctgaattgcatattctgaatgggtgacttttatggcacgtgtgtatatatacacacatacaggcggtggtggtgacaacttctgtaacctaatcacctctggacttcccactccatatgaaaccgcctggttcttaaagccgagaggcttcacgcttggatgtgcttatcactaggggggggggggggggggggaattc

SEQ ID NO: 73870 - DNA, 1176 bp, Homo sapiens
gagacagcagtgagcaaagctgacaaaaatccctgcagggcgaggcttctgttccagtggatgaatctgacagctttcctgaaaggcatactacatcctcctgagctagcatcttccagtttttgctttgcatatgatgatatgcaactcataaatattgcctgttatataacactactttcaagcataatgagaggaataagacatagggaatgcattatagtggagatagtggcattgcttttttgcaaggaaaagagaaaaagtgaccctgtggttctgtagtcccagggtgctgcgcatggctcagtgggctgtggcatagcacgccctgcaggggaggtgagggggagacccggcagcttcaggggcgggacccagcccttggcgatgtgacaggtcactctcatgcccagccttccttcttgtccataatggacatggagaggacttctgtgcttggtactctttaattctgagaagagaactctagctctctctctctaagctcagcagaaaggagtggtaaaagtggaggctcttctaacatacctgccgcaaattacactgcacctgttccttggcaaggtgcagcctgggattcaagttcaaggggctgcgaaacttctattactcatcactttagatatgaaagcattttaaatgttttttttaaatccattaaaaaaaaaaaacctctgttactaattgttagttgcttcttgcagggttatatcagttcctagcttgaggttttccagggactttaaaacctcagcaaagaatagttttaaggactcctcccccatttccattaaagcagatggagcataggcacagtgcaaacattccatatctcggtgagtaatgtggacttcgtaccctatgcaattttgttctttgtgtcttaatcataaaggaaccagcctaggtctcataaaaccacaaagggcctcttgatttgtaactgatacatggggaattaaacttttgccagaatgttaagtttaaggaagttattttaaaataagtgagttactgatgttaatagggtaataaaattttaaaagcttcagtctgtactatctttgtggttctgaatagaggatgaatcctatttttactgcttatttctgagaactttcagtaaaattatatttgatacagaatataaat

SEQ ID NO: 73871 - DNA, 263 bp, Homo sapiens
ttcctctccactctctagactctctttgtaccagcaagttaactgttgagcaattctttggtaattaaacaatcattacagcattattagctccacactctggatgacatctttaagcctctctcatgtgttaagcatgtctaatgtgtttttccacttttggataacttaagagaccaaaatataccacctcaaaatatgcctctttggcataagcattattttgagccaactatttttgagaaacagcagacaccggagaa

SEQ ID NO: 73872 - DNA, 175 bp, Homo sapiens
tacttggtacaataatttattattgtaaaaaaattaacatttattagctttaggaattttacatgtactgttgagttagtttgtcaaatctatataactcgtctaagatgaataatactgtatttttgtgactggccttttgcaatcagtatagaatcctgaattttttttcttt

SEQ ID NO: 73873 - DNA, 2200 bp, Homo sapiens
ccagagaggtaaaaacataccaggtgagcaaggggctcatagagaacagtgtttccaacaagtgttttaatggaggacttgtccaaattagacatcaattcatatgaggatggaaaattggttcttgattttatgacacagaggttgttgttggctttgatgaatgctattttggaagtaaatttaaacaaagcaattgagcaaactcagaggaatttctgaattcaggtggtgttacttcaccatgaagcaatttttctcatagaaaaatatcaagccattggactagattattctgtcgtttgggttatactgagaaataagagttggctaaagtagaaattacatgagatttggaaggtcaaagggaaggagcaactattgctgtgaaagtctttgaaattagagacagtgaaggacagatgcagaggtacccagcaggttccagtttttcctatcttccactctatatccagcccttctttccatcttccagccctgctgaccaacagtagccccaggtctaccaccagatgcttggctgcaggctcacaaaagcttctcatggacttctccaccagcttctcatggcagtcccacatcagcagctagatgtgcctggcttctcagattttcctgaaagctctgatttatccacccatgctaatgtctcaaaagggctggtttagtgatttctttagtcttctaactcccccttctaaaccttccccagctacctctataaattgtgcatgcatcccttattccataatgctcatagttattatgcttccctgattgacatatttatactttcttttcctgagaatttggtagatgctgctcttctaaaattgagtgatgttattaagaagtcttagacaaacttgctctcttttttcttgtatataatgtgcctttctgccatatgattctttttttattcttgaagttaaggatctatggaagcatatgctttggtcctgatctttgtgtattaattttacctgagttatagtgagccattccaatcattcatttcaaggaagttttattttgcttaacattttttctgatccatttcttctcttcttcagggacatcaattatgcatatgtaagatgtctttgtcaccttctacattcatcttctaccaatcaacatccatttcacatcattattcttttcagttttgtgtgattgactctagccttgtcttcagagacaattctccttgaatctcatgttcttcatgtttagacattaacaagcaatttgctcagatttatttacattccaggatagtaaagatagagaatgtctccctccctggagactttcccagagaagatttggttgcattccaggttaataaagattatatatatatatacccaaagaagaggatggacaataaaacaatataacattatttccctcacatcttaattatgtgtattttcaatcatgtagaaatattgaaaacacagtacaacctatataacatccatctagatttaacaatttatatgtaatttttcctgaaataccagtggtaagttatagatataacattataaccataaataattgagcattcatctcctaaaaataaggacattctcccacatacctggaatatcattatcaatctaattctatgatatatccagtccatttccaaatttctcccattgtccccaaacatattttacagttttaatgaggtagaattagcatacagaaagtggaacttgtttaaagtgtacaatttgatgagttttgacgtgtgcacctttccaaccatcatgacaatacaaataatgaacatatcaatcaccccaaaaaagtttccttatgcctctttgtcattcagccccctttccccacattcttcccacatccacaggcaatcatggatctgttttctattgttatagattagtttgcgtttcctacaattttatacacatggaataatactataggtactcttgtttggctccttccatccagcataataagtttgagattcattcatgttgttatatgcgtctatgttcattcctttttattgctaagtgttatttcattatatggacataccagaatttgtttatccattcatgttttgatggaaatttgtatttccagcttttggctattacaaataaaactgatgtgaacatttgtttacaag

SEQ ID NO: 73874 - DNA, 614 bp, Homo sapiens
aaccctaccctaatataaaacacgcgtagaagtggttggagctgcatgtcaggatcataatagtctgctagtgttttgtccaagctgaagttttacttcttcaagttttttgtagcacattttccttcgtttaaaatttaagacggtaaaattttttgaagaatttactgtcaagttgagctgcattagtatcataacttcagaatctactttgccagtacaggaaagctctacccgaaacactgataaagtgcgtggaacttccccctgaacagaaatgttgacctggggcatatccattgccaaaacattgtccacttggaatcccagcttatattcaaccttggacttcgcatgccaggtgaagtgcaggaaatttgtctcactgggtactaacagactaaaggatagagcgtagtgactaataaggtcatttctcacataataaagttctgcatcaagaccgatcagccggcgcacctcgtcctcgctcaggtagagactcacgctgggccccgcggaagccgactgcagctccgggggccgcggggcgggggcggcggcagccaggcgcgggcagcagcggtagcagcagcggcggcggcggggccttc

SEQ ID NO: 73875 - DNA, 259 bp, Homo sapiens
ggcaaggagagggtaagtttgtggcaggtggagtagtgggtacttaggacattctgatagtatatttagctcattctcctctttgagactaataatgacaacattcagaaaggttaaaaaatgactttcttaaggtcataaactataaagaggctcagattggcacttcaactaagataccttgaacttcaaaagcatgtcattatcattgtctgcaaatactgtttgagccttcagtgagagtatatttttaggttct

SEQ ID NO: 73876 - DNA, 2135 bp, Homo sapiens
ggccgggcgggggccgcggaagctgcgatgcggacagggcagcggcggtgacccgagctgccgcccgacatgaactcgctggagcaggcggaagccccgcgagttgtatccctgattcctgcggtggtttccggtaactgccaagatctcaaggcttttgagaggagacttactgaatatattcattgtttgcaacctgctactggacgctggagaatgcttcttatagtggtatctgtctgtacagctactggtgcctggaactggttaatagaccctgagacacaaaaggtgtccttcttcacatcattatggaatcacccatttttcaccattagctgtatcactctaataggcttgttctttgctggaatacacaagagagtagttgcaccatcaattatagctgctcgatgtcgaacggtattagcagaatacaatatgtcttgtgatgatacaggaaaactaattttgaaacctaggcctcatgttcaatgacaatcttcactcattgttatgggacttaaaatagcctttcttcgaataagtgatacagcaaaaagccataaaggattccttttgcggttggatatgtaaaggtcatagcagcaactgacaagaagtgtgcaatatttacctggattatcttgatgatggtgactcattatcagtgctttggtacttttgattacctgtgtttcagtattagtgtcactttagtacttcagatcctgcaaatatttttgcagatgaagtatgtatgtatgttactaagttaaacttagaaacagaacctcattcagtttttataatgtatttttgcaaactactgtaaatagcaaatcaatgccaatgttaaacaaagaggaaaacgttgtgtggactttgttctcttgcaccagtatttcaggaacatctgcttgccatccccacagctctttaaaactggctattatgtgtgcctttcattcttacatttctaatcatactgcaggaaaaacattggattcagcttagactgaggaaaactctccattatgttgtaagaaattatagatgttttgagagacactttttgttaaaccagatattgaactccagcaactattgtggttatatttttagttcattgttctcatttaatgctaaatatcctttatattgctttaataattttcttttttttttttttttttttagacggagtctcgctctgttgccaggctggagggcagtggcacgatcttggctttctgcaacctctgcctcccaggttcaagcgattctcctgcttcagccttccgagtagctgggactacaggcgcatgccaccatgcccagctaatttttttgtatttttagtagagacggggtttcaccacgttggccaggatggtttcgatctcctgacctcgtgatcctcctgcctcatcctcccaaaatgctgggattacaggcataagccaccgtgcctggcctctttaataatttttaaaataccctaaaggcttgtgaatatacaagtctactgataaattatgtattgtctgggaatttgatagtcattgttttagataactggattttacgctgtggtagacaggctgtgacactagtgttgcacaggtgtaattggtcatcctatgccttcaccagaataacttgggagtggtgccagaaactagagtctacaattctcactgtttagagagtgttaatgacatactgtgtatgcataatagccgcatgtactataatagcccttaaaattaaactattgggattgctgtaaatattttaaagtactggaggtgccttttacctgtttattagattttgaaaaggtttaaattatttcatgagcaatcttttaaatttcatttaacataaagctgaaaattcaataacaggataaaaaagctttttaacaaggctgccatttaacttaaatgtgttcatcttagctttcacttgtataaaatttgattctttgaactgcagcaataaaaccctcagctcctaagaagtcttaagagggtattctatatattctgctttgttttattttctgtaaattttgtaggtaaatatgtgcattaaaaataaatactttatatataactcgtgattggact

SEQ ID NO: 73877 - DNA, 2010 bp, Homo sapiens
ggccgggcgggggccgcggaagctgcgatgcggacagggcagcggcggtgacccgagctgccgcccgacatgaactcgctggagcaggcggaagatctcaaggcttttgagaggagacttactgaatatattcattgtttgcaacctgctactggacgctggagaagtgtccttcttcacatcattatggaatcacccatttttcaccattagctgtatcactctaataggcttgttctttgctggaatacacaagagagtagttgcaccatcaattatagctgctcgatgtcgaacggtattagcagaatacaatatgtcttgtgatgatacaggaaaactaattttgaaacctaggcctcatgttcaatgacaatcttcactcattgttatgggacttaaaatagcctttcttcgaataagtgatacagcaaaaagccataaaggattccttttgcggttggatatgtaaaggtcatagcagcaactgacaagaagtgtgcaatatttacctggattatcttgatgatggtgactcattatcagtgctttggtacttttgattacctgtgtttcagtattagtgtcactttagtacttcagatcctgcaaatatttttgcagatgaagtatgtatgtatgttactaagttaaacttagaaacagaacctcattcagtttttataatgtatttttgcaaactactgtaaatagcaaatcaatgccaatgttaaacaaagaggaaaacgttgtgtggactttgttctcttgcaccagtatttcaggaacatctgcttgccatccccacagctctttaaaactggctattatgtgtgcctttcattcttacatttctaatcatactgcaggaaaaacattggattcagcttagactgaggaaaactctccattatgttgtaagaaattatagatgttttgagagacactttttgttaaaccagatattgaactccagcaactattgtggttatatttttagttcattgttctcatttaatgctaaatatcctttatattgctttaataattttcttttttttttttttttttttagacggagtctcgctctgttgccaggctggagggcagtggcacgatcttggctttctgcaacctctgcctcccaggttcaagcgattctcctgcttcagccttccgagtagctgggactacaggcgcatgccaccatgcccagctaatttttttgtatttttagtagagacggggtttcaccacgttggccaggatggtttcgatctcctgacctcgtgatcctcctgcctcatcctcccaaaatgctgggattacaggcataagccaccgtgcctggcctctttaataatttttaaaataccctaaaggcttgtgaatatacaagtctactgataaattatgtattgtctgggaatttgatagtcattgttttagataactggattttacgctgtggtagacaggctgtgacactagtgttgcacaggtgtaattggtcatcctatgccttcaccagaataacttgggagtggtgccagaaactagagtctacaattctcactgtttagagagtgttaatgacatactgtgtatgcataatagccgcatgtactataatagcccttaaaattaaactattgggattgctgtaaatattttaaagtactggaggtgccttttacctgtttattagattttgaaaaggtttaaattatttcatgagcaatcttttaaatttcatttaacataaagctgaaaattcaataacaggataaaaaagctttttaacaaggctgccatttaacttaaatgtgttcatcttagctttcacttgtataaaatttgattctttgaactgcagcaataaaaccctcagctcctaagaagtcttaagagggtattctatatattctgctttgttttattttctgtaaattttgtaggtaaatatgtgcattaaaaataaatactttatatataactcgtgattggact

SEQ ID NO: 73878 - DNA, 2084 bp, Homo sapiens
ggccgggcgggggccgcggaagctgcgatgcggacagggcagcggcggtgacccgagctgccgcccgacatgaactcgctggagcaggcggaagatctcaaggcttttgagaggagacttactgaatatattcattgtttgcaacctgctactggacgctggagaatgcttcttatagtggtatctgtctgtacagctactggtgcctggaactggttaatagaccctgagacacaaaaggtgtccttcttcacatcattatggaatcacccatttttcaccattagctgtatcactctaataggcttgttctttgctggaatacacaagagagtagttgcaccatcaattatagctgctcgatgtcgaacggtattagcagaatacaatatgtcttgtgatgatacaggaaaactaattttgaaacctaggcctcatgttcaatgacaatcttcactcattgttatgggacttaaaatagcctttcttcgaataagtgatacagcaaaaagccataaaggattccttttgcggttggatatgtaaaggtcatagcagcaactgacaagaagtgtgcaatatttacctggattatcttgatgatggtgactcattatcagtgctttggtacttttgattacctgtgtttcagtattagtgtcactttagtacttcagatcctgcaaatatttttgcagatgaagtatgtatgtatgttactaagttaaacttagaaacagaacctcattcagtttttataatgtatttttgcaaactactgtaaatagcaaatcaatgccaatgttaaacaaagaggaaaacgttgtgtggactttgttctcttgcaccagtatttcaggaacatctgcttgccatccccacagctctttaaaactggctattatgtgtgcctttcattcttacatttctaatcatactgcaggaaaaacattggattcagcttagactgaggaaaactctccattatgttgtaagaaattatagatgttttgagagacactttttgttaaaccagatattgaactccagcaactattgtggttatatttttagttcattgttctcatttaatgctaaatatcctttatattgctttaataattttcttttttttttttttttttttagacggagtctcgctctgttgccaggctggagggcagtggcacgatcttggctttctgcaacctctgcctcccaggttcaagcgattctcctgcttcagccttccgagtagctgggactacaggcgcatgccaccatgcccagctaatttttttgtatttttagtagagacggggtttcaccacgttggccaggatggtttcgatctcctgacctcgtgatcctcctgcctcatcctcccaaaatgctgggattacaggcataagccaccgtgcctggcctctttaataatttttaaaataccctaaaggcttgtgaatatacaagtctactgataaattatgtattgtctgggaatttgatagtcattgttttagataactggattttacgctgtggtagacaggctgtgacactagtgttgcacaggtgtaattggtcatcctatgccttcaccagaataacttgggagtggtgccagaaactagagtctacaattctcactgtttagagagtgttaatgacatactgtgtatgcataatagccgcatgtactataatagcccttaaaattaaactattgggattgctgtaaatattttaaagtactggaggtgccttttacctgtttattagattttgaaaaggtttaaattatttcatgagcaatcttttaaatttcatttaacataaagctgaaaattcaataacaggataaaaaagctttttaacaaggctgccatttaacttaaatgtgttcatcttagctttcacttgtataaaatttgattctttgaactgcagcaataaaaccctcagctcctaagaagtcttaagagggtattctatatattctgctttgttttattttctgtaaattttgtaggtaaatatgtgcattaaaaataaatactttatatataactcgtgattggact

SEQ ID NO: 73879 - DNA, 378 bp, Homo sapiens
ggccgggcgggggccgcggaagctgcgatgcggacagggcagcggcggtgacccgagctgccgcccgacatgaactcgctggagcaggcggaagccccgcgagttgtatccctgattcctgcggtggtttccggtaactgccaagatctcaaggcttttgagaggagacttactgaatatattcattgtttgcaacctgctactggacgctggagaagcgccgtagctcacgcctgtaatcccagcactttaggaagcccaggcaggcggatcacctaaggtcagaagttcaagactagcgtggccaacacggtgaaacgccgtctctactaaaaatacgaaattagccggtcgtggtgacgctgcctgtgatcccag

SEQ ID NO: 73880 - DNA, 2331 bp, Homo sapiens
tctcagtacattcaaaaaggagtctttgatggtttgtttacagtagaaaatgagtttgtttttttaatttgagtttacaagatctgcaaaatcttcactaagcacagtgaacgttacatagcgtagactcttctactgaagtgtcaccatcgaattgctttttatttcattgatcatcataagttctgaccaaatcataagagaaacagtatccttaattactaaggttcacaatgtttaagagaattcctcgaagccagatggcaagccttctaattcctgagtctagttagtgcattttccatttaataaagtgctatattctttggttgtcatttagtaggaactggtggtgatagtatcacatattaagtatgtatttgcttactaatttcgtgtttatctttcatcagtgcttcttatagtggtatctgtctgtacagctactggtgcctggaactggttaatagaccctgagacacaaaaggtgtccttcttcacatcattatggaatcacccatttttcaccattagctgtatcactctaataggcttgttctttgctggaatacacaagagagtagttgcaccatcaattatagctgctcgatgtcgaacggtattagcagaatacaatatgtcttgtgatgatacaggaaaactaattttgaaacctaggcctcatgttcaatgacaatcttcactcattgttatgggacttaaaatagcctttcttcgaataagtgatacagcaaaaagccataaaggattccttttgcggttggatatgtaaaggtcatagcagcaactgacaagaagtgtgcaatatttacctggattatcttgatgatggtgactcattatcagtgctttggtacttttgattacctgtgtttcagtattagtgtcactttagtacttcagatcctgcaaatatttttgcagatgaagtatgtatgtatgttactaagttaaacttagaaacagaacctcattcagtttttataatgtatttttgcaaactactgtaaatagcaaatcaatgccaatgttaaacaaagaggaaaacgttgtgtggactttgttctcttgcaccagtatttcaggaacatctgcttgccatccccacagctctttaaaactggctattatgtgtgcctttcattcttacatttctaatcatactgcaggaaaaacattggattcagcttagactgaggaaaactctccattatgttgtaagaaattatagatgttttgagagacactttttgttaaaccagatattgaactccagcaactattgtggttatatttttagttcattgttctcatttaatgctaaatatcctttatattgctttaataattttcttttttttttttttttttttagacggagtctcgctctgttgccaggctggagggcagtggcacgatcttggctttctgcaacctctgcctcccaggttcaagcgattctcctgcttcagccttccgagtagctgggactacaggcgcatgccaccatgcccagctaatttttttgtatttttagtagagacggggtttcaccacgttggccaggatggtttcgatctcctgacctcgtgatcctcctgcctcatcctcccaaaatgctgggattacaggcataagccaccgtgcctggcctctttaataatttttaaaataccctaaaggcttgtgaatatacaagtctactgataaattatgtattgtctgggaatttgatagtcattgttttagataactggattttacgctgtggtagacaggctgtgacactagtgttgcacaggtgtaattggtcatcctatgccttcaccagaataacttgggagtggtgccagaaactagagtctacaattctcactgtttagagagtgttaatgacatactgtgtatgcataatagccgcatgtactataatagcccttaaaattaaactattgggattgctgtaaatattttaaagtactggaggtgccttttacctgtttattagattttgaaaaggtttaaattatttcatgagcaatcttttaaatttcatttaacataaagctgaaaattcaataacaggataaaaaagctttttaacaaggctgccatttaacttaaatgtgttcatcttagctttcacttgtataaaatttgattctttgaactgcagcaataaaaccctcagctcctaagaagtcttaagagggtattctatatattctgctttgttttattttctgtaaattttgtaggtaaatatgtgcattaaaaataaatactttatatataactcgtgattggact

SEQ ID NO: 73881 - DNA, 1057 bp, Homo sapiens
aaaaattaaaaaatataacaatgtattctgttggtgagacaggatatagtcggctgactgatgaccctgcaaaaagatatgtccatgtcctaatctctggaaactgtgaatgttacttaatttggaaagagggtctttgcagatgaaattaaattaagaagtttgagatgagtagttcatcctggattgtctgggtgggttgggtcctaaatccagtgacaagcaaccttaaaagagacacaaggagactggcagacagaggaagaagaggcagcaatgtgaccccggaggtggaaatctcagtgatggggccaggaatgtcaaggaatggtcaaggaatggctacagccaccagaaaaagaggcaaagtgaggcttctcccctagaatctctaggagcgctccagccctgctgatgtctagatttttggagttctggcctccagaatgtgagagagtaaactattgtttaaagctaccaagtttgtggtaacttgttagagcagccacaggaatgaatgtacagggaatcaggcagtctcatacactgatggtgggaaaacaaaccggcacaacccttatggtgggaaatttgacaacatgtacaaaaactacctacacatttcccttgtgacccagccattccactgttaggaatctgccctgaagatacaactccacctattaaaaaatacagccattagaatggatgatgtttaccgctacttgctgacaaagaaaaatgttcacttgtgttaaatgagaaagacaggtctcagaacagcaacaatgttctagacgattctgttttttaatactcagtatatgtagaggagattaaagggatttatcgtgagatgctcatagggggcaactgttatttcagatttcttttttaaaatttttaattgacaagtaataattgtatatatttgtacaacaattgtatgtattgtatgtacaattgtatattgatgtatatatttgtacaataattgtataatttatatggtacaatgtgatatttgtatgcatcaatacatgatggaatgatcaaa

SEQ ID NO: 73882 - DNA, 380 bp, Homo sapiens
ctaacggtttggaacaaatgcagtatagctcaaggagccctggtctcgggataaaaaggagttcaaggccagtttctgttacgggtctgagccaagccacatcacttctgtaaacaagcactggcctccagataaacagtattaaaacaattacaactcatccagctcacagatgctgattcactgaacccctgttccaccgaccagaaacagctttgactggacaagaggctgaattcagtaactttctcctgatgagaagaccaccagccatggactggttcttgctggtttacagagactgcacacctgtgtaccttcatgtcctgaaaagatcttttgacataggggctaggtataatacatttcatctattcatt

SEQ ID NO: 73883 - DNA, 1120 bp, Homo sapiens
cgcgccggttgccgctgcggagcgcggcgggtccatgtgcgcagtgagtggcgctattcctggcccagtagcacccgagccccgggtttgaccgagtccgcgctgcgatggaccccaacaccattatcgaggccctgcggggcaccatggacccagccctgcgtgaggccgcggagcgccagctcaatgaagcacacaagtctctgaattttgtctcaacactgctccagattactatgtcggaacagctggatttacctgtgagacaggcaggtgttatctatctgaaaaatatgataacacagtattggcctgatcgagaaacagcaccaggggatatatccccttatactattccagaagaagatcgccattgtattcgagaaaatattgtagaagccattatccattctcctgagctcatcagggtacagcttactacatgcattcatcacatcatcaaacatgattatccaagccgctggactgccattgtggacaaaattggcttttatcttcagtccgataacagtgcttgttggctaggaattcttctttgcctttatcagcttgtgaaaaattatgagtataaaaaaccagaggagcggagtccattggtagcagcaatgcagcattttctgccagttctaaaggatcgttttatccagcttctttctgaccagtctgatcagtctgtcctcatccagaaacagatattcaagatcttctatgctcttgttcagtatacactaccactggaactgataaaccaacagaacctgacagaatggatagaaattttaaagactgttgtgaacagggatgtacctaatgaaacacttcaagttgaagaagatgatcgacctgagttaccatggtggaaatgcaagaagtgggccttacatattttagcaagactttttgaaagatatggaagccctggcaatgtttccaaggagtataatgaatttgctgaagtatttctgaaggcatttgctgttggtgtccagcaagttttattgaaggtgttatatcagtacaaggagaagcaatatatggctcctcgagttttacaacaacactccaacaggtacacgagctcgattcactgccgtcgtca

SEQ ID NO: 73884 - DNA, 372 bp, Homo sapiens
cttggggcttttgagttgcttgtgaaaaattatgagtataaaaaaccagaggagcggagtccattggtagcagcaatgcagcattttctgccagttctaaaggatcgttttatccagcttctttctgaccagtctgatcagtctgtcctcatccagaaacagatattcaagatcttctatgctcttgttcaggtaatatctgtgaagcagtttttatgcataaaaagttagtctgtcatttaccgtgttaaaaattaacaaagaatttcagcatttgaataatagttaacttgaaaatctacattaagtggatgattttctagcaaaatagaaattgcaaaaattataagtctaaacaagcatacttcctcc

SEQ ID NO: 73885 - DNA, 594 bp, Homo sapiens
agtagagacggggtttcactgtgttagccaggatggtcttgatctcctgacctcgtgatccgcctgcctcagcctcccaaagtgctgggattacaggcgtgagccaccactcccggcccgtcgtgagcttttaatagctccatgaagactactagactttctctaaaattagatttcccagtgcagtgcctcagcagtaaatattggtcatctaatgctacaatagggttaattgaggcaacaaagaagttaatatttttagaatgtttgcatgctattaattatagtcttagaatatcttgctatctttttttgtagtgcattcccttattcgtggaagcagccttagaaagactgacaagagaggttaagacaagtgaacttcgaactatgtgtctgcaagttgcaattgcagctttgtattataatccacacctactactcaataccttagaaaatcttcgcttccctaataatgttgaaccagttacaaatcattttattacacagtggcttaatgatgttgactgtttcttgggtaacatcactctaatcctattatactacatgatgcctgtacactaccgtcctgta

SEQ ID NO: 73886 - DNA, 590 bp, Homo sapiens
agaaaagacattgaattctgcttttgcaaaattataaagggatctgggatcattttcataccttatgtaaagattaagcatgttttttaatgctttgttgaagaaattaatgtttattgtcttaattttaaacttgttctctagatgtgtttgaagatttcatttctcctaccactgctgcccagacacttttgtttacagcctgtagtaagaggaaagaggtaggcttatttaatgtttagataacttttctgtattatttaaaatttattcaactatacactttttaaatgttagtcatgtgagtcattttgttagtatgttttttaaggactgttggcctattcagtaacaatacttttctcttttaatctaggtactgcaaaagactatgggattttgttaccagattcttacagaaccaaatgctgaccctcgaaaaaaagatggagccctgcatatgattggctctttagctgaaatacttctgaaggtattctttagtgtgtttgtatgtgcatgactatgcaagtagttttaagggatgctgaggcaggcagattgcctgagcccaggagtttgagaacagc

SEQ ID NO: 73887 - DNA, 5873 bp, Homo sapiens
cgcgccggttgccgctgcggagcgcggcgggtccatgtgcgcagtgagtggcgctattcctggcccagtagcacccgagccccgggtttgaccgagtccgcgctgcgatggaccccaacaccattatcgaggccctgcggggcaccatggacccagccctgcgtgaggccgcggagcgccagctcaatgaagcacacaagtctctgaattttgtctcaacactgctccagattactatgtcggaacagctggatttacctgtgagacaggcaggtgttatctatctgaaaaatatgataacacagtattggcctgatcgagaaacagcaccaggggatatatccccttatactattccagaagaagatcgccattgtattcgagaaaatattgtagaagccattatccattctcctgagctcatcagggtacagcttactacatgcattcatcacatcatcaaacatgattatccaagccgctggactgccattgtggacaaaattggcttttatcttcagtccgataacagtgcttgttggctaggaattcttctttgcctttatcagcttgtgaaaaattatgagtataaaaaaccagaggagcggagtccattggtagcagcaatgcagcattttctgccagttctaaaggatcgttttatccagcttctttctgaccagtctgatcagtctgtcctcatccagaaacagatattcaagatcttctatgctcttgttcagtatacactaccactggaactgataaaccaacagaacctgacagaatggatagaaattttaaagactgttgtgaacagggatgtacctaatgaaacacttcaagttgaagaagatgatcgacctgagttaccatggtggaaatgcaagaagtgggccttacatattttagcaagactttttgaaagatatggaagccctggcaatgtttccaaggagtataatgaatttgctgaagtatttctgaaggcatttgctgttggtgtccagcaagttttattgaaggtgttatatcagtacaaggagaagcaatatatggctcctcgagttttacaacagacattaaattatattaatcaaggagtttctcatgctctcacctggaagaatctgaagccccatatacaaggcattatccaagatgttatttttccattgatgtgctatacagatgctgatgaggaactttggcaagaagacccttacgaatatatacgcatgaagtttgatgtgtttgaagatttcatttctcctaccactgctgcccagacacttttgtttacagcctgtagtaagaggaaagaggtactgcaaaagactatgggattttgttaccagattcttacagaaccaaatgctgaccctcgaaaaaaagatggagccctgcatatgattggctctttagctgaaatacttctgaagaaaaagatctataaagatcagatggaatacatgttgcagaatcatgtattccctctcttcagcagtgaactaggctacatgagagcaagggcttgctgggtacttcactatttttgtgaagtgaagttcaaaagtgatcagaaccttcaaacagccttagagctaacaagaagatgtctgattgatgatagagaaatgcctgtgaaagtggaagctgccattgcccttcaagtattgatcagcaatcaagaaaaagctaaagaatatatcacaccattcatcagacctgtaatgcaggctcttcttcacattataagagaaacagaaaatgatgaccttaccaatgtaattcagaaaatgatctgtgaatatagtgaagaagttactcctattgcagtagaaatgacacaacatttggcaatgacatttaaccaagtaatccagacggggccagatgaagaaggtagtgatgacaaagcagttactgctatgggaattctgaatacaattgatacacttcttagtgtagttgaagatcataaagagataacccaacagcttgagggaatctgcttacaggtcattggtactgttttacaacagcatgtcttagaattctatgaggagatcttctctttagcgcacagtttgacatgtcaacaagtgtctccacagatgtggcagctactaccccttgtatttgaagtctttcagcaagatggctttgattactttacagatatgatgcccctccttcataattatgtaacagttgatacagacacacttctgtctgacaccaagtatcttgaaatgatatacagtatgtgcaaaaaggttcttacaggagttgcaggagaagatgcagagtgtcatgcagcaaaattgttagaggtcatcattctgcagtgcaaagggcgtggcattgaccagtgcattcccttattcgtggaagcagccttagaaagactgacaagagaggttaagacaagtgaacttcgaactatgtgtctgcaagttgcaattgcagctttgtattataatccacacctactactcaataccttagaaaatcttcgcttccctaataatgttgaaccagttacaaatcattttattacacagtggcttaatgatgttgactgtttcttggggcttcatgacagaaagatgtgtgttctcggactctgtgctcttattgatatggaacagataccccaagttttaaatcaggtttctggacagattttgccggcttttatccttttatttaacggattgaaaagagcatatgcctgccatgcagaacatgagaatgacagtgatgatgatgatgaagctgaagatgatgatgaaaccgaggaactggggagtgatgaagatgatattgatgaagatgggcaagaatatttggagattctggctaagcaggctggtgaagatggagatgatgaagattgggaagaagatgatgctgaagagactgctctggaaggctattccacaatcattgatgatgaagataaccctgttgatgagtatcagatatttaaagctatctttcaaactattcaaaatcgtaatcctgtgtggtatcaggcactgactcacggtcttaatgaagaacaaagaaaacagttacaggacatagcaactctggctgatcaaagaagagcagcccatgaatccaaaatgattgagaagcatggaggatacaaattcagtgctccagttgtgccaagttctttcaattttggaggcccagcaccagggatgaattgagttatctctttctttcctgctgtgtgcttgtagtgaagagcttgtgttcctcctagtagtggttccagaactggttcatgttatctattctaaactaataatcaatagatggacaaaagaaacaacaaccccaggagatgggacctgatcatgcaacctggcactggaaaagaaatcagcgggattttgggggtgggggggatgggaggtaccttagagggagtattttctttattttttgaagaaagtaagatcctgactctgaagcttcaaagtgacactgtggaaatctgaaacgaggggatgtcatgaaggcagcttttctttttctgaggaaaaaataggcatgggctacaggactatttaaaatgtctcatttacagtataaaactcaaaggtagatgtaatttttacacctatgagtatttgtccaatttctgtctcttcctcaccattgggtatctattctttatatgtaaataagataaggtcatctgatagccttattcagtcttcatcattttcatcattgttcctatgtagattattggacatttattgtagcactacataactgattataaaaatctgtaaatgaattagcactttcatattgaaacaagcctgctagcctatgtataaaatagcaaaatgtttgctgtttataaaaagatgtaatggggtggggggcaggggtaatttcaagttattaatttaaaaatgaactagcaattttgtacctggtgactttgtggtgcactcacctctgatagtgacttgaattcggtatgtaaaaaggggttagtggtatttcattgctgctaaaaatgacaactccctctgtgtcctgtttttcttaaagctgtcagtgtacaagtgggtatttgaataccagaccttactgtaaaaaataaaaaaggtggtatctagagcatgtaaattggatataaagttctgctcttaaagagttgatctaagagtatggctaaacatctatatatgcaatctattaaaagaacttaattcggctattatgtcttgatttgattgcagttttttcctaattataacaaatttttcctcattggcctgtttttaatcctgtgcctagaaggagtacaaaatgcacactttacaaaattgatatttaacacttacccactcccctttccccatctcttctaccgctcttgttgatcgtggtatctgatcttgactagataggctgaaggcacatggttccctccaaaaaccactattgataccactacaaaaacaagccagcaaaaagatactgtagagaggttggcttgcttccctctcttcctaactgcatgttgaaaaataagccgttattgatcttaaacatcggtcagatgagtcatacattgggttattttttatatacatgtatacacaaaatatttcaaattgaaagcaacatcttaatggattcaaaactattacaagctgttgtctaaaacaggtgagaaaaaaatttataactgtaaaaacaaatgcacatattgatatttaaaatgcgtaattaagaaaacccattgttgttgtgtttttcttgtataccaataattaagccactactgttggcactgtttggttttctattttaacactgaaggagtgaaagtatttcctatatttatgaatttactactaaaatcttggcaaaaaaagaaaaaaattgtctaacgtgtgtgggtgaaaactgttaatcaagtgtttctactcccccccgaaaatcccctgaaagttggacaccaactgtataccctaggttgcttaaagggatttcactattatataaagtcaataaaaatgaagtagttgtatatatgcaacattgtgtacagaggggaaataatgaatagtattaaagaaacattctcgtcttcctttacctttaatcccctaatacctagtctactttttaaattttcagacttcactgctttttgaattcataattctaattttcacattattgttaatggaaaatcatatctaataaaggttttagttattcccatgcacagtatgaaaattctcatttgctgaggttttgtttcaagaaaatgtattggcatgtctttgagaacatgttttattgtctcctgtgtcatataatccaaactaatctccgtttacagactttaacttgaaattagaccttataattaaactatttaaatagtgttcaaatgatagtttctaatgcatcaaatatatacctcagttttcatgatttcctttaacattataatttggtatagatcaagaatcttaacatgtatcagtttctagatgaggctgcaggatttttggaaaactttttgaatgtatttacaatattctcttgtaattagctacatagggacttgtctttttttctttttacatacagcttttcctacagttttattaccctgtaatttttttttagttgtagaagttaattctgattttgtgtggatttcagtatttgtctttgttaatggcacatattagcataaatcacttttgtaaatgtaagctttctttttttttcttgaaaaagcctttctatttatcagtattaaataaaggaagttaatctgtttctctgcaggtaataaaatagtgacacactgt

SEQ ID NO: 73888 - DNA, 6151 bp, Homo sapiens
cgcgccggttgccgctgcggagcgcggcgggtccatgtgcgcagtgagtggcgctattcctggcccagtagcacccgagccccgggtttgaccgagtccgcgctgcgatggaccccaacaccattatcgaggccctgcggggcaccatggacccagccctgcgtgaggccgcggagcgccagctcaatgaagcacacaagtctctgaattttgtctcaacactgctccagattactatgtcggaacagctggatttacctgtgagacaggcaggtgttatctatctgaaaaatatgataacacagtattggcctgatcgagaaacagcaccaggggatatatccccttatactattccagaagaagatcgccattgtattcgagaaaatattgtagaagccattatccattctcctgagctcatcagggtacagcttactacatgcattcatcacatcatcaaacatgattatccaagccgctggactgccattgtggacaaaattggcttttatcttcagtccgataacagtgcttgttggctaggaattcttctttgcctttatcagcttgtgaaaaattatgagtataaaaaaccagaggagcggagtccattggtagcagcaatgcagcattttctgccagttctaaaggatcgttttatccagcttctttctgaccagtctgatcagtctgtcctcatccagaaacagatattcaagatcttctatgctcttgttcagtatacactaccactggaactgataaaccaacagaacctgacagaatggatagaaattttaaagactgttgtgaacagggatgtacctaatgaaacacttcaagttgaagaagatgatcgacctgagttaccatggtggaaatgcaagaagtgggccttacatattttagcaagactttttgaaagatatggaagccctggcaatgtttccaaggagtataatgaatttgctgaagtatttctgaaggcatttgctgttggtgtccagcaagttttattgaaggtgttatatcagtacaaggagaagcaatatatggctcctcgagttttacaacagacattaaattatattaatcaaggagtttctcatgctctcacctggaagaatctgaagccccatatacaaggcattatccaagatgttatttttccattgatgtgctatacagatgctgatgaggaactttggcaagaagacccttacgaatatatacgcatgaagtttgatgtgtttgaagatttcatttctcctaccactgctgcccagacacttttgtttacagcctgtagtaagaggaaagaggtactgcaaaagactatgggattttgttaccagattcttacagaaccaaatgctgaccctcgaaaaaaagatggagccctgcatatgattggctctttagctgaaatacttctgaagaaaaagatctataaagatcagatggaatacatgttgcagaatcatgtattccctctcttcagcagtgaactaggctacatgagagcaagggcttgctgggtacttcactatttttgtgaagtgaagttcaaaagtgatcagaaccttcaaacagccttagagctaacaagaagatgtctgattgatgatagagaaatgcctgtgaaagtggaagctgccattgcccttcaagtattgatcagcaatcaagaaaaagctaaagaatatatcacaccattcatcagacctgtaatgcaggctcttcttcacattataagagaaacagaaaatgatgaccttaccaatgtaattcagaaaatgatctgtgaatatagtgaagaagttactcctattgcagtagaaatgacacaacatttggcaatgacatttaaccaagtaatccagacggggccagatgaagaaggtagtgatgacaaagcagttactgctatgggaattctgaatacaattgatacacttcttagtgtagttgaagatcataaagagataacccaacagcttgagggaatctgcttacaggtcattggtactgttttacaacagcatgtcttagaattctatgaggagatcttctctttagcgcacagtttgacatgtcaacaagtgtctccacagatgtggcagctactaccccttgtatttgaagtctttcagcaagatggctttgattactttacagatatgatgcccctccttcataattatgtaacagttgatacagacacacttctgtctgacaccaagtatcttgaaatgatatacagtatgtgcaaaaaggttcttacaggagttgcaggagaagatgcagagtgtcatgcagcaaaattgttagaggtcatcattctgcagtgcaaagggcgtggcattgaccagtgcattcccttattcgtggaagcagccttagaaagactgacaagagaggttaagacaagtgaacttcgaactatgtgtctgcaagttgcaattgcagctttgtattataatccacacctactactcaataccttagaaaatcttcgcttccctaataatgttgaaccagttacaaatcattttattacacagtggcttaatgatgttgactgtttcttggggcttcatgacagaaagatgtgtgttctcggactctgtgctcttattgatatggaacagataccccaagttttaaatcaggtttctggacagattttgccggcttttatccttttatttaacggattgaaaagagcatatgcctgccatgcagaacatgagaatgacagtgatgatgatgatgaagctgaagatgatgatgaaaccgaggaactggggagtgatgaagatgatattgatgaagatgggcaagaatatttggagattctggctaagcaggctggtgaagatggagatgatgaagattgggaagaagatgatgctgaagagactgctctggaaggctattccacaatcattgatgatgaagataaccctgttgatgagtatcagatatttaaagctatctttcaaactattcaaaatcgtaatcctgtgtggtatcaggcactgactcacggtcttaatgaagaacaaagaaaacagttacaggacatagcaactctggctgatcaaagaagagcagcccatgaatccaaaatgattgagaagcatggaggatacaaattcagtgctccagttgtgccaagttctttcaattttggaggcccagcaccagggatgaattgagttatctctttctttcctgctgtgtgcttgtagtgaagagcttgtgttcctcctagtagtggttccagaactggttcatgttatctattctaaactaataatcaatagatggacaaaagaaacaacaaccccaggagatgggacctgatcatgcaacctggcactggaaaagaaatcagcgggattttgggggtgggggggatgggaggtaccttagagggagtattttctttattttttgaagaaagtaagatcctgactctgaagcttcaaagtgacactgtggaaatctgaaacgaggggatgtcatgaaggcagcttttctttttctgaggaaaaaataggcatgggctacaggactatttaaaatgtctcatttacagtataaaactcaaaggtagatgtaatttttacacctatgagtatttgtccaatttctgtctcttcctcaccattgggtatctattctttatatgtaaataagataaggtcatctgatagccttattcagtcttcatcattttcatcattgttcctatgtagattattggacatttattgtagcactacataactgattataaaaatctgtaaatgaattagcactttcatattgaaacaagcctgctagcctatgtataaaatagcaaaatgtttgctgtttataaaaagatgtaatggggtggggggcaggggtaatttcaagttattaatttaaaaatgaactagcaattttgtacctggtgactttgtggtgcactcacctctgatagtgacttgaattcggtatgtaaaaaggggttagtggtatttcattgctgctaaaaatgacaactccctctgtgtcctgtttttcttaaagctgtcagtgtacaagtgggtatttgaataccagaccttactgtaaaaaataaaaaaggtggtatctagagcatgtaaattggatataaagttctgctcttaaagagttgatctaagagtatggctaaacatctatatatgcaatctattaaaagaacttaattcggctattatgtcttgatttgattgcagttttttcctaattataacaaatttttcctcattggcctgtttttaatcctgtgcctagaaggagtacaaaatgcacactttacaaaattgatatttaacacttacccactcccctttccccatctcttctaccgctcttgttgatcgtggtatctgatcttgactagataggctgaaggcacatggttccctccaaaaaccactattgataccactacaaaaacaagccagcaaaaagatactgtagagaggttggcttgcttccctctcttcctaactgcatgttgaaaaataagccgttattgatcttaaacatcggtcagatgagtcatacattgggttattttttatatacatgtatacacaaaatatttcaaattgaaagcaacatcttaatggattcaaaactattacaagctgttgtctaaaacaggtgagaaaaaaatttataactgtaaaaacaaatgcacatattgatatttaaaatgcgtaattaagaaaacccattgttgttgtgtttttcttgtataccaataattaagccactactgttggcactgtttggttttctattttaacactgaaggagtgaaagtatttcctatatttatgaatttactactaaaatcttggcaaaaaaagaaaaaaattgtctaacgtgtgtgggtgaaaactgttaatcaagtgtttctactcccccccgaaaatcccctgaaagttggacaccaactgtataccctaggttgcttaaagggatttcactattatataaagtcaataaaaatgaagtagttgtatatatgcaacattgtgtacagaggggaaataatgaatagtattaaagaaacattctcgtcttcctttacctttaatcccctaatacctagtctactttttaaattttcagacttcactgctttttgaattcataattctaattttcacattattgttaatggaaaatcatatctaataaaggttttagttattcccatgcacagtatgaaaattctcatttgctgaggttttgtttcaagaaaatgtattggcatgtctttgagaacatgttttattgtctcctgtgtcatataatccaaactaatctccgtttacagactttaacttgaaattagaccttataattaaactatttaaatagtgttcaaatgatagtttctaatgcatcaaatatatacctcagttttcatgatttcctttaacattataatttggtatagatcaagaatcttaacatgtatcagtttctagatgaggctgcaggatttttggaaaactttttgaatgtatttacaatattctcttgtaattagctacatagggacttgtctttttttctttttacatacagcttttcctacagttttattaccctgtaatttttttttagttgtagaagttaattctgattttgtgtggatttcagtatttgtctttgttaatggcacatattagcataaatcacttttgtaaatgtaagctttctttttttttcttgaaaaagcctttctatttatcagtattaaataaaggaagttaatctgtttctctgcaggtaataaaatagtgacacactgtattaagatagtgactgctatactcaactctggaagagactagagtatagagcatgagtggcaaaaccacagcccttgggccatatgctgctattcagtcccagatgtagcccctgaagcaagcataaagaaaaatgaattaaaaattaaattaatatggaaagttaaaaaatggattacattagtatgactaaaccatgtctttggcaaagatctaacacaatgtcttaagtataataggtagtctctgtttgtaaaataaatgacttaaatttaaaa

SEQ ID NO: 73889 - DNA, 6176 bp, Homo sapiens
cgcgccggttgccgctgcggagcgcggcgggtccatgtgcgcagtgagtggcgctattcctggcccagtagcacccgagccccgggtttgaccgagtccgcgctgcgatggaccccaacaccattatcgaggccctgcggggcaccatggacccagccctgcgtgaggccgcggagcgccagctcaatgaagcacacaagtctctgaattttgtctcaacactgctccagattactatgtcggaacagctggatttacctgtgagacaggcaggtgttatctatctgaaaaatatgataacacagtattggcctgatcgagaaacagcaccaggggatatatccccttatactattccagaagaagatcgccattgtattcgagaaaatattgtagaagccattatccattctcctgagctcatcagggtacagcttactacatgcattcatcacatcatcaaacatgattatccaagccgctggactgccattgtggacaaaattggcttttatcttcagtccgataacagtgcttgttggctaggaattcttctttgcctttatcagcttgtgaaaaattatgagtataaaaaaccagaggagcggagtccattggtagcagcaatgcagcattttctgccagttctaaaggatcgttttatccagcttctttctgaccagtctgatcagtctgtcctcatccagaaacagatattcaagatcttctatgctcttgttcagtatacactaccactggaactgataaaccaacagaacctgacagaatggatagaaattttaaagactgttgtgaacagggatgtacctaatgaaacacttcaagttgaagaagatgatcgacctgagttaccatggtggaaatgcaagaagtgggccttacatattttagcaagactttttgaaagatatggaagccctggcaatgtttccaaggagtataatgaatttgctgaagtatttctgaaggcatttgctgttggtgtccagcaagttttattgaaggtgttatatcagtacaaggagaagcaatatatggctcctcgagttttacaacagacattaaattatattaatcaaggagtttctcatgctctcacctggaagaatctgaagccccatatacaaggcattatccaagatgttatttttccattgatgtgctatacagatgctgatgaggaactttggcaagaagacccttacgaatatatacgcatgaagtttgatgtgtttgaagatttcatttctcctaccactgctgcccagacacttttgtttacagcctgtagtaagaggaaagaggtactgcaaaagactatgggattttgttaccagattcttacagaaccaaatgctgaccctcgaaaaaaagatggagccctgcatatgattggctctttagctgaaatacttctgaagaaaaagatctataaagatcagatggaatacatgttgcagaatcatgtattccctctcttcagcagtgaactaggctacatgagagcaagggcttgctgggtacttcactatttttgtgaagtgaagttcaaaagtgatcagaaccttcaaacagccttagagctaacaagaagatgtctgattgatgatagagaaatgcctgtgaaagtggaagctgccattgcccttcaagtattgatcagcaatcaagaaaaagctaaagaatatatcacaccattcatcagacctgtaatgcaggctcttcttcacattataagagaaacagaaaatgatgaccttaccaatgtaattcagaaaatgatctgtgaatatagtgaagaagttactcctattgcagtagaaatgacacaacatttggcaatgacatttaaccaagtaatccagacggggccagatgaagaaggtagtgatgacaaagcagttactgctatgggaattctgaatacaattgatacacttcttagtgtagttgaagatcataaagagataacccaacagcttgagggaatctgcttacaggtcattggtactgttttacaacagcatgtcttagaattctatgaggagatcttctctttagcgcacagtttgacatgtcaacaagtgtctccacagatgtggcagctactaccccttgtatttgaagtctttcagcaagatggctttgattactttacagatatgatgcccctccttcataattatgtaacagttgatacagacacacttctgtctgacaccaagtatcttgaaatgatatacagtatgtgcaaaaaggttcttacaggagttgcaggagaagatgcagagtgtcatgcagcaaaattgttagaggtcatcattctgcagtgcaaagggcgtggcattgaccagtgcattcccttattcgtggaagcagccttagaaagactgacaagagaggttaagacaagtgaacttcgaactatgtgtctgcaagttgcaattgcagctttgtattataatccacacctactactcaataccttagaaaatcttcgcttccctaataatgttgaaccagttacaaatcattttattacacagtggcttaatgatgttgactgtttcttggggcttcatgacagaaagatgtgtgttctcggactctgtgctcttattgatatggaacagataccccaagttttaaatcaggtttctggacagattttgccggcttttatccttttatttaacggattgaaaagagcatatgcctgccatgcagaacatgagaatgacagtgatgatgatgatgaagctgaagatgatgatgaaaccgaggaactggggagtgatgaagatgatattgatgaagatgggcaagaatatttggagattctggctaagcaggctggtgaagatggagatgatgaagattgggaagaagatgatgctgaagagactgctctggaaggctattccacaatcattgatgatgaagataaccctgttgatgagtatcagatatttaaagctatctttcaaactattcaaaatcgtaatcctgtgtggtatcaggcactgactcacggtcttaatgaagaacaaagaaaacagttacaggacatagcaactctggctgatcaaagaagagcagcccatgaatccaaaatgattgagaagcatggaggatacaaattcagtgctccagttgtgccaagttctttcaattttggaggcccagcaccagggatgaattgagttatctctttctttcctgctgtgtgcttgtagtgaagagcttgtgttcctcctagtagtggttccagaactggttcatgttatctattctaaactaataatcaatagatggacaaaagaaacaacaaccccaggagatgggacctgatcatgcaacctggcactggaaaagaaatcagcgggattttgggggtgggggggatgggaggtaccttagagggagtattttctttattttttgaagaaagtaagatcctgactctgaagcttcaaagtgacactgtggaaatctgaaacgaggggatgtcatgaaggcagcttttctttttctgaggaaaaaataggcatgggctacaggactatttaaaatgtctcatttacagtataaaactcaaaggtagatgtaatttttacacctatgagtatttgtccaatttctgtctcttcctcaccattgggtatctattctttatatgtaaataagataaggtcatctgatagccttattcagtcttcatcattttcatcattgttcctatgtagattattggacatttattgtagcactacataactgattataaaaatctgtaaatgaattagcactttcatattgaaacaagcctgctagcctatgtataaaatagcaaaatgtttgctgtttataaaaagatgtaatggggtggggggcaggggtaatttcaagttattaatttaaaaatgaactagcaattttgtacctggtgactttgtggtgcactcacctctgatagtgacttgaattcggtatgtaaaaaggggttagtggtatttcattgctgctaaaaatgacaactccctctgtgtcctgtttttcttaaagctgtcagtgtacaagtgggtatttgaataccagaccttactgtaaaaaataaaaaaggtggtatctagagcatgtaaattggatataaagttctgctcttaaagagttgatctaagagtatggctaaacatctatatatgcaatctattaaaagaacttaattcggctattatgtcttgatttgattgcagttttttcctaattataacaaatttttcctcattggcctgtttttaatcctgtgcctagaaggagtacaaaatgcacactttacaaaattgatatttaacacttacccactcccctttccccatctcttctaccgctcttgttgatcgtggtatctgatcttgactagataggctgaaggcacatggttccctccaaaaaccactattgataccactacaaaaacaagccagcaaaaagatactgtagagaggttggcttgcttccctctcttcctaactgcatgttgaaaaataagccgttattgatcttaaacatcggtcagatgagtcatacattgggttattttttatatacatgtatacacaaaatatttcaaattgaaagcaacatcttaatggattcaaaactattacaagctgttgtctaaaacaggtgagaaaaaaatttataactgtaaaaacaaatgcacatattgatatttaaaatgcgtaattaagaaaacccattgttgttgtgtttttcttgtataccaataattaagccactactgttggcactgtttggttttctattttaacactgaaggagtgaaagtatttcctatatttatgaatttactactaaaatcttggcaaaaaaagaaaaaaattgtctaacgtgtgtgggtgaaaactgttaatcaagtgtttctactcccccccgaaaatcccctgaaagttggacaccaactgtataccctaggttgcttaaagggatttcactattatataaagtcaataaaaatgaagtagttgtatatatgcaacattgtgtacagaggggaaataatgaatagtattaaagaaacattctcgtcttcctttacctttaatcccctaatacctagtctactttttaaattttcagacttcactgctttttgaattcataattctaattttcacattattgttaatggaaaatcatatctaataaaggttttagttattcccatgcacagtatgaaaattctcatttgctgaggttttgtttcaagaaaatgtattggcatgtctttgagaacatgttttattgtctcctgtgtcatataatccaaactaatctccgtttacagactttaacttgaaattagaccttataattaaactatttaaatagtgttcaaatgatagtttctaatgcatcaaatatatacctcagttttcatgatttcctttaacattataatttggtatagatcaagaatcttaacatgtatcagtttctagatgaggctgcaggatttttggaaaactttttgaatgtatttacaatattctcttgtaattagctacatagggacttgtctttttttctttttacatacagcttttcctacagttttattaccctgtaatttttttttagttgtagaagttaattctgattttgtgtggatttcagtatttgtctttgttaatggcacatattagcataaatcacttttgtaaatgtaagctttctttttttttcttgaaaaagcctttctatttatcagtattaaataaaggaagttaatctgtttctctgcaggtaataaaatagtgacacactgtattaagatagtgactgctatactcaactctggaagagactagagtatagagcatgagtggcaaaaccacagcccttgggccatatgctgctattcagtcccagatgtagcccctgaagcaagcataaagaaaaatgaattaaaaattaaattaatatggaaagttaaaaaatggattacattagtatgactaaaccatgtctttggcaaagatctaacacaatgtcttaagtataataggtagtctctgtttgtaaaataaatgacttaaatttaaaaaaaaaaagtcgacgcggccgcgaat

SEQ ID NO: 73890 - DNA, 6096 bp, Homo sapiens
cgcgccggttgccgctgcggagcgcggcgggtccatgtgcgcagtgagtggcgctattcctggcccagtagcacccgagccccgggtttgaccgagtccgcgctgcgatggaccccaacaccattatcgaggccctgcggggcaccatggacccagccctgcgtgaggccgcggagcgccagctcaatgaagcacacaagtctctgaattttgtctcaacactgctccagattactatgtcggaacagctggatttacctgtgagacaggcaggtgttatctatctgaaaaatatgataacacagtattggcctgatcgagaaacagcaccaggggatatatccccttatactattccagaagaagatcgccattgtattcgagaaaatattgtagaagccattatccattctcctgagctcatcagggtacagcttactacatgcattcatcacatcatcaaacatgattatccaagccgctggactgccattgtggacaaaattggcttttatcttcagtccgataacagtgcttgttggctaggaattcttctttgcctttatcagcttgtgaaaaattatgagtataaaaaaccagaggagcggagtccattggtagcagcaatgcagcattttctgccagttctaaaggatcgttttatccagcttctttctgaccagtctgatcagtctgtcctcatccagaaacagatattcaagatcttctatgctcttgttcagtatacactaccactggaactgataaaccaacagaacctgacagaatggatagaaattttaaagactgttgtgaacagggatgtacctaatgaaacacttcaagttgaagaagatgatcgacctgagttaccatggtggaaatgcaagaagtgggccttacatattttagcaagactttttgaaagatatggaagccctggcaatgtttccaaggagtataatgaatttgctgaagtatttctgaaggcatttgctgttggtgtccagcaagttttattgaaggtgttatatcagtacaaggagaagcaatatatggctcctcgagttttacaacagacattaaattatattaatcaaggagtttctcatgctctcacctggaagaatctgaagccccatatacaaggcattatccaagatgttatttttccattgatgtgctatacagatgctgatgaggaactttggcaagaagacccttacgaatatatacgcatgaagtttgatgtgtttgaagatttcatttctcctaccactgctgcccagacacttttgtttacagcctgtagtaagaggaaagaggtactgcaaaagactatgggattttgttaccagattcttacagaaccaaatgctgaccctcgaaaaaaagatggagccctgcatatgattggctctttagctgaaatacttctgaagaaaaagatctataaagatcagatggaatacatgttgcagaatcatgtattccctctcttcagcagtgaactaggctacatgagagcaagggcttgctgggtacttcactatttttgtgaagtgaagttcaaaagtgatcagaaccttcaaacagccttagagctaacaagaagatgtctgattgatgatagagaaatgcctgtgaaagtggaagctgccattgcccttcaagtattgatcagcaatcaagaaaaagctaaagaatatatcacaccattcatcagacctgtaatgcaggctcttcttcacattataagagaaacagaaaatgatgaccttaccaatgtaattcagaaaatgatctgtgaatatagtgaagaagttactcctattgcagtagaaatgacacaacatttggcaatgacatttaaccaagtaatccagacggggccagatgaagaaggtagtgatgacaaagcagttactgctatgggaattctgaatacaattgatacacttcttagtgtagttgaagatcataaagagataacccaacagcttgagggaatctgcttacaggtcattggtactgttttacaacagcatgtcttagaattctatgaggagatcttctctttagcgcacagtttgacatgtcaacaagtgtctccacagatgtggcagctactaccccttgtatttgaagtctttcagcaagatggctttgattactttacagatatgatgcccctccttcataattatgtaacagttgatacagacacacttctgtctgacaccaagtatcttgaaatgatatacagtatgtgcaaaaaggttcttacaggagttgcaggagaagatgcagagtgtcatgcagcaaaattgttagaggtcatcattctgcagtgcaaagggcgtggcattgaccagtgcattcccttattcgtggaagcagccttagaaagactgacaagagaggttaagacaagtgaacttcgaactatgtgtctgcaagttgcaattgcagctttgtattataatccacacctactactcaataccttagaaaatcttcgcttccctaataatgttgaaccagttacaaatcattttattacacagtggcttaatgatgttgactgtttcttggggcttcatgacagaaagatgtgtgttctcggactctgtgctcttattgatatggaacagataccccaagttttaaatcaggtttctggacagattttgccggcttttatccttttatttaacggattgaaaagagcatatgcctgccatgcagaacatgagaatgacagtgatgatgatgatgaagctgaagatgatgatgaaaccgaggaactggggagtgatgaagatgatattgatgaagatgggcaagaatatttggagattctggctaagcaggctggtgaagatggagatgatgaagattgggaagaagatgatgctgaagagactgctctggaaggctattccacaatcattgatgatgaagataaccctgttgatgagtatcagatatttaaagctatctttcaaactattcaaaatcgtaatcctgtgtggtatcaggcactgactcacggtcttaatgaagaacaaagaaaacagttacaggacatagcaactctggctgatcaaagaagagcagcccatgaatccaaaatgattgagaagcatggaggatacaaattcagtgctccagttgtgccaagttctttcaattttggaggcccagcaccagggatgaattgagttatctctttctttcctgctgtgtgcttgtagtgaagagcttgtgttcctcctagtagtggttccagaactggttcatgttatctattctaaactaataatcaatagatggacaaaagaaacaacaaccccaggagatgggacctgatcatgcaacctggcactggaaaagaaatcagcgggattttgggggtgggggggatgggaggtaccttagagggagtattttctttattttttgaagaaagtaagatcctgactctgaagcttcaaagtgacactgtggaaatctgaaacgaggggatgtcatgaaggcagcttttctttttctgaggaaaaaataggcatgggctacaggactatttaaaatgtctcatttacagtataaaactcaaaggtagatgtaatttttacacctatgagtatttgtccaatttctgtctcttcctcaccattgggtatctattctttatatgtaaataagataaggtcatctgatagccttattcagtcttcatcattttcatcattgttcctatgtagattattggacatttattgtagcactacataactgattataaaaatctgtaaatgaattagcactttcatattgaaacaagcctgctagcctatgtataaaatagcaaaatgtttgctgtttataaaaagatgtaatggggtggggggcaggggtaatttcaagttattaatttaaaaatgaactagcaattttgtacctggtgactttgtggtgcactcacctctgatagtgacttgaattcggtatgtaaaaaggggttagtggtatttcattgctgctaaaaatgacaactccctctgtgtcctgtttttcttaaagctgtcagtgtacaagtgggtatttgaataccagaccttactgtaaaaaataaaaaaggtggtatctagagcatgtaaattggatataaagttctgctcttaaagagttgatctaagagtatggctaaacatctatatatgcaatctattaaaagaacttaattcggctattatgtcttgatttgattgcagttttttcctaattataacaaatttttcctcattggcctgtttttaatcctgtgcctagaaggagtacaaaatgcacactttacaaaattgatatttaacacttacccactcccctttccccatctcttctaccgctcttgttgatcgtggtatctgatcttgactagataggctgaaggcacatggttccctccaaaaaccactattgataccactacaaaaacaagccagcaaaaagatactgtagagaggttggcttgcttccctctcttcctaactgcatgttgaaaaataagccgttattgatcttaaacatcggtcagatgagtcatacattgggttattttttatatacatgtatacacaaaatatttcaaattgaaagcaacatcttaatggattcaaaactattacaagctgttgtctaaaacaggtgagaaaaaaatttataactgtaaaaacaaatgcacatattgatatttaaaatgcgtaattaagaaaacccattgttgttgtgtttttcttgtataccaataattaagccactactgttggcactgtttggttttctattttaacactgaaggagtgaaagtatttcctatatttatgaatttactactaaaatcttggcaaaaaaagaaaaaaattgtctaacgtgtgtgggtgaaaactgttaatcaagtgtttctactcccccccgaaaatcccctgaaagttggacaccaactgtataccctaggttgcttaaagggatttcactattatataaagtcaataaaaatgaagtagttgtatatatgcaacattgtgtacagaggggaaataatgaatagtattaaagaaacattctcgtcttcctttacctttaatcccctaatacctagtctactttttaaattttcagacttcactgctttttgaattcataattctaattttcacattattgttaatggaaaatcatatctaataaaggttttagttattcccatgcacagtatgaaaattctcatttgctgaggttttgtttcaagaaaatgtattggcatgtctttgagaacatgttttattgtctcctgtgtcatataatccaaactaatctccgtttacagactttaacttgaaattagaccttataattaaactatttaaatagtgttcaaatgatagtttctaatgcatcaaatatatacctcagttttcatgatttcctttaacattataatttggtatagatcaagaatcttaacatgtatcagtttctagatgaggctgcaggatttttgtgtctttttttctttttacatacagcttttcctacagttttattaccctgtaatttttttttagttgtagaagttaattctgattttgtgtggatttcagtatttgtctttgttaatggcacatattagcataaatcacttttgtaaatgtaagctttctttttttttcttgaaaaagcctttctatttatcagtattaaataaaggaagttaatctgtttctctgcaggtaataaaatagtgacacactgtattaagatagtgactgctatactcaactctggaagagactagagtatagagcatgagtggcaaaaccacagcccttgggccatatgctgctattcagtcccagatgtagcccctgaagcaagcataaagaaaaatgaattaaaaattaaattaatatggaaagttaaaaaatggattacattagtatgactaaaccatgtctttggcaaagatctaacacaatgtcttaagtataataggtagtctctgtttgtaaaataaatgacttaaatttaaaa

SEQ ID NO: 73891 - DNA, 6022 bp, Homo sapiens
cgcgccggttgccgctgcggagcgcggcgggtccatgtgcgcagtgagtggcgctattcctggcccagtagcacccgagccccgggtttgaccgagtccgcgctgcgatggaccccaacaccattatcgaggccctgcggggcaccatggacccagccctgcgtgaggccgcggagcgccagctcaatgaagcacacaagtctctgaattttgtctcaacactgctccagattactatgtcggaacagctggatttacctgtgagacaggcaggtgttatctatctgaaaaatatgataacacagtattggcctgatcgagaaacagcaccaggggatatatccccttatactattccagaagaagatcgccattgtattcgagaaaatattgtagaagccattatccattctcctgagctcatcagggtacagcttactacatgcattcatcacatcatcaaacatgattatccaagccgctggactgccattgtggacaaaattggcttttatcttcagtccgataacagtgcttgttggctaggaattcttctttgcctttatcagcttgtgaaaaattatgagtataaaaaaccagaggagcggagtccattggtagcagcaatgcagcattttctgccagttctaaaggatcgttttatccagcttctttctgaccagtctgatcagtctgtcctcatccagaaacagatattcaagatcttctatgctcttgttcagtatacactaccactggaactgataaaccaacagaacctgacagaatggatagaaattttaaagactgttgtgaacagggatgtacctaatgaaacacttcaagttgaagaagatgatcgacctgagttaccatggtggaaatgcaagaagtgggccttacatattttagcaagactttttgaaagatatggaagccctggcaatgtttccaaggagtataatgaatttgctgaagtatttctgaaggcatttgctgttggtgtccagcaagttttattgaaggtgttatatcagtacaaggagaagcaatatatggctcctcgagttttacaacagacattaaattatattaatcaaggagtttctcatgctctcacctggaagaatctgaagccccatatacaaggcattatccaagatgttatttttccattgatgtgctatacagatgctgatgaggaactttggcaagaagacccttacgaatatatacgcatgaagtttgatgtgtttgaagatttcatttctcctaccactgctgcccagacacttttgtttacagcctgtagtaagaggaaagaggtactgcaaaagactatgggattttgttaccagattcttacagaaccaaatgctgaccctcgaaaaaaagatggagccctgcatatgattggctctttagctgaaatacttctgaagaaaaagatctataaagatcagatggaatacatgttgcagaatcatgtattccctctcttcagcagtgaactaggctacatgagagcaagggcttgctgggtacttcactatttttgtgaagtgaagttcaaaagtgatcagaaccttcaaacagccttagagctaacaagaagatgtctgattgatgatagagaaatgcctgtgaaagtggaagctgccattgcccttcaagtattgatcagcaatcaagaaaaagctaaagaatatatcacaccattcatcagacctgtaatgcaggctcttcttcacattataagagaaacagaaaatgatgaccttaccaatgtaattcagaaaatgatctgtgaatatagtgaagaagttactcctattgcagtagaaatgacacaacatttggcaatgacatttaaccaagtaatccagacggggccagatgaagaaggtagtgatgacaaagcagttactgctatgggaattctgaatacaattgatacacttcttagtgtagttgaagatcataaagagataacccaacagcttgagggaatctgcttacaggtcattggtactgttttacaacagcatgtcttagaattctatgaggagatcttctctttagcgcacagtttgacatgtcaacaagtgtctccacagatgtggcagctactaccccttgtatttgaagtctttcagcaagatggctttgattactttacagatatgatgcccctccttcataattatgtaacagttgatacagacacacttctgtctgacaccaagtatcttgaaatgatatacagtatgtgcaaaaaggttcttacaggagttgcaggagaagatgcagagtgtcatgcagcaaaattgttagaggtcatcattctgcagtgcaaagggcgtggcattgaccagtgcattcccttattcgtggaagcagccttagaaagactgacaagagaggttaagacaagtgaacttcgaactatgtgtctgcaagttgcaattgcagctttgtattataatccacacctactactcaataccttagaaaatcttcgcttccctaataatgttgaaccagttacaaatcattttattacacagtggcttaatgatgttgactgtttcttggggcttcatgacagaaagatgtgtgttctcggactctgtgctcttattgatatggaacagataccccaagttttaaatcaggtttctggacagattttgccggcttttatccttttatttaacggattgaaaagagcatatgcctgccatgcagaacatgagaatgacagtgatgatgatgatgaagctgaagatgatgatgaaaccgaggaactggggagtgatgaagatgatattgatgaagatgggcaagaatatttggagattctggctaagcaggctggtgaagatggagatgatgaagattgggaagaagatgatgctgaagagactgctctggaaggctattccacaatcattgatgatgaagataaccctgttgatgagtatcagatatttaaagctatctttcaaactattcaaaatcgtaatcctgtgtggtatcaggcactgactcacggtcttaatgaagaacaaagaaaacagttacaggacatagcaactctggctgatcaaagaagagcagcccatgaatccaaaatgattgagaagcatggaggatacaaattcagtgctccagttgtgccaagttctttcaattttggaggcccagcaccagggatgaattgagttatctctttctttcctgctgtgtgcttgtagtgaagagcttgtgttcctcctagtagtggttccagaactggttcatgttatctattctaaactaataatcaatagatggacaaaagaaacaacaaccccaggagatgggacctgatcatgcaacctggcactggaaaagaaatcagcgggattttgggggtgggggggatgggaggtaccttagagggagtattttctttattttttgaagaaagtaagatcctgactctgaagcttcaaagtgacactgtggaaatctgaaacgaggggatgtcatgaaggcagcttttctttttctgaggaaaaaataggcatgggctacaggactatttaaaatgtctcatttacagtataaaactcaaaggtagatgtaatttttacacctatgagtatttgtccaatttctgtctcttcctcaccattgggtatctattctttatatgtaaataagataaggtcatctgatagccttattcagtcttcatcattttcatcattgttcctatgtagattattggacatttattgtagcactacataactgattataaaaatctgtaaatgaattagcactttcatattgaaacaagcctgctagcctatgtataaaatagcaaaatgtttgctgtttataaaaagatgtaatggggtggggggcaggggtaatttcaagttattaatttaaaaatgaactagcaattttgtacctggtgactttgtggtgcactcacctctgatagtgacttgaattcggtatgtaaaaaggggttagtggtatttcattgctgctaaaaatgacaactccctctgtgtcctgtttttcttaaagctgtcagtgtacaagtgggtatttgaataccagaccttactgtaaaaaataaaaaaggtggtatctagagcatgtaaattggatataaagttctgctcttaaagagttgatctaagagtatggctaaacatctatatatgcaatctattaaaagaacttaattcggctattatgtcttgatttgattgcagttttttcctaattataacaaatttttcctcattggcctgtttttaatcctgtgcctagaaggagtacaaaatgcacactttacaaaattgatatttaacacttacccactcccctttccccatctcttctaccgctcttgttgatcgtggtatctgatcttgactagataggctgaaggcacatggttccctccaaaaaccactattgataccactacaaaaacaagccagcaaaaagatactgtagagaggttggcttgcttccctctcttcctaactgcatgttgaaaaataagccgttattgatcttaaacatcggtcagatgagtcatacattgggttattttttatatacatgtatacacaaaatatttcaaattgaaagcaacatcttaatggattcaaaactattacaagctgttgtctaaaacaggtgagaaaaaaatttataactgtaaaaacaaatgcacatattgatatttaaaatgcgtaattaagaaaacccattgttgttgtgtttttcttgtataccaataattaagccactactgttggcactgtttggttttctattttaacactgaaggagtgaaagtatttcctatatttatgaatttactactaaaatcttggcaaaaaaagaaaaaaattgtctaacgtgtgtgggtgaaaactgttaatcaagtgtttctactcccccccgaaaatcccctgaaagttggacaccaactgtataccctaggttgcttaaagggatttcactattatataaagtcaataaaaatgaagtagttgtatatatgcaacattgtgtacagaggggaaataatgaatagtattaaagaaacattctcgtcttcctttacctttaatcccctaatacctagtctactttttaaattttcagacttcactgctttttgaattcataattctaattttcacattattgttaatggaaaatcatatctaataaaggttttagttattcccatgcacagtatgaaaattctcatttgctgaggttttgtttcaagaaaatgtattggcatgtctttgagaacatgttttattgtctcctgtgtcatataatccaaactaatctccgtttacagactttaacttgaaattagaccttataattaaactatttaaatagtgttcaaatgatagtttctaatgcatcaaatatatacctcagttttcatgatttcctttaacattataatttggtatagatcaagaatcttaacatgtatcagtttctagatgaggctgcaggatttttggaaaactttttgaatgtatttacaatattctcttgtaattagctacatagggacttgtctttttttctttttacatacagcttttcctacagttttattaccctgtaatttttttttagttgtagaagttaattctgattttgtgtggatttcagtatttgtctttgttaatggcacatattagcataaatcacttttgtaaatgtaagctttctttttttttcttgaaaaagcctttctatttatcagtattaaataaaggaagttaatctgtttctctgcaggtaataaaatagtgacacactgtattaagatagtgactgctatactcaactctggaagagactagagtatagagcatgagtggcaaaaccacagcccttgggccatatgctgctattcagtcccagatgtagccccaggcagcaatgtgctattgaaacttctaaaactagg

SEQ ID NO: 73892 - DNA, 5271 bp, Homo sapiens
cgcgccggttgccgctgcggagcgcggcgggtccatgtgcgcagtgagtggcgctattcctggcccagtagcacccgagccccgggtttgaccgagtccgcgctgcgatggaccccaacaccattatcgaggccctgcggggcaccatggacccagccctgcgtgaggccgcggagcgccagctcaatgaagcacacaagtctctgaattttgtctcaacactgctccagattactatgtcggaacagctggatttacctgtgagacaggcaggtgttatctatctgaaaaatatgataacacagtattggcctgatcgagaaacagcaccaggggatatatccccttatactattccagaagaagatcgccattgtattcgagaaaatattgtagaagccattatccattctcctgagctcatcagggtacagcttactacatgcattcatcacatcatcaaacatgattatccaagccgctggactgccattgtggacaaaattggcttttatcttcagtccgataacagtgcttgttggctaggaattcttctttgcctttatcagcttgtgaaaaattatgagtataaaaaaccagaggagcggagtccattggtagcagcaatgcagcattttctgccagttctaaaggatcgttttatccagcttctttctgaccagtctgatcagtctgtcctcatccagaaacagatattcaagatcttctatgctcttgttcagtatacactaccactggaactgataaaccaacagaacctgacagaatggatagaaattttaaagactgttgtgaacagggatgtacctaatgaaacacttcaagttgaagaagatgatcgacctgagttaccatggtggaaatgcaagaagtgggccttacatattttagcaagactttttgaaagatatggaagccctggcaatgtttccaaggagtataatgaatttgctgaagtatttctgaaggcatttgctgttggtgtccagcaagttttattgaaggtgttatatcagtacaaggagaagcaatatatggctcctcgagttttacaacagacattaaattatattaatcaaggagtttctcatgctctcacctggaagaatctgaagccccatatacaaggcattatccaagatgttatttttccattgatgtgctatacagatgctgatgaggaactttggcaagaagacccttacgaatatatacgcatgaagtttgatgtgtttgaagatttcatttctcctaccactgctgcccagacacttttgtttacagcctgtagtaagaggaaagaggtactgcaaaagactatgggattttgttaccagattcttacagaaccaaatgctgaccctcgaaaaaaagatggagccctgcatatgattggctctttagctgaaatacttctgaagaaaaagatctataaagatcagatggaatacatgttgcagaatcatgtattccctctcttcagcagtgaactaggctacatgagagcaagggcttgctgggtacttcactatttttgtgaagtgaagttcaaaagtgatcagaaccttcaaacagccttagagctaacaagaagatgtctgattgatgatagagaaatgcctgtgaaagtggaagctgccattgcccttcaagtattgatcagcaatcaagaaaaagctaaagaatatatcacaccattcatcagacctgtaatgcaggctcttcttcacattataagagaaacagaaaatgatgaccttaccaatgtaattcagaaaatgatctgtgaatatagtgaagaagttactcctattgcagtagaaatgacacaacatttggcaatgacatttaaccaagtaatccagacggggccagatgaagaaggtagtgatgacaaagcagttactgctatgggaattctgaatacaattgatacacttcttagtgtagttgaagatcataaagagataacccaacagcttgagggaatctgcttacaggtcattggtactgttttacaacagcatgtcttagaattctatgaggagatcttctctttagcgcacagtttgacatgtcaacaagtgtctccacagatgtggcagctactaccccttgtatttgaagtctttcagcaagatggctttgattactttacagatatgatgcccctccttcataattatgtaacagttgatacagacacacttctgtctgacaccaagtatcttgaaatgatatacagtatgtgcaaaaaggttcttacaggagttgcaggagaagatgcagagtgtcatgcagcaaaattgttagaggtcatcattctgcagtgcaaagggcgtggcattgaccagtgcattcccttattcgtggaagcagccttagaaagactgacaagagaggttaagacaagtgaacttcgaactatgtgtctgcaagttgcaattgcagctttgtattataatccacacctactactcaataccttagaaaatcttcgcttccctaataatgttgaaccagttacaaatcattttattacacagtggcttaatgatgttgactgtttcttggggcttcatgacagaaagatgtgtgttctcggactctgtgctcttattgatatggaacagataccccaagttttaaatcaggtttctggacagattttgccggcttttatccttttatttaacggattgaaaagagcatatgcctgccatgcagaacatgagaatgacagtgatgatgatgatgaagctgaagatgatgatgaaaccgaggaactggggagtgatgaagatgatattgatgaagatgggcaagaatatttggagattctggctaagcaggctggtgaagatggagatgatgaagattgggaagaagatgatgctgaagagactgctctggaaggctattccacaatcattgatgatgaagataaccctgttgatgagtatcagatatttaaagctatctttcaaactattcaaaatcgtaatcctgtgtggtatcaggcactgactcacggtcttaatgaagaacaaagaaaacagttacaggacatagcaactctggctgatcaaagaagagcagcccatgaatccaaaatgattgagaagcatggaggatacaaattcagtgctccagttgtgccaagttctttcaattttggaggcccagcaccagggatgaattgagttatctctttctttcctgctgtgtgcttgtagtgaagagcttgtgttcctcctagtagtggttccagaactggttcatgttatctattctaaactaataatcaatagatggacaaaagaaacaacaaccccaggagatgggacctgatcatgcaacctggcactggaaaagaaatcagcgggattttgggggtgggggggatgggaggtaccttagagggagtattttctttattttttgaagaaagtaagatcctgactctgaagcttcaaagtgacactgtggaaatctgaaacgaggggatgtcatgaaggcagcttttctttttctgaggaaaaaataggcatgggctacaggactatttaaaatgtctcatttacagtataaaactcaaaggtagatgtaatttttacacctatgagtatttgtccaatttctgtctcttcctcaccattgggtatctattctttatatgtaaataagataaggtcatctgatagccttattcagtcttcatcattttcatcattgttcctatgtagattattggacatttattgtagcactacataactgattataaaaatctgtaaatgaattagcactttcatattgaaacaagcctgctagcctatgtataaaatagcaaaatgtttgctgtttataaaaagatgtaatggggtggggggcaggggtaatttcaagttattaatttaaaaatgaactagcaattttgtacctggtgactttgtggtgcactcacctctgatagtgacttgaattcggtatgtaaaaaggggttagtggtatttcattgctgctaaaaatgacaactccctctgtgtcctgtttttcttaaagctgtcagtgtacaagtgggtatttgaataccagaccttactgtaaaaaataaaaaaggtggtatctagagcatgtaaattggatataaagttctgctcttaaagagttgatctaagagtatggctaaacatctatatatgcaatctattaaaagaacttaattcggctattatgtcttgatttgattgcagttttttcctaattataacaaatttttcctcattggcctgtttttaatcctgtgcctagaaggagtacaaaatgcacactttacaaaattgatatttaacacttacccactcccctttccccatctcttctaccgctcttgttgatcgtggtatctgatcttgactagataggctgaaggcacatggttccctccaaaaaccactattgataccactacaaaaacaagccagcaaaaagatactgtagagaggttggcttgcttccctctcttcctaactgcatgttgaaaaataagccgttattgatcttaaacatcggtcagatgagtcatacattgggttattttttatatacatgtatacacaaaatatttcaaattgaaagcaacatcttaatggattcaaaactattacaagctgttgtctaaaacaggtgagaaaaaaatttataactgtaaaaacaaatgcacatattgatatttaaaatgcgtaattaagaaaacccattgttgttgtgtttttcttgtataccaataattaagccactactgttggcactgtttggttttctattttaacactgaaggagtgaaagtatttcctatatttatgaatttactactaaaatcttggcaaaaaaagaaaaaaattgtctaacgtgtgtgggtgaaaactgttaatcaagtgtttctactcccccccgaaaatcccctgaaagttggacaccaactgtataccctaggttgcttaaagggatttcactattatataaagtcaataaaaatgaagtagttgtatatatgcaacattgtgtacagaggggaaataatgaatagtattaaagaaacattctcgtcttcctttacctttaatcccctaatacctagtctactttttaaattttcagacttcactgctttttgaattcataattctaattttcacattattgttaatggaaaatcatatctaataaaggttttagttattccca

SEQ ID NO: 73893 - DNA, 4912 bp, Homo sapiens
cgcgccggttgccgctgcggagcgcggcgggtccatgtgcgcagtgagtggcgctattcctggcccagtagcacccgagccccgggtttgaccgagtccgcgctgcgatggaccccaacaccattatcgaggccctgcggggcaccatggacccagccctgcgtgaggccgcggagcgccagctcaatgaagcacacaagtctctgaattttgtctcaacactgctccagattactatgtcggaacagctggatttacctgtgagacaggcaggtgttatctatctgaaaaatatgataacacagtattggcctgatcgagaaacagcaccaggggatatatccccttatactattccagaagaagatcgccattgtattcgagaaaatattgtagaagccattatccattctcctgagctcatcagggtacagcttactacatgcattcatcacatcatcaaacatgattatccaagccgctggactgccattgtggacaaaattggcttttatcttcagtccgataacagtgcttgttggctaggaattcttctttgcctttatcagcttgtgaaaaattatgagtataaaaaaccagaggagcggagtccattggtagcagcaatgcagcattttctgccagttctaaaggatcgttttatccagcttctttctgaccagtctgatcagtctgtcctcatccagaaacagatattcaagatcttctatgctcttgttcagtatacactaccactggaactgataaaccaacagaacctgacagaatggatagaaattttaaagactgttgtgaacagggatgtacctaatgaaacacttcaagttgaagaagatgatcgacctgagttaccatggtggaaatgcaagaagtgggccttacatattttagcaagactttttgaaagatatggaagccctggcaatgtttccaaggagtataatgaatttgctgaagtatttctgaaggcatttgctgttggtgtccagcaagttttattgaaggtgttatatcagtacaaggagaagcaatatatggctcctcgagttttacaacagacattaaattatattaatcaaggagtttctcatgctctcacctggaagaatctgaagccccatatacaaggcattatccaagatgttatttttccattgatgtgctatacagatgctgatgaggaactttggcaagaagacccttacgaatatatacgcatgaagtttgatgtgtttgaagatttcatttctcctaccactgctgcccagacacttttgtttacagcctgtagtaagaggaaagaggtactgcaaaagactatgggattttgttaccagattcttacagaaccaaatgctgaccctcgaaaaaaagatggagccctgcatatgattggctctttagctgaaatacttctgaagaaaaagatctataaagatcagatggaatacatgttgcagaatcatgtattccctctcttcagcagtgaactaggctacatgagagcaagggcttgctgggtacttcactatttttgtgaagtgaagttcaaaagtgatcagaaccttcaaacagccttagagctaacaagaagatgtctgattgatgatagagaaatgcctgtgaaagtggaagctgccattgcccttcaagtattgatcagcaatcaagaaaaagctaaagaatatatcacaccattcatcagacctgtaatgcaggctcttcttcacattataagagaaacagaaaatgatgaccttaccaatgtaattcagaaaatgatctgtgaatatagtgaagaagttactcctattgcagtagaaatgacacaacatttggcaatgacatttaaccaagtaatccagacggggccagatgaagaaggtagtgatgacaaagcagttactgctatgggaattctgaatacaattgatacacttcttagtgtagttgaagatcataaagagataacccaacagcttgagggaatctgcttacaggtcattggtactgttttacaacagcatgtcttagaattctatgaggagatcttctctttagcgcacagtttgacatgtcaacaagtgtctccacagatgtggcagctactaccccttgtatttgaagtctttcagcaagatggctttgattactttacagatatgatgcccctccttcataattatgtaacagttgatacagacacacttctgtctgacaccaagtatcttgaaatgatatacagtatgtgcaaaaaggttcttacaggagttgcaggagaagatgcagagtgtcatgcagcaaaattgttagaggtcatcattctgcagtgcaaagggcgtggcattgaccagtgcattcccttattcgtggaagcagccttagaaagactgacaagagaggttaagacaagtgaacttcgaactatgtgtctgcaagttgcaattgcagctttgtattataatccacacctactactcaataccttagaaaatcttcgcttccctaataatgttgaaccagttacaaatcattttattacacagtggcttaatgatgttgactgtttcttggggcttcatgacagaaagatgtgtgttctcggactctgtgctcttattgatatggaacagataccccaagttttaaatcaggtttctggacagattttgccggcttttatccttttatttaacggattgaaaagagcatatgcctgccatgcagaacatgagaatgacagtgatgatgatgatgaagctgaagatgatgatgaaaccgaggaactggggagtgatgaagatgatattgatgaagatgggcaagaatatttggagattctggctaagcaggctggtgaagatggagatgatgaagattgggaagaagatgatgctgaagagactgctctggaaggctattccacaatcattgatgatgaagataaccctgttgatgagtatcagatatttaaagctatctttcaaactattcaaaatcgtaatcctgtgtggtatcaggcactgactcacggtcttaatgaagaacaaagaaaacagttacaggacatagcaactctggctgatcaaagaagagcagcccatgaatccaaaatgattgagaagcatggaggatacaaattcagtgctccagttgtgccaagttctttcaattttggaggcccagcaccagggatgaattgagttatctctttctttcctgctgtgtgcttgtagtgaagagcttgtgttcctcctagtagtggttccagaactggttcatgttatctattctaaactaataatcaatagatggacaaaagaaacaacaaccccaggagatgggacctgatcatgcaacctggcactggaaaagaaatcagcgggattttgggggtgggggggatgggaggtaccttagagggagtattttctttattttttgaagaaagtaagatcctgactctgaagcttcaaagtgacactgtggaaatctgaaacgaggggatgtcatgaaggcagcttttctttttctgaggaaaaaataggcatgggctacaggactatttaaaatgtctcatttacagtataaaactcaaaggtagatgtaatttttacacctatgagtatttgtccaatttctgtctcttcctcaccattgggtatctattctttatatgtaaataagataaggtcatctgatagccttattcagtcttcatcattttcatcattgttcctatgtagattattggacatttattgtagcactacataactgattataaaaatctgtaaatgaattagcactttcatattgaaacaagcctgctagcctatgtataaaatagcaaaatgtttgctgtttataaaaagatgtaatggggtggggggcaggggtaatttcaagttattaatttaaaaatgaactagcaattttgtacctggtgactttgtggtgcactcacctctgatagtgacttgaattcggtatgtaaaaaggggttagtggtatttcattgctgctaaaaatgacaactccctctgtgtcctgtttttcttaaagctgtcagtgtacaagtgggtatttgaataccagaccttactgtaaaaaataaaaaaggtggtatctagagcatgtaaattggatataaagttctgctcttaaagagttgatctaagagtatggctaaacatctatatatgcaatctattaaaagaacttaattcggctattatgtcttgatttgattgcagttttttcctaattataacaaatttttcctcattggcctgtttttaatcctgtgcctagaaggagtacaaaatgcacactttacaaaattgatatttaacacttacccactcccctttccccatctcttctaccgctcttgttgatcgtggtatctgatcttgactagataggctgaaggcacatggttccctccaaaaaccactattgataccactacaaaaacaagccagcaaaaagatactgtagagaggttggcttgcttccctctcttcctaactgcatgttgaaaaataagccgttattgatcttaaacatcggtcagatgagtcatacattgggttattttttatatacatgtatacacaaaatatttcaaattgaaagcaacatcttaatggattcaaaactattacaagctgttgtctaaaacaggtgagaaaaaaatttataactgtaaaaacaaatgcacatattgatatttaaaatgcgtaattaagaaaacccattgttgttgtgtttttcttgtataccaataattaagccactactgttggcactgtttggttttctattttaacactgaaggagtgaaagtatttcctatatttatgaatttactactaaaatcttggca

SEQ ID NO: 73894 - DNA, 5352 bp, Homo sapiens
  misc_feature (5295)..(5295): n is a, c, g, or t
  misc_feature (5335)..(5338): n is a, c, g, or t
  misc_feature (5341)..(5341): n is a, c, g, or t
cgcgccggttgccgctgcggagcgcggcgggtccatgtgcgcagtgagtggcgctattcctggcccagtagcacccgagccccgggtttgaccgagtccgcgctgcgatggaccccaacaccattatcgaggccctgcggggcaccatggacccagccctgcgtgaggccgcggagcgccagctcaatgaagcacacaagtctctgaattttgtctcaacactgctccagattactatgtcggaacagctggatttacctgtgagacaggcaggtgttatctatctgaaaaatatgataacacagtattggcctgatcgagaaacagcaccaggggatatatccccttatactattccagaagaagatcgccattgtattcgagaaaatattgtagaagccattatccattctcctgagctcatcagggtacagcttactacatgcattcatcacatcatcaaacatgattatccaagccgctggactgccattgtggacaaaattggcttttatcttcagtccgataacagtgcttgttggctaggaattcttctttgcctttatcagcttgtgaaaaattatgagtataaaaaaccagaggagcggagtccattggtagcagcaatgcagcattttctgccagttctaaaggatcgttttatccagcttctttctgaccagtctgatcagtctgtcctcatccagaaacagatattcaagatcttctatgctcttgttcagtatacactaccactggaactgataaaccaacagaacctgacagaatggatagaaattttaaagactgttgtgaacagggatgtacctaatgaaacacttcaagttgaagaagatgatcgacctgagttaccatggtggaaatgcaagaagtgggccttacatattttagcaagactttttgaaagatatggaagccctggcaatgtttccaaggagtataatgaatttgctgaagtatttctgaaggcatttgctgttggtgtccagcaagttttattgaaggtgttatatcagtacaaggagaagcaatatatggctcctcgagttttacaacagacattaaattatattaatcaaggagtttctcatgctctcacctggaagaatctgaagccccatatacaaggcattatccaagatgttatttttccattgatgtgctatacagatgctgatgaggaactttggcaagaagacccttacgaatatatacgcatgaagtttgatgtgtttgaagatttcatttctcctaccactgctgcccagacacttttgtttacagcctgtagtaagaggaaagaggtactgcaaaagactatgggattttgttaccagattcttacagaaccaaatgctgaccctcgaaaaaaagatggagccctgcatatgattggctctttagctgaaatacttctgaagaaaaagatctataaagatcagatggaatacatgttgcagaatcatgtattccctctcttcagcagtgaactaggctacatgagagcaagggcttgctgggtacttcactatttttgtgaagtgaagttcaaaagtgatcagaaccttcaaacagccttagagctaacaagaagatgtctgattgatgatagagaaatgcctgtgaaagtggaagctgccattgcccttcaagtattgatcagcaatcaagaaaaagctaaagaatatatcacaccattcatcagacctgtaatgcaggctcttcttcacattataagagaaacagaaaatgatgaccttaccaatgtaattcagaaaatgatctgtgaatatagtgaagaagttactcctattgcagtagaaatgacacaacatttggcaatgacatttaaccaagtaatccagacggggccagatgaagaaggtagtgatgacaaagcagttactgctatgggaattctgaatacaattgatacacttcttagtgtagttgaagatcataaagagataacccaacagcttgagggaatctgcttacaggtcattggtactgttttacaacagcatgtcttagaattctatgaggagatcttctctttagcgcacagtttgacatgtcaacaagtgtctccacagatgtggcagctactaccccttgtatttgaagtctttcagcaagatggctttgattactttacagatatgatgcccctccttcataattatgtaacagttgatacagacacacttctgtctgacaccaagtatcttgaaatgatatacagtatgtgcaaaaaggttcttacaggagttgcaggagaagatgcagagtgtcatgcagcaaaattgttagaggtcatcattctgcagtgcaaagggcgtggcattgaccagtgcattcccttattcgtggaagcagccttagaaagactgacaagagaggttaagacaagtgaacttcgaactatgtgtctgcaagttgcaattgcagctttgtattataatccacacctactactcaataccttagaaaatcttcgcttccctaataatgttgaaccagttacaaatcattttattacacagtggcttaatgatgttgactgtttcttggggcttcatgacagaaagatgtgtgttctcggactctgtgctcttattgatatggaacagataccccaagttttaaatcaggtttctggacagattttgccggcttttatccttttatttaacggattgaaaagagcatatgcctgccatgcagaacatgagaatgacagtgatgatgatgatgaagctgaagatgatgatgaaaccgaggaactggggagtgatgaagatgatattgatgaagatgggcaagaatatttggagattctggctaagcaggctggtgaagatggagatgatgaagattgggaagaagatgatgctgaagagactgctctggaaggctattccacaatcattgatgatgaagataaccctgttgatgagtatcagatatttaaagctatctttcaaactattcaaaatcgtaatcctgtgtggtatcaggcactgactcacggtcttaatgaagaacaaagaaaacagttacaggacatagcaactctggctgatcaaagaagagcagcccatgaatccaaaatgattgagaagcatggaggatacaaattcagtgctccagttgtgccaagttctttcaattttggaggcccagcaccagggatgaattgagttatctctttctttcctgctgtgtgcttgtagtgaagagcttgtgttcctcctagtagtggttccagaactggttcatgttatctattctaaactaataatcaatagatggacaaaagaaacaacaaccccaggagatgggacctgatcatgcaacctggcactggaaaagaaatcagcgggattttgggggtgggggggatgggaggtaccttagagggagtattttctttattttttgaagaaagtaagatcctgactctgaagcttcaaagtgacactgtggaaatctgaaacgaggggatgtcatgaaggcagcttttctttttctgaggaaaaaataggcatgggctacaggactatttaaaatgtctcatttacagtataaaactcaaaggtagatgtaatttttacacctatgagtatttgtccaatttctgtctcttcctcaccattgggtatctattctttatatgtaaataagataaggtcatctgatagccttattcagtcttcatcattttcatcattgttcctatgtagattattggacatttattgtagcactacataactgattataaaaatctgtaaatgaattagcactttcatattgaaacaagcctgctagcctatgtataaaatagcaaaatgtttgctgtttataaaaagatgtaatggggtggggggcaggggtaatttcaagttattaatttaaaaatgaactagcaattttgtacctggtgactttgtggtgcactcacctctgatagtgacttgaattcggtatgtaaaaaggggttagtggtatttcattgctgctaaaaatgacaactccctctgtgtcctgtttttcttaaagctgtcagtgtacaagtgggtatttgaataccagaccttactgtaaaaaataaaaaaggtggtatctagagcatgtaaattggatataaagttctgctcttaaagagttgatctaagagtatggctaaacatctatatatgcaatctattaaaagaacttaattcggctattatgtcttgatttgattgcagttttttcctaattataacaaatttttcctcattggcctgtttttaatcctgtgcctagaaggagtacaaaatgcacactttacaaaattgatatttaacacttacccactcccctttccccatctcttctaccgctcttgttgatcgtggtatctgatcttgactagataggctgaaggcacatggttccctccaaaaaccactattgataccactacaaaaacaagccagcaaaaagatactgtagagaggttggcttgcttccctctcttcctaactgcatgttgaaaaataagccgttattgatcttaaacatcggtcagatgagtcatacattgggttattttttatatacatgtatacacaaaatatttcaaattgaaagcaacatcttaatggattcaaaactattacaagctgttgtctaaaacaggtgagaaaaaaatttataactgtaaaaacaaatgcacatattgatatttaaaatgcgtaattaagaaaacccattgttgttgtgtttttcttgtataccaataattaagccactactgttggcactgtttggttttctattttaacactgaaggagtgaaagtatttcctatatttatgaatttactactaaaatcttggcaaaaaaagaaaaaaattgtctaacgtgtgtgggtgaaaactgttaatcaagtgtttctactcccccccgaaaatcccctgaaagttggacaccaactgtataccctaggttgcttaaagggatttcactattatataaagtcaataaaaatgaagtagttgtatatatgcaacattgtgtacagaggggaaataatgaatagtattaaagaaacattctcgtcttcctttacctttaatcccctaatacctagtctactttttaaattttcagacttcactgctttttgaattcataattctaattttcacattattgttaatggaaaatcatatctaataaaggttttagttattcccaaaaaaaaaaaaaaaaaaaaaaaanaaaaaaaaaaaaaaaaaaacaaacaaataaaaaaaaaaannnnaancagaaaaaaaa

SEQ ID NO: 73895 - DNA, 5164 bp, Homo sapiens
  misc_feature (5107)..(5107): n is a, c, g, or t
  misc_feature (5147)..(5150): n is a, c, g, or t
  misc_feature (5153)..(5153): n is a, c, g, or t
cgcgccggttgccgctgcggagcgcggcgggtccatgtgcgcagtgagtggcgctattcctggcccagtagcacccgagccccgggtttgaccgagtccgcgctgcgatggaccccaacaccattatcgaggccctgcggggcaccatggacccagccctgcgtgaggccgcggagcgccagctcaatgaagcacacaagtctctgaattttgtctcaacactgctccagattactatgtcggaacagctggatttacctgtgagacaggcaggtgttatctatctgaaaaatatgataacacagtattggcctgatcgagaaacagcaccaggggatatatccccttatactattccagaagaagatcgccattgtattcgagaaaatattgtagaagccattatccattctcctgagctcatcagggtacagcttactacatgcattcatcacatcatcaaacatgattatccaagccgctggactgccattgtggacaaaattggcttttatcttcagtccgataacagtgcttgttggctaggaattcttctttgcctttatcagcttgtgaaaaattatgagtataaaaaaccagaggagcggagtccattggtagcagcaatgcagcattttctgccagttctaaaggatcgttttatccagcttctttctgaccagtctgatcagtctgtcctcatccagaaacagatattcaagatcttctatgctcttgttcagtatacactaccactggaactgataaaccaacagaacctgacagaatggatagaaattttaaagactgttgtgaacagggatgtacctaatgaaacacttcaagttgaagaagatgatcgacctgagttaccatggtggaaatgcaagaagtgggccttacatattttagcaagactttttgaaagatatggaagccctggcaatgtttccaaggagtataatgaatttgctgaagtatttctgaaggcatttgctgttggtgtccagcaagttttattgaaggtgttatatcagtacaaggagaagcaatatatggctcctcgagttttacaacagacattaaattatattaatcaaggagtttctcatgctctcacctggaagaatctgaagccccatatacaaggcattatccaagatgttatttttccattgatgtgctatacagatgctgatgaggaactttggcaagaagacccttacgaatatatacgcatgaagtttgatgtgtttgaagatttcatttctcctaccactgctgcccagacacttttgtttacagcctgtagtaagaggaaagaggtactgcaaaagactatgggattttgttaccagattcttacagaaccaaatgctgaccctcgaaaaaaagatggagccctgcatatgattggctctttagctgaaatacttctgaagaaaaagatctataaagatcagatggaatacatgttgcagaatcatgtattccctctcttcagcagtgaactaggctacatgagagcaagggcttgctgggtacttcactatttttgtgaagtgaagttcaaaagtgatcagaaccttcaaacagccttagagctaacaagaagatgtctgattgatgatagagaaatgcctgtgaaagtggaagctgccattgcccttcaagtattgatcagcaatcaagaaaaagctaaagaatatatcacaccattcatcagacctgtaatgcaggctcttcttcacattataagagaaacagaaaatgatgaccttaccaatgtaattcagaaaatgatctgtgaatatagtgaagaagttactcctattgcagtagaaatgacacaacatttggcaatgacatttaaccaagtaatccagacggggccagatgaagaaggtagtgatgacaaagcagttactgctatgggaattctgaatacaattgatacacttcttagtgtagttgaagatcataaagagataacccaacagcttgagggaatctgcttacaggtcattggtactgttttacaacagcatgtcttagaattctatgaggagatcttctctttagcgcacagtttgacatgtcaacaagtgtctccacagatgtggcagctactaccccttgtatttgaagtctttcagcaagatggctttgattactttacagatatgatgcccctccttcataattatgtaacagttgatacagacacacttctgtctgacaccaagtatcttgaaatgatatacagtatgtgcaaaaaggttcttacaggagttgcaggagaagatgcagagtgtcatgcagcaaaattgttagaggtcatcattctgcagtgcaaagggcgtggcattgaccagtgcattcccttattcgtggaagcagccttagaaagactgacaagagaggttaagacaagtgaacttcgaactatgtgtctgcaagttgcaattgcagctttgtattataatccacacctactactcaataccttagaaaatcttcgcttccctaataatgttgaaccagttacaaatcattttattacacagtggcttaatgatgttgactgtttcttggggcttcatgacagaaagatgtgtgttctcggactctgtgctcttattgatatggaacagataccccaagttttaaatcaggtttctggacagattttgccggcttttatccttttatttaacggattgaaaagagcatatgcctgccatgcagaacatgagaatgacagtgatgatgatgatgaagctgaagatgatgatgaaaccgaggaactggggagtgatgaagatgatattgatgaagatgggcaagaatatttggagattctggctaagcaggctggtgaagatggagatgatgaagattgggaagaagatgatgctgaagagactgctctggaaggctattccacaatcattgatgatgaagataaccctgttgatgagtatcagatatttaaagctatctttcaaactattcaaaatcgtaatcctgtgtggtatcaggcactgactcacggtcttaatgaagaacaaagaaaacagttacaggacatagcaactctggctgatcaaagaagagcagcccatgaatccaaaatgattgagaagcatggaggatacaaattcagtgctccagttgtgccaagttctttcaattttggaggcccagcaccagggatgaattgagttatctctttctttcctgctgtgtgcttgtagtgaagagcttgtgttcctcctagtagtggttccagaactggttcatgttatctattctaaactaataatcaatagatggacaaaagaaacaacaaccccaggagatgggacctgatcatgcaacctggcactggaaaagaaatcagcgggattttgggggtgggggggatgggaggtaccttagagggagtattttctttattttttgaagaaagtaagatcctgactctgaagcttcaaagtgacactgtggaaatctgaaacgaggggatgtcatgaaggcagcttttctttttctgaggaaaaaataggcatgggctacaggactatttaaaatgtctcatttacagtataaaactcaaaggtagatgtaatttttacacctatgagtatttgtccaatttctgtctcttcctcaccattgggtatctattctttatatgtaaataagataaggtcatctgatagccttattcagtcttcatcattttcatcattgttcctatgtagattattggacatttattgtagcactacataactgattataaaaatctgtaaatgaattagcactttcatattgaaacaagcctgctagcctatgtataaaatagcaaaatgtttgctgtttataaaaagatgtaatggggtggggggcaggggtaatttcaagttattaatttaaaaatgaactagcaattttgtacctggtgactttgtggtgcactcacctctgatagtgacttgaattcggtatgtaaaaaggggttagtggtatttcattgctgctaaaaatgacaactccctctgtgtcctgtttttcttaaagctgtcagtgtacaagtgggtatttgaataccagaccttactgtaaaaaataaaaaaggtggtatctagagcatgtaaattggatataaagttctgctcttaaagagttgatctaagagtatggctaaacatctatatatgcaatctattaaaagaacttaattcggctattatgtcttgatttgattgcagttttttcctaattataacaaatttttcctcattggcctgtttttaatcctgtgcctagaaggagtacaaaatgcacactttacaaaattgatatttaacacttacccactcccctttccccatctcttctaccgctcttgttgatcgtggtatctgatcttgactagataggctgaaggcacatggttccctccaaaaaccactattgataccactacaaaaacaagccagcaaaaagatactgtagagaggttggcttgcttccctctcttcctaactgcatgttgaaaaataagccgttattgatcttaaacatcggtcagatgagtcatacattgggttattttttatatacatgtatacacaaaatatttcaaattgaaagcaacatcttaatggattcaaaactattacaagctgttgtctaaaacaggtgagaaaaaaatttataactgtaaaaacaaatgcacatattgatatttaaaatgcgtaattaagaaaacccattgttgttgtgtttttcttgtataccaataattaagccactactgttggcactgtttggttttctattttaacactgaaggagtgaaagtatttcctatatttatgaatttactactaaaatcttggcaaaaaaagaaaaaaattgtctaacgtgtgtgggtgaaaactgttaatcaagtgtttctactcccccccgaaaatcccctgaaagttggacaccaactgtataccctaggttgcttaaagggatttcactattatataaagtcaataaaaatgaagtagttgtatatatgcaaaaaaaaaaaaaaaaaaaaaaaaanaaaaaaaaaaaaaaaaaaacaaacaaataaaaaaaaaaannnnaancagaaaaaaaa

SEQ ID NO: 73896 - DNA, 5172 bp, Homo sapiens
agcaagactccatctcaaaaaaaaaaaggccagcattagtgaagcattcacatttttgtcaatctattctcatctcatgctgttcctcctatattgtattatctctatcattaaataagtgtctttttaaaggaaacacttcaagttgaagaagatgatcgacctgagttaccatggtggaaatgcaagaagtgggccttacatattttagcaagactttttgaaagatatggaagccctggcaatgtttccaaggagtataatgaatttgctgaagtatttctgaaggcatttgctgttggtgtccagcaagttttattgaaggtgttatatcagtacaaggagaagcaatatatggctcctcgagttttacaacagacattaaattatattaatcaaggagtttctcatgctctcacctggaagaatctgaagccccatatacaaggcattatccaagatgttatttttccattgatgtgctatacagatgctgatgaggaactttggcaagaagacccttacgaatatatacgcatgaagtttgatgtgtttgaagatttcatttctcctaccactgctgcccagacacttttgtttacagcctgtagtaagaggaaagaggtactgcaaaagactatgggattttgttaccagattcttacagaaccaaatgctgaccctcgaaaaaaagatggagccctgcatatgattggctctttagctgaaatacttctgaagaaaaagatctataaagatcagatggaatacatgttgcagaatcatgtattccctctcttcagcagtgaactaggctacatgagagcaagggcttgctgggtacttcactatttttgtgaagtgaagttcaaaagtgatcagaaccttcaaacagccttagagctaacaagaagatgtctgattgatgatagagaaatgcctgtgaaagtggaagctgccattgcccttcaagtattgatcagcaatcaagaaaaagctaaagaatatatcacaccattcatcagacctgtaatgcaggctcttcttcacattataagagaaacagaaaatgatgaccttaccaatgtaattcagaaaatgatctgtgaatatagtgaagaagttactcctattgcagtagaaatgacacaacatttggcaatgacatttaaccaagtaatccagacggggccagatgaagaaggtagtgatgacaaagcagttactgctatgggaattctgaatacaattgatacacttcttagtgtagttgaagatcataaagagataacccaacagcttgagggaatctgcttacaggtcattggtactgttttacaacagcatgtcttagaattctatgaggagatcttctctttagcgcacagtttgacatgtcaacaagtgtctccacagatgtggcagctactaccccttgtatttgaagtctttcagcaagatggctttgattactttacagatatgatgcccctccttcataattatgtaacagttgatacagacacacttctgtctgacaccaagtatcttgaaatgatatacagtatgtgcaaaaaggttcttacaggagttgcaggagaagatgcagagtgtcatgcagcaaaattgttagaggtcatcattctgcagtgcaaagggcgtggcattgaccagtgcattcccttattcgtggaagcagccttagaaagactgacaagagaggttaagacaagtgaacttcgaactatgtgtctgcaagttgcaattgcagctttgtattataatccacacctactactcaataccttagaaaatcttcgcttccctaataatgttgaaccagttacaaatcattttattacacagtggcttaatgatgttgactgtttcttggggcttcatgacagaaagatgtgtgttctcggactctgtgctcttattgatatggaacagataccccaagttttaaatcaggtttctggacagattttgccggcttttatccttttatttaacggattgaaaagagcatatgcctgccatgcagaacatgagaatgacagtgatgatgatgatgaagctgaagatgatgatgaaaccgaggaactggggagtgatgaagatgatattgatgaagatgggcaagaatatttggagattctggctaagcaggctggtgaagatggagatgatgaagattgggaagaagatgatgctgaagagactgctctggaaggctattccacaatcattgatgatgaagataaccctgttgatgagtatcagatatttaaagctatctttcaaactattcaaaatcgtaatcctgtgtggtatcaggcactgactcacggtcttaatgaagaacaaagaaaacagttacaggacatagcaactctggctgatcaaagaagagcagcccatgaatccaaaatgattgagaagcatggaggatacaaattcagtgctccagttgtgccaagttctttcaattttggaggcccagcaccagggatgaattgagttatctctttctttcctgctgtgtgcttgtagtgaagagcttgtgttcctcctagtagtggttccagaactggttcatgttatctattctaaactaataatcaatagatggacaaaagaaacaacaaccccaggagatgggacctgatcatgcaacctggcactggaaaagaaatcagcgggattttgggggtgggggggatgggaggtaccttagagggagtattttctttattttttgaagaaagtaagatcctgactctgaagcttcaaagtgacactgtggaaatctgaaacgaggggatgtcatgaaggcagcttttctttttctgaggaaaaaataggcatgggctacaggactatttaaaatgtctcatttacagtataaaactcaaaggtagatgtaatttttacacctatgagtatttgtccaatttctgtctcttcctcaccattgggtatctattctttatatgtaaataagataaggtcatctgatagccttattcagtcttcatcattttcatcattgttcctatgtagattattggacatttattgtagcactacataactgattataaaaatctgtaaatgaattagcactttcatattgaaacaagcctgctagcctatgtataaaatagcaaaatgtttgctgtttataaaaagatgtaatggggtggggggcaggggtaatttcaagttattaatttaaaaatgaactagcaattttgtacctggtgactttgtggtgcactcacctctgatagtgacttgaattcggtatgtaaaaaggggttagtggtatttcattgctgctaaaaatgacaactccctctgtgtcctgtttttcttaaagctgtcagtgtacaagtgggtatttgaataccagaccttactgtaaaaaataaaaaaggtggtatctagagcatgtaaattggatataaagttctgctcttaaagagttgatctaagagtatggctaaacatctatatatgcaatctattaaaagaacttaattcggctattatgtcttgatttgattgcagttttttcctaattataacaaatttttcctcattggcctgtttttaatcctgtgcctagaaggagtacaaaatgcacactttacaaaattgatatttaacacttacccactcccctttccccatctcttctaccgctcttgttgatcgtggtatctgatcttgactagataggctgaaggcacatggttccctccaaaaaccactattgataccactacaaaaacaagccagcaaaaagatactgtagagaggttggcttgcttccctctcttcctaactgcatgttgaaaaataagccgttattgatcttaaacatcggtcagatgagtcatacattgggttattttttatatacatgtatacacaaaatatttcaaattgaaagcaacatcttaatggattcaaaactattacaagctgttgtctaaaacaggtgagaaaaaaatttataactgtaaaaacaaatgcacatattgatatttaaaatgcgtaattaagaaaacccattgttgttgtgtttttcttgtataccaataattaagccactactgttggcactgtttggttttctattttaacactgaaggagtgaaagtatttcctatatttatgaatttactactaaaatcttggcaaaaaaagaaaaaaattgtctaacgtgtgtgggtgaaaactgttaatcaagtgtttctactcccccccgaaaatcccctgaaagttggacaccaactgtataccctaggttgcttaaagggatttcactattatataaagtcaataaaaatgaagtagttgtatatatgcaacattgtgtacagaggggaaataatgaatagtattaaagaaacattctcgtcttcctttacctttaatcccctaatacctagtctactttttaaattttcagacttcactgctttttgaattcataattctaattttcacattattgttaatggaaaatcatatctaataaaggttttagttattcccatgcacagtatgaaaattctcatttgctgaggttttgtttcaagaaaatgtattggcatgtctttgagaacatgttttattgtctcctgtgtcatataatccaaactaatctccgtttacagactttaacttgaaattagaccttataattaaactatttaaatagtgttcaaatgatagtttctaatgcatcaaatatatacctcagttttcatgatttcctttaacattataatttggtatagatcaagaatcttaacatgtatcagtttctagatgaggctgcaggatttttggaaaactttttgaatgtatttacaatattctcttgtaattagctacatagggacttgtctttttttctttttacatacagcttttcctacagttttattaccctgtaatttttttttagttgtagaagttaattctgattttgtgtggatttcagtatttgtctttgttaatggcacatattagcataaatcacttttgtaaatgtaagctttctttttttttcttgaaaaagcctttctatttatcagtattaaataaaggaagttaatctgtttctctgcaggtaataaaatagtgacacactgt

SEQ ID NO: 73897 - DNA, 5073 bp, Homo sapiens
cgcgccggttgccgctgcggagcgcggcgggtccatgtgcgcagtgagtggcgctattcctggcccagtagcacccgagccccgggtttgaccgagtccgcgctgcgatggaccccaacaccattatcgaggccctgcggggcaccatggacccagccctgcgtgaggccgcggagcgccagctcaatgaagcacacaagtctctgaattttgtctcaacactgctccagattactatgtcggaacagctggatttacctgtgagacaggcaggtgttatctatctgaaaaatatgataacacagtattggcctgatcgagaaacagcaccaggggatatatccccttatactattccagaagaagatcgccattgtattcgagaaaatattgtagaagccattatccattctcctgagctcatcagggtacagcttactacatgcattcatcacatcatcaaacatgattatccaagccgctggactgccattgtggacaaaattggcttttatcttcagtccgataacagtgcttgttggctaggaattcttctttgcctttatcagcttgtgaaaaattatgagtataaaaaaccagaggagcggagtccattggtagcagcaatgcagcattttctgccagttctaaaggatcgttttatccagcttctttctgaccagtctgatcagtctgtcctcatccagaaacagatattcaagatcttctatgctcttgttcagtatacactaccactggaactgataaaccaacagaacctgacagaatggatagaaattttaaagactgttgtgaacagggatgtacctaatgaaacacttcaagttgaagaagatgatcgacctgagttaccatggtggaaatgcaagaagtgggccttacatattttagcaagactttttgaaagatatggaagccctggcaatgtttccaaggagtataatgaatttgctgaagtatttctgaaggcatttgctgttggtgtccagcaagttttattgaaggtgttatatcagtacaaggagaagcaatatatggctcctcgagttttacaacagacattaaattatattaatcaaggagtttctcatgctctcacctggaagaatctgaagccccatatacaaggcattatccaagatgttatttttccattgatgtgctatacagatgctgatgaggaactttggcaagaagacccttacgaatatatacgcatgaagtttgatgtgtttgaagatttcatttctcctaccactgctgcccagacacttttgtttacagcctgtagtaagaggaaagaggtactgcaaaagactatgggattttgttaccagattcttacagaaccaaatgctgaccctcgaaaaaaagatggagccctgcatatgattggctctttagctgaaatacttctgaagaaaaagatctataaagatcagatggaatacatgttgcagaatcatgtattccctctcttcagcagtgaactaggctacatgagagcaagggcttgctgggtacttcactatttttgtgaagtgaagttcaaaagtgatcagaaccttcaaacagccttagagctaacaagaagatgtctgattgatgatagagaaatgcctgtgaaagtggaagctgccattgcccttcaagtattgatcagcaatcaagaaaaagctaaagaatatatcacaccattcatcagacctgtaatgcaggctcttcttcacattataagagaaacagaaaatgatgaccttaccaatgtaattcagaaaatgatctgtgaatatagtgaagaagttactcctattgcagtagaaatgacacaacatttggcaatgacatttaaccaagtaatccagacggggccagatgaagaaggtagtgatgacaaagcagttactgctatgggaattctgaatacaattgatacacttcttagtgtagttgaagatcataaagagataacccaacagcttgagggaatctgcttacaggtcattggtactgttttacaacagcatgtcttagaattctatgaggagatcttctctttagcgcacagtttgacatgtcaacaagtgtctccacagatgtggcagctactaccccttgtatttgaagtctttcagcaagatggctttgattactttacagatatgatgcccctccttcataattatgtaacagttgatacagacacacttctgtctgacaccaagtatcttgaaatgatatacagtatgtgcaaaaaggttcttacaggagttgcaggagaagatgcagagtgtcatgcagcaaaattgttagaggtcatcattctgcagtgcaaagggcgtggcattgaccagtgcattcccttattcgtggaagcagccttagaaagactgacaagagaggttaagacaagtgaacttcgaactatgtgtctgcaagttgcaattgcagctttgtattataatccacacctactactcaataccttagaaaatcttcgcttccctaataatgttgaaccagttacaaatcattttattacacagtggcttaatgatgttgactgtttcttggggcttcatgacagaaagatgtgtgttctcggactctgtgctcttattgatatggaacagataccccaagttttaaatcaggtttctggacagattttgccggcttttatccttttatttaacggattgaaaagagcatatgcctgccatgcagaacatgagaatgacagtgatgatgatgatgaagctgaagatgatgatgaaaccgaggaactggggagtgatgaagatgatattgatgaagatgggcaagaatatttggagattctggctaagcaggctggtgaagatggagatgatgaagattgggaagaagatgatgctgaagagactgctctggaaggctattccacaatcattgatgatgaagataaccctgttgatgagtatcagatatttaaagctatctttcaaactattcaaaatcgtaatcctgtgtggtatcaggcactgactcacggtcttaatgaagaacaaagaaaacagttacaggacatagcaactctggctgatcaaagaagagcagcccatgaatccaaaatgattgagaagcatggaggatacaaattcagtgctccagttgtgccaagttctttcaattttggaggcccagcaccagggatgaattgagttatctctttctttcctgctgtgtgcttgtagtgaagagcttgtgttcctcctagtagtggttccagaactggttcatgttatctattctaaactaataatcaatagatggacaaaagaaacaacaaccccaggagatgggacctgatcatgcaacctggcactggaaaagaaatcagcgggattttgggggtgggggggatgggaggtaccttagagggagtattttctttattttttgaagaaagtaagatcctgactctgaagcttcaaagtgacactgtggaaatctgaaacgaggggatgtcatgaaggcagcttttctttttctgaggaaaaaataggcatgggctacaggactatttaaaatgtctcatttacagtataaaactcaaaggtagatgtaatttttacacctatgagtatttgtccaatttctgtctcttcctcaccattgggtatctattctttatatgtaaataagataaggtcatctgatagccttattcagtcttcatcattttcatcattgttcctatgtagattattggacatttattgtagcactacataactgattataaaaatctgtaaatgaattagcactttcatattgaaacaagcctgctagcctatgtataaaatagcaaaatgtttgctgtttataaaaagatgtaatggggtggggggcaggggtaatttcaagttattaatttaaaaatgaactagcaattttgtacctggtgactttgtggtgcactcacctctgatagtgacttgaattcggtatgtaaaaaggggttagtggtatttcattgctgctaaaaatgacaactccctctgtgtcctgtttttcttaaagctgtcagtgtacaagtgggtatttgaataccagaccttactgtaaaaaataaaaaaggtggtatctagagcatgtaaattggatataaagttctgctcttaaagagttgatctaagagtatggctaaacatctatatatgcaatctattaaaagaacttaattcggctattatgtcttgatttgattgcagttttttcctaattataacaaatttttcctcattggcctgtttttaatcctgtgcctagaaggagtacaaaatgcacactttacaaaattgatatttaacacttacccactcccctttccccatctcttctaccgctcttgttgatcgtggtatctgatcttgactagataggctgaaggcacatggttccctccaaaaaccactattgataccactacaaaaacaagccagcaaaaagatactgtagagaggttggcttgcttccctctcttcctaactgcatgttgaaaaataagccgttattgatcttaaacatcggtcagatgagtcatacattgggttattttttatatacatgtatacacaaaatatttcaaattgaaagcaacatcttaatggattcaaaactattacaagctgttgtctaaaacaggtgagaaaaaaatttataactgtaaaaacaaatgcacatattgatatttaaaatgcgtaattaagaaaacccattgttgttgtgtttttcttgtataccaataattaagccactactgttggcactgtttggttttctattttaacactgaaggagtgaaagtatttcctatatttatgaattctacctaaatctgccaaacagaaaaatgtctacgttgtggtgaaccgttaccaagggttttttcccccgaaatcccgaagtgggccctgttccccgtgctaggggctcaatttaggcaaaaagaaggttttgtcatgtcgggggaaaaaaaaaaaacgctttatcccacaactataaagg

SEQ ID NO: 73898 - DNA, 2457 bp, Homo sapiens
aggagttacgatatcgtcgaccacgcgctcctattttctttattttttgaagaaagtaagatcctgactctgaagcttcaaagtgacactgtggaaatctgaaacgaggggatgtcatgaaggcagcttttctttttctgaggaaaaaataggcatgggctacaggactatttaaaatgtctcatttacagtataaaactcaaaggtagatgtaatttttacacctatgagtatttgtccaatttctgtctcttcctcaccattgggtatctattctttatatgtaaataagataaggtcatctgatagccttattcagtcttcatcattttcatcattgttcctatgtagattattggacatttattgtagcactacataactgattataaaaatctgtaaatgaattagcactttcatattgaaacaagcctgctagcctatgtataaaatagcaaaatgtttgctgtttataaaaagatgtaatggggtggggggcaggggtaatttcaagttattaatttaaaaatgaactagcaattttgtacctggtgactttgtggtgcactcacctctgatagtgacttgaattcggtatgtaaaaaggggttagtggtatttcattgctgctaaaaatgacaactccctctgtgtcctgtttttcttaaagctgtcagtgtacaagtgggtatttgaataccagaccttactgtaaaaaataaaaaaggtggtatctagagcatgtaaattggatataaagttctgctcttaaagagttgatctaagagtatggctaaacatctatatatgcaatctattaaaagaacttaattcggctattatgtcttgatttgattgcagttttttcctaattataacaaatttttcctcattggcctgtttttaatcctgtgcctagaaggagtacaaaatgcacactttacaaaattgatatttaacacttacccactcccctttccccatctcttctaccgctcttgttgatcgtggtatctgatcttgactagataggctgaaggcacatggttccctccaaaaaccactattgataccactacaaaaacaagccagcaaaaagatactgtagagaggttggcttgcttccctctcttcctaactgcatgttgaaaaataagccgttattgatcttaaacatcggtcagatgagtcatacattgggttattttttatatacatgtatacacaaaatatttcaaattgaaagcaacatcttaatggattcaaaactattacaagctgttgtctaaaacaggtgagaaaaaaatttataactgtaaaaacaaatgcacatattgatatttaaaatgcgtaattaagaaaacccattgttgttgtgtttttcttgtataccaataattaagccactactgttggcactgtttggttttctattttaacactgaaggagtgaaagtatttcctatatttatgaatttactactaaaatcttggcaaaaaaagaaaaaaattgtctaacgtgtgtgggtgaaaactgttaatcaagtgtttctactcccccccgaaaatcccctgaaagttggacaccaactgtataccctaggttgcttaaagggatttcactattatataaagtcaataaaaatgaagtagttgtatatatgcaacattgtgtacagaggggaaataatgaatagtattaaagaaacattctcgtcttcctttacctttaatcccctaatacctagtctactttttaaattttcagacttcactgctttttgaattcataattctaattttcacattattgttaatggaaaatcatatctaataaaggttttagttattcccatgcacagtatgaaaattctcatttgctgaggttttgtttcaagaaaatgtattggcatgtctttgagaacatgttttattgtctcctgtgtcatataatccaaactaatctccgtttacagactttaacttgaaattagaccttataattaaactatttaaatagtgttcaaatgatagtttctaatgcatcaaatatatacctcagttttcatgatttcctttaacattataatttggtatagatcaagaatcttaacatgtatcagtttctagatgaggctgcaggatttttggaaaactttttgaatgtatttacaatattctcttgtaattagctacatagggacttgtctttttttctttttacatacagcttttcctacagttttattaccctgtaatttttttttagttgtagaagttaattctgattttgtgtggatttcagtatttgtctttgttaatggcacatattagcataaatcacttttgtaaatgtaagctttctttttttttcttgaaaaagcctttctatttatcagtattaaataaaggaagttaatctgtttctctgcaggtaataaaatagtgacacactgt

SEQ ID NO: 73899 - DNA, 2432 bp, Homo sapiens
cgagctcggtacccacctgagtcgaagaaagtaagatcctgactctgaagcttcaaagtgacactgtggaaatctgaaacgaggggatgtcatgaaggcagcttttctttttctgaggaaaaaataggcatgggctacaggactatttaaaatgtctcatttacagtataaaactcaaaggtagatgtaatttttacacctatgagtatttgtccaatttctgtctcttcctcaccattgggtatctattctttatatgtaaataagataaggtcatctgatagccttattcagtcttcatcattttcatcattgttcctatgtagattattggacatttattgtagcactacataactgattataaaaatctgtaaatgaattagcactttcatattgaaacaagcctgctagcctatgtataaaatagcaaaatgtttgctgtttataaaaagatgtaatggggtggggggcaggggtaatttcaagttattaatttaaaaatgaactagcaattttgtacctggtgactttgtggtgcactcacctctgatagtgacttgaattcggtatgtaaaaaggggttagtggtatttcattgctgctaaaaatgacaactccctctgtgtcctgtttttcttaaagctgtcagtgtacaagtgggtatttgaataccagaccttactgtaaaaaataaaaaaggtggtatctagagcatgtaaattggatataaagttctgctcttaaagagttgatctaagagtatggctaaacatctatatatgcaatctattaaaagaacttaattcggctattatgtcttgatttgattgcagttttttcctaattataacaaatttttcctcattggcctgtttttaatcctgtgcctagaaggagtacaaaatgcacactttacaaaattgatatttaacacttacccactcccctttccccatctcttctaccgctcttgttgatcgtggtatctgatcttgactagataggctgaaggcacatggttccctccaaaaaccactattgataccactacaaaaacaagccagcaaaaagatactgtagagaggttggcttgcttccctctcttcctaactgcatgttgaaaaataagccgttattgatcttaaacatcggtcagatgagtcatacattgggttattttttatatacatgtatacacaaaatatttcaaattgaaagcaacatcttaatggattcaaaactattacaagctgttgtctaaaacaggtgagaaaaaaatttataactgtaaaaacaaatgcacatattgatatttaaaatgcgtaattaagaaaacccattgttgttgtgtttttcttgtataccaataattaagccactactgttggcactgtttggttttctattttaacactgaaggagtgaaagtatttcctatatttatgaatttactactaaaatcttggcaaaaaaagaaaaaaattgtctaacgtgtgtgggtgaaaactgttaatcaagtgtttctactcccccccgaaaatcccctgaaagttggacaccaactgtataccctaggttgcttaaagggatttcactattatataaagtcaataaaaatgaagtagttgtatatatgcaacattgtgtacagaggggaaataatgaatagtattaaagaaacattctcgtcttcctttacctttaatcccctaatacctagtctactttttaaattttcagacttcactgctttttgaattcataattctaattttcacattattgttaatggaaaatcatatctaataaaggttttagttattcccatgcacagtatgaaaattctcatttgctgaggttttgtttcaagaaaatgtattggcatgtctttgagaacatgttttattgtctcctgtgtcatataatccaaactaatctccgtttacagactttaacttgaaattagaccttataattaaactatttaaatagtgttcaaatgatagtttctaatgcatcaaatatatacctcagttttcatgatttcctttaacattataatttggtatagatcaagaatcttaacatgtatcagtttctagatgaggctgcaggatttttggaaaactttttgaatgtatttacaatattctcttgtaattagctacatagggacttgtctttttttctttttacatacagcttttcctacagttttattaccctgtaatttttttttagttgtagaagttaattctgattttgtgtggatttcagtatttgtctttgttaatggcacatattagcataaatcacttttgtaaatgtaagctttctttttttttcttgaaaaagcctttctatttatcagtattaaataaaggaagttaatctgtttctctgcaggtaataaaatagtgacacactgt

SEQ ID NO: 73900 - DNA, 4278 bp, Homo sapiens
  misc_feature (4271)..(4271): n is a, c, g, or t
cgcgccggttgccgctgcggagcgcggcgggtccatgtgcgcagtgagtggcgctattcctggcccagtagcacccgagccccgggtttgaccgagtccgcgctgcgatggaccccaacaccattatcgaggccctgcggggcaccatggacccagccctgcgtgaggccgcggagcgccagctcaatgaagcacacaagtctctgaattttgtctcaacactgctccagattactatgtcggaacagctggatttacctgtgagacaggcaggtgttatctatctgaaaaatatgataacacagtattggcctgatcgagaaacagcaccaggggatatatccccttatactattccagaagaagatcgccattgtattcgagaaaatattgtagaagccattatccattctcctgagctcatcagggtacagcttactacatgcattcatcacatcatcaaacatgattatccaagccgctggactgccattgtggacaaaattggcttttatcttcagtccgataacagtgcttgttggctaggaattcttctttgcctttatcagcttgtgaaaaattatgagtataaaaaaccagaggagcggagtccattggtagcagcaatgcagcattttctgccagttctaaaggatcgttttatccagcttctttctgaccagtctgatcagtctgtcctcatccagaaacagatattcaagatcttctatgctcttgttcagtatacactaccactggaactgataaaccaacagaacctgacagaatggatagaaattttaaagactgttgtgaacagggatgtacctaatgaaacacttcaagttgaagaagatgatcgacctgagttaccatggtggaaatgcaagaagtgggccttacatattttagcaagactttttgaaagatatggaagccctggcaatgtttccaaggagtataatgaatttgctgaagtatttctgaaggcatttgctgttggtgtccagcaagttttattgaaggtgttatatcagtacaaggagaagcaatatatggctcctcgagttttacaacagacattaaattatattaatcaaggagtttctcatgctctcacctggaagaatctgaagccccatatacaaggcattatccaagatgttatttttccattgatgtgctatacagatgctgatgaggaactttggcaagaagacccttacgaatatatacgcatgaagtttgatgtgtttgaagatttcatttctcctaccactgctgcccagacacttttgtttacagcctgtagtaagaggaaagaggtactgcaaaagactatgggattttgttaccagattcttacagaaccaaatgctgaccctcgaaaaaaagatggagccctgcatatgattggctctttagctgaaatacttctgaagaaaaagatctataaagatcagatggaatacatgttgcagaatcatgtattccctctcttcagcagtgaactaggctacatgagagcaagggcttgctgggtacttcactatttttgtgaagtgaagttcaaaagtgatcagaaccttcaaacagccttagagctaacaagaagatgtctgattgatgatagagaaatgcctgtgaaagtggaagctgccattgcccttcaagtattgatcagcaatcaagaaaaagctaaagaatatatcacaccattcatcagacctgtaatgcaggctcttcttcacattataagagaaacagaaaatgatgaccttaccaatgtaattcagaaaatgatctgtgaatatagtgaagaagttactcctattgcagtagaaatgacacaacatttggcaatgacatttaaccaagtaatccagacggggccagatgaagaaggtagtgatgacaaagcagttactgctatgggaattctgaatacaattgatacacttcttagtgtagttgaagatcataaagagataacccaacagcttgagggaatctgcttacaggtcattggtactgttttacaacagcatgtcttagaattctatgaggagatcttctctttagcgcacagtttgacatgtcaacaagtgtctccacagatgtggcagctactaccccttgtatttgaagtctttcagcaagatggctttgattactttacagatatgatgcccctccttcataattatgtaacagttgatacagacacacttctgtctgacaccaagtatcttgaaatgatatacagtatgtgcaaaaaggttcttacaggagttgcaggagaagatgcagagtgtcatgcagcaaaattgttagaggtcatcattctgcagtgcaaagggcgtggcattgaccagtgcattcccttattcgtggaagcagccttagaaagactgacaagagaggttaagacaagtgaacttcgaactatgtgtctgcaagttgcaattgcagctttgtattataatccacacctactactcaataccttagaaaatcttcgcttccctaataatgttgaaccagttacaaatcattttattacacagtggcttaatgatgttgactgtttcttggggcttcatgacagaaagatgtgtgttctcggactctgtgctcttattgatatggaacagataccccaagttttaaatcaggtttctggacagattttgccggcttttatccttttatttaacggattgaaaagagcatatgcctgccatgcagaacatgagaatgacagtgatgatgatgatgaagctgaagatgatgatgaaaccgaggaactggggagtgatgaagatgatattgatgaagatgggcaagaatatttggagattctggctaagcaggctggtgaagatggagatgatgaagattgggaagaagatgatgctgaagagactgctctggaaggctattccacaatcattgatgatgaagataaccctgttgatgagtatcagatatttaaagctatctttcaaactattcaaaatcgtaatcctgtgtggtatcaggcactgactcacggtcttaatgaagaacaaagaaaacagttacaggacatagcaactctggctgatcaaagaagagcagcccatgaatccaaaatgattgagaagcatggaggatacaaattcagtgctccagttgtgccaagttctttcaattttggaggcccagcaccagggatgaattgagttatctctttctttcctgctgtgtgcttgtagtgaagagcttgtgttcctcctagtagtggttccagaactggttcatgttatctattctaaactaataatcaatagatggacaaaagaaacaacaaccccaggagatgggacctgatcatgcaacctggcactggaaaagaaatcagcgggattttgggggtgggggggatgggaggtaccttagagggagtattttctttattttttgaagaaagtaagatcctgactctgaagcttcaaagtgacactgtggaaatctgaaacgaggggatgtcatgaaggcagcttttctttttctgaggaaaaaataggcatgggctacaggactatttaaaatgtctcatttacagtataaaactcaaaggtagatgtaatttttacacctatgagtatttgtccaatttctgtctcttcctcaccattgggtatctattctttatatgtaaataagataaggtcatctgatagccttattcagtcttcatcattttcatcattgttcctatgtagattattggacatttattgtagcactacataactgattataaaaatctgtaaatgaattagcactttcatattgaaacaagcctgctagcctatgtataaaatagcaaaatgtttgctgtttataaaaagatgtaatggggtggggggcaggggtaatttcaagttattaatttaaaaatgaactagcaattttgtacctggtgactttgtggtgcactcacctctgatagtgacttgaattcggtatgtaaaaaggggttagtggtatttcattgctgctaaaaatgacaactccctctgtgtcctgtttttcttaaagctgtcagtgtacaagtgggtatttgaataccagaccttactgtaaaaaataaaaaaggtggtatctagagcatgtaaattggatataaagttctgctcttaaagagttgatctaagagtatggctaaacatctatatatgcaatctattaaaagaacttaattcggcaaaaaaaaaataaattangaaccca

SEQ ID NO: 73901 - DNA, 5652 bp, Homo sapiens
cgcgccggttgccgctgcggagcgcggcgggtccatgtgcgcagtgagtggcgctattcctggcccagtagcacccgagccccgggtttgaccgagtccgcgctgcgatggaccccaacaccattatcgaggccctgcggggcaccatggacccagccctgcgtgaggccgcggagcgccagctcaatgaagcacacaagtctctgaattttgtctcaacactgctccagattactatgtcggaacagctggatttacctgtgagacaggcaggtgttatctatctgaaaaatatgataacacagtattggcctgatcgagaaacagcaccaggggatatatccccttatactattccagaagaagatcgccattgtattcgagaaaatattgtagaagccattatccattctcctgagctcatcagggtacagcttactacatgcattcatcacatcatcaaacatgattatccaagccgctggactgccattgtggacaaaattggcttttatcttcagtccgataacagtgcttgttggctaggaattcttctttgcctttatcagcttgtgaaaaattatgagtataaaaaaccagaggagcggagtccattggtagcagcaatgcagcattttctgccagttctaaaggatcgttttatccagcttctttctgaccagtctgatcagtctgtcctcatccagaaacagatattcaagatcttctatgctcttgttcagtatacactaccactggaactgataaaccaacagaacctgacagaatggatagaaattttaaagactgttgtgaacagggatgtacctaatgaaacacttcaagttgaagaagatgatcgacctgagttaccatggtggaaatgcaagaagtgggccttacatattttagcaagactttttgaaagatatggaagccctggcaatgtttccaaggagtataatgaatttgctgaagtatttctgaaggcatttgctgttggtgtccagcaagttttattgaaggtgttatatcagtacaaggagaagcaatatatggctcctcgagttttacaacagacattaaattatattaatcaaggagtttctcatgctctcacctggaagaatctgaagccccatatacaaggcattatccaagatgttatttttccattgatgtgctatacagatgctgatgaggaactttggcaagaagacccttacgaatatatacgcatgaagtttgatgtgtttgaagatttcatttctcctaccactgctgcccagacacttttgtttacagcctgtagtaagaggaaagaggtactgcaaaagactatgggattttgttaccagattcttacagaaccaaatgctgaccctcgaaaaaaagatggagccctgcatatgattggctctttagctgaaatacttctgaagaaaaagatctataaagatcagatggaatacatgttgcagaatcatgtattccctctcttcagcagtgaactaggctacatgagagcaagggcttgctgggtacttcactatttttgtgaagtgaagttcaaaagtgatcagaaccttcaaacagccttagagctaacaagaagatgtctgattgatgatagagaaatgcctgtgaaagtggaagctgccattgcccttcaagtattgatcagcaatcaagaaaaagctaaagaatatatcacaccattcatcagacctgtaatgcaggctcttcttcacattataagagaaacagaaaatgatgaccttaccaatgtaattcagaaaatgatctgtgaatatagtgaagaagttactcctattgcagtagaaatgacacaacatttggcaatgacatttaaccaagtaatccagacggggccagatgaagaaggtagtgatgacaaagcagttactgctatgggaattctgaatacaattgatacacttcttagtgtagttgaagatcataaagagataacccaacagcttgagggaatctgcttacaggtcattggtactgttttacaacagcatgtcttagaattctatgaggagatcttctctttagcgcacagtttgacatgtcaacaagtgtctccacagatgtggcagctactaccccttgtatttgaagtctttcagcaagatggctttgattactttacagatatgatgcccctccttcataattatgtaacagttgatacagacacacttctgtctgacaccaagtatcttgaaatgatatacagtatgtgcaaaaaggttcttacaggagttgcaggagaagatgcagagtgtcatgcagcaaaattgttagaggtcatcattctgcagtgcaaagggcgtggcattgaccagtgcattcccttattcgtggaagcagccttagaaagactgacaagagaggttaagacaagtgaacttcgaactatgtgtctgcaagttgcaattgcagctttgtattataatccacacctactactcaataccttagaaaatcttcgcttccctaataatgttgaaccagttacaaatcattttattacacagtggcttaatgatgttgactgtttcttggggcttcatgacagaaagatgtgtgttctcggactctgtgctcttattgatatggaacagataccccaagttttaaatcaggtttctggacagattttgccggcttttatccttttatttaacggattgaaaagagcatatgcctgccatgcagaacatgagaatgacagtgatgatgatgatgaagctgaagatgatgatgaaaccgaggaactggggagtgatgaagatgatattgatgaagatgggcaagaatatttggagattctggctaagcaggctggtgaagatggagatgatgaagattgggaagaagatgatgctgaagagactgctctggaaggctattccacaatcattgatgatgaagataaccctgttgatgagtatcagatatttaaagctatctttcaaactattcaaaatcgtaatcctgtgtggtatcaggcactgactcacggtcttaatgaagaacaaagaaaacagttacaggacatagcaactctggctgatcaaagaagagcagcccatgaatccaaaatgattgagaagcatggaggatacaaattcagtgctccagttgtgccaagttctttcaattttggaggcccagcaccagggatgaattgagttatctctttctttcctgctgtgtgcttgtagtgaagagcttgtgttcctcctagtagtggttccagaactggttcatgttatctattctaaactaataatcaatagatggacaaaagaaacaacaaccccaggagatgggacctgatcatgcaacctggcactggaaaagaaatcagcgggattttgggggtgggggggatgggaggtaccttagagggagtattttctttattttttgaagaaagtaagatcctgactctgaagcttcaaatgacttgaattcggtatgtaaaaaggggttagtggtatttcattgctgctaaaaatgacaactccctctgtgtcctgtttttcttaaagctgtcagtgtacaagtgggtatttgaataccagaccttactgtaaaaaataaaaaaggtggtatctagagcatgtaaattggatataaagttctgctcttaaagagttgatctaagagtatggctaaacatctatatatgcaatctattaaaagaacttaattcggctattatgtcttgatttgattgcagttttttcctaattataacaaatttttcctcattggcctgtttttaatcctgtgcctagaaggagtacaaaatgcacactttacaaaattgatatttaacacttacccactcccctttccccatctcttctaccgctcttgttgatcgtggtatctgatcttgactagataggctgaaggcacatggttccctccaaaaaccactattgataccactacaaaaacaagccagcaaaaagatactgtagagaggttggcttgcttccctctcttcctaactgcatgttgaaaaataagccgttattgatcttaaacatcggtcagatgagtcatacattgggttattttttatatacatgtatacacaaaatatttcaaattgaaagcaacatcttaatggattcaaaactattacaagctgttgtctaaaacaggtgagaaaaaaatttataactgtaaaaacaaatgcacatattgatatttaaaatgcgtaattaagaaaacccattgttgttgtgtttttcttgtataccaataattaagccactactgttggcactgtttggttttctattttaacactgaaggagtgaaagtatttcctatatttatgaatttactactaaaatcttggcaaaaaaagaaaaaaattgtctaacgtgtgtgggtgaaaactgttaatcaagtgtttctactcccccccgaaaatcccctgaaagttggacaccaactgtataccctaggttgcttaaagggatttcactattatataaagtcaataaaaatgaagtagttgtatatatgcaacattgtgtacagaggggaaataatgaatagtattaaagaaacattctcgtcttcctttacctttaatcccctaatacctagtctactttttaaattttcagacttcactgctttttgaattcataattctaattttcacattattgttaatggaaaatcatatctaataaaggttttagttattcccatgcacagtatgaaaattctcatttgctgaggttttgtttcaagaaaatgtattggcatgtctttgagaacatgttttattgtctcctgtgtcatataatccaaactaatctccgtttacagactttaacttgaaattagaccttataattaaactatttaaatagtgttcaaatgatagtttctaatgcatcaaatatatacctcagttttcatgatttcctttaacattataatttggtatagatcaagaatcttaacatgtatcagtttctagatgaggctgcaggatttttggaaaactttttgaatgtatttacaatattctcttgtaattagctacatagggacttgtctttttttctttttacatacagcttttcctacagttttattaccctgtaatttttttttagttgtagaagttaattctgattttgtgtggatttcagtatttgtctttgttaatggcacatattagcataaatcacttttgtaaatgtaagctttctttttttttcttgaaaaagcctttctatttatcagtattaaataaaggaagttaatctgtttctctgcaggtaataaaatagtgacacactgtattaagatagtgactgctatactcaactctggaagagactagagtatagagcatgagtggcaaaaccacagcccttgggccatatgctgctattcagtcccagatgtagcccctgaagcaagcataaagaaaaatgaattaaaaattaaattaatatggaaagttaaaaaatggattacattagtatgactaaaccatgtctttggcaaagatctaacacaatgtcttaagtataataggtagtctctgtttgtaaaataaatgacttaaatttaaaa

SEQ ID NO: 73902 - DNA, 2124 bp, Homo sapiens
aatggaatccaggagctggttttttgaaaggatcaacaaaattgatagaccactagcaagactaataaagaaaaaaagagagaagaatcagatagacactgtaaaaaataaaaaaggtggtatctagagcatgtaaattggatataaagttctgctcttaaagagttgatctaagagtatggctaaacatctatatatgcaatctattaaaagaacttaattcggctattatgtcttgatttgattgcagttttttcctaattataacaaatttttcctcattggcctgtttttaatcctgtgcctagaaggagtacaaaatgcacactttacaaaattgatatttaacacttacccactcccctttccccatctcttctaccgctcttgttgatcgtggtatctgatcttgactagataggctgaaggcacatggttccctccaaaaaccactattgataccactacaaaaacaagccagcaaaaagatactgtagagaggttggcttgcttccctctcttcctaactgcatgttgaaaaataagccgttattgatcttaaacatcggtcagatgagtcatacattgggttattttttatatacatgtatacacaaaatatttcaaattgaaagcaacatcttaatggattcaaaactattacaagctgttgtctaaaacaggtgagaaaaaaatttataactgtaaaaacaaatgcacatattgatatttaaaatgcgtaattaagaaaacccattgttgttgtgtttttcttgtataccaataattaagccactactgttggcactgtttggttttctattttaacactgaaggagtgaaagtatttcctatatttatgaatttactactaaaatcttggcaaaaaaagaaaaaaattgtctaacgtgtgtgggtgaaaactgttaatcaagtgtttctactcccccccgaaaatcccctgaaagttggacaccaactgtataccctaggttgcttaaagggatttcactattatataaagtcaataaaaatgaagtagttgtatatatgcaacattgtgtacagaggggaaataatgaatagtattaaagaaacattctcgtcttcctttacctttaatcccctaatacctagtctactttttaaattttcagacttcactgctttttgaattcataattctaattttcacattattgttaatggaaaatcatatctaataaaggttttagttattcccatgcacagtatgaaaattctcatttgctgaggttttgtttcaagaaaatgtattggcatgtctttgagaacatgttttattgtctcctgtgtcatataatccaaactaatctccgtttacagactttaacttgaaattagaccttataattaaactatttaaatagtgttcaaatgatagtttctaatgcatcaaatatatacctcagttttcatgatttcctttaacattataatttggtatagatcaagaatcttaacatgtatcagtttctagatgaggctgcaggatttttggaaaactttttgaatgtatttacaatattctcttgtaattagctacatagggacttgtctttttttctttttacatacagcttttcctacagttttattaccctgtaatttttttttagttgtagaagttaattctgattttgtgtggatttcagtatttgtctttgttaatggcacatattagcataaatcacttttgtaaatgtaagctttctttttttttcttgaaaaagcctttctatttatcagtattaaataaaggaagttaatctgtttctctgcaggtaataaaatagtgacacactgtattaagatagtgactgctatactcaactctggaagagactagagtatagagcatgagtggcaaaaccacagcccttgggccatatgctgctattcagtcccagatgtagcccctgaagcaagcataaagaaaaatgaattaaaaattaaattaatatggaaagttaaaaaatggattacattagtatgactaaaccatgtctttggcaaagatctaacacaatgtcttaagtataataggtagtctctgtttgtaaaataaatgacttaaatttaaaa

SEQ ID NO: 73903 - DNA, 3567 bp, Homo sapiens
  misc_feature (3431)..(3431): n is a, c, g, or t
cgcgccggttgccgctgcggagcgcggcgggtccatgtgcgcagtgagtggcgctattcctggcccagtagcacccgagccccgggtttgaccgagtccgcgctgcgatggaccccaacaccattatcgaggccctgcggggcaccatggacccagccctgcgtgaggccgcggagcgccagctcaatgaagcacacaagtctctgaattttgtctcaacactgctccagattactatgtcggaacagctggatttacctgtgagacaggcaggtgttatctatctgaaaaatatgataacacagtattggcctgatcgagaaacagcaccaggggatatatccccttatactattccagaagaagatcgccattgtattcgagaaaatattgtagaagccattatccattctcctgagctcatcagggtacagcttactacatgcattcatcacatcatcaaacatgattatccaagccgctggactgccattgtggacaaaattggcttttatcttcagtccgataacagtgcttgttggctaggaattcttctttgcctttatcagcttgtgaaaaattatgagtataaaaaaccagaggagcggagtccattggtagcagcaatgcagcattttctgccagttctaaaggatcgttttatccagcttctttctgaccagtctgatcagtctgtcctcatccagaaacagatattcaagatcttctatgctcttgttcagtatacactaccactggaactgataaaccaacagaacctgacagaatggatagaaattttaaagactgttgtgaacagggatgtacctaatgaaacacttcaagttgaagaagatgatcgacctgagttaccatggtggaaatgcaagaagtgggccttacatattttagcaagactttttgaaagatatggaagccctggcaatgtttccaaggagtataatgaatttgctgaagtatttctgaaggcatttgctgttggtgtccagcaagttttattgaaggtgttatatcagtacaaggagaagcaatatatggctcctcgagttttacaacagacattaaattatattaatcaaggagtttctcatgctctcacctggaagaatctgaagccccatatacaaggcattatccaagatgttatttttccattgatgtgctatacagatgctgatgaggaactttggcaagaagacccttacgaatatatacgcatgaagtttgatgtgtttgaagatttcatttctcctaccactgctgcccagacacttttgtttacagcctgtagtaagaggaaagaggtactgcaaaagactatgggattttgttaccagattcttacagaaccaaatgctgaccctcgaaaaaaagatggagccctgcatatgattggctctttagctgaaatacttctgaagaaaaagatctataaagatcagatggaatacatgttgcagaatcatgtattccctctcttcagcagtgaactaggctacatgagagcaagggcttgctgggtacttcactatttttgtgaagtgaagttcaaaagtgatcagaaccttcaaacagccttagagctaacaagaagatgtctgattgatgatagagaaatgcctgtgaaagtggaagctgccattgcccttcaagtattgatcagcaatcaagaaaaagctaaagaatatatcacaccattcatcagacctgtaatgcaggctcttcttcacattataagagaaacagaaaatgatgaccttaccaatgtaattcagaaaatgatctgtgaatatagtgaagaagttactcctattgcagtagaaatgacacaacatttggcaatgacatttaaccaagtaatccagacggggccagatgaagaaggtagtgatgacaaagcagttactgctatgggaattctgaatacaattgatacacttcttagtgtagttgaagatcataaagagataacccaacagcttgagggaatctgcttacaggtcattggtactgttttacaacagcatgtcttagaattctatgaggagatcttctctttagcgcacagtttgacatgtcaacaagtgtctccacagatgtggcagctactaccccttgtatttgaagtctttcagcaagatggctttgattactttacagatatgatgcccctccttcataattatgtaacagttgatacagacacacttctgtctgacaccaagtatcttgaaatgatatacagtatgtgcaaaaaggttcttacaggagttgcaggagaagatgcagagtgtcatgcagcaaaattgttagaggtcatcattctgcagtgcaaagggcgtggcattgaccagtgcattcccttattcgtggaagcagccttagaaagactgacaagagaggttaagacaagtgaacttcgaactatgtgtctgcaagttgcaattgcagctttgtattataatccacacctactactcaataccttagaaaatcttcgcttccctaataatgttgaaccagttacaaatcattttattacacagtggcttaatgatgttgactgtttcttggggcttcatgacagaaagatgtgtgttctcggactctgtgctcttattgatatggaacagataccccaagttttaaatcaggtttctggacagattttgccggcttttatccttttatttaacggattgaaaagagcatatgcctgccatgcagaacatgagaatgacagtgatgatgatgatgaagctgaagatgatgatgaaaccgaggaactggggagtgatgaagatgatattgatgaagatgggcaagaatatttggagattctggctaagcaggctggtgaagatggagatgatgaagattgggaagaagatgatgctgaagagactgctctggaaggctattccacaatcattgatgatgaagataaccctgttgatgagtatcagatatttaaagctatctttcaaactattcaaaatcgtaatcctgtgtggtatcaggcactgactcacggtcttaatgaagaacaaagaaaacagttacaggacatagcaactctggctgatcaaagaagagcagcccatgaatccaaaatgattgagaagcatggaggatacaaattcagtgctccagttgtgccaagttctttcaattttggaggcccagcaccagggatgaattgagttatctctttctttcctgctgtgtgcttgtagtgaagagcttgtgttcctcctagtagtggttccagaactggttcatgttatctattctaaactaataatcaatagatggacaaaagaaacaacaaccccaggagatgggacctgatcatgcaacctggcactggaaaagaaatcagcgggattttgggggtggggggtactatnactgattggcctactgctgcaacatcactcagggtgaacatattcaagttcctttgaaagcgaaaaaagtgcctccccggggggaaacatactgggtttagatgatggggaagaactgtttcctaagggattagaa

SEQ ID NO: 73904 - DNA, 344 bp, Homo sapiens
agaatttcagtattgcctcgggatggagtaggaggaatagtgtagaacggagctaccaagcctctcttattcatgttgtttttcccttgtttttattttttgatagctattcaaaatcgtaatcctgtgtggtatcaggcactgactcacggtcttaatgaagaacaaagaaaacagttacaggacatagcaactctggctgatcaaagaagagcagcccatggtatgttaattaactgtaactcctctttaattagtgacttttataggtttaaaattttatatcgtttaattttatatcattaaattttatcatttaagatgatataaaaggtatagttgtt

SEQ ID NO: 73905 - DNA, 331 bp, Homo sapiens
ctcaactctggaagagactagagtatagagcatgagtggcaaaaccacagcccttgggccatatgctgctattcagtcccagatgtagcccctgaagcaagcataaagaaaaatgaattaaaaattaaattaatatggaaagttaaaaaatggattacattagtatgactaaaccatgtctttggcaaagatctaacacaatgtcttaagtataataggtagtctctgtttgtaaaataaatgacttaaatttaaaacatcagttataaaactgtcagttctgttctttgtaatttaaattttggtaaagattttctgtgaccgtttatca

SEQ ID NO: 73906 - DNA, 572 bp, Homo sapiens
caaatgagatttttcctaatgagtcacagactatagcctacctaatctttctctcgccactatactgccagcaccaaatatagtgtctggctcattgttgaggcactcggtaaacatttggtgaatgaaagaatctcatgctcaactaattttactgttttgtggaaaagactcatttccaatgcaggattttatctgtctttaaaatatattcaataaagttccaccccccactttttttttttctttgagacagggtcttgctgtgcagtgattcaatcgtggctcactgccgccatgacctcttgggctcaatcagtcctcccacttcagtctccaaagtagctgggactacaagcatgcgccactatgcctagctaattttttttttaactttttgcagagatggggtttcaccatcttgcttaggctagacttgaactcttgagctcaagcaatctgcctgccttggcctcccaaattgctagggttacaggcgtgagccacactgtacctggcccaagttttgttttcaatatccaagttattttctttcataaaagaatgagaaa

SEQ ID NO: 73907 - DNA, 411 bp, Homo sapiens
actttgggggtgtcatttaacctctccagcttttgttgcctagtcataaaatagtgacaacaatagggccagctatatctattttataggcttttataagcatccactgagatcacaggataccatggggaggagggaagtgtagcacagagttatttagacttttcctattgatacccacgatgttcataagcaacccactcccatagtatcactggagtcatgtagcaagacaattccctgcaggctagtactctccagcacatccctttctttcctactcaaaaaaacatcctgggatgcagaagagtaaggagcattttatgataggatatgctcttgtttctttccaaagagaaaatgttgtaaaatttgttactagtaataaattgataacgatatgctctataa

SEQ ID NO: 73908 - DNA, 7896 bp, Homo sapiens
  misc_feature (7434)..(7434): n is a, c, g, or t
atgcagtccggccgcggccccccacttccagcccccggcctggccttggctttgaccctgactatgttggccagacttgcatccgcggcttccttcttcggtgagaaccacctggaggtgcctgtggccacggctctgaccgacatagacctgcagctgcagttctccacgtcccagcccgaagccctccttctcctggcagcaggcccagctgaccacctcctgctgcagctctactctggacgcctgcaggtcagacttgttctgggccaggaggagctgaggctgcagactccagcagagacgctgctgagtgactccatcccccacactgtggtgctgactgtcgtagagggctgggccacgttgtcagtcgatgggtttctgaacgcctcctcagcagtcccaggagcccccctagaggtcccctatgggctctttgttgggggcactgggacccttggcctgccctacctgaggggaaccagccgacccctgaggggttgcctccatgcagccaccctcaatggccgcagcctcctccggcctctgacccccgatgtgcatgagggctgtgctgaagagttttctgccagtgatgatgtggccctgggcttctctgggccccactctctggctgccttccctgcctggggcactcaggacgaaggaaccctagagtttacactcaccacacagagccggcaggcacccttggccttccaggcagggggccggcgtggggacttcatctatgtggacatatttgagggccacctgcgggccgtggtggagaagggccagggtaccgtattgctccacaacagtgtgcctgtggccgatgggcagccccatgaggtcagtgtccacatcaatgctcaccggctggaaatctccgtggaccagtaccctacgcatacttcgaaccgaggagtcctcagctacctggagccacggggcagtctccttctcggggggctggatgcagaggcctctcgtcacctccaggaacaccgcctgggcctgacaccagaggccaccaatgcctccctgctgggctgcatggaagacctcagtgtcaatggccagaggcgggggctgcgggaagctttgctgacgcgcaacatggcagccggctgcaggctggaggaggaggagtatgaggacgatgcctatggccattatgaagctttctccaccctggctcccgaggcttggccagccatggagctgcctgagccatgcgtgcctgagccagggctgcctcctgtctttgccaatttcacccagctgctgactatcagcccactggtggtggccgagggtggcacagcctggcttgagtggaggcatgtgcagcccacgctggacctgatggaggctgagctgcgcaaatcccaggtgctgttcagcgtgacccgaggggcacactatggcgagctcgagctggacatcctgggtgcccaggcacgaaaaatgttcaccctcctggacgtggtgaaccgcaaggcccgcttcatccacgatggctctgaggacacctccgaccagctggtgctggaggtgtcggtgacggctcgggtgcccatgccctcatgccttcggaggggccaaacatacctcctgcccatccaggtcaaccctgtcaatgacccaccccacatcatcttcccacatggcagcctcatggtgatcctggaacacacgcagaagccgctggggcctgaggttttccaggcctatgacccggactctgcctgtgagggcctcaccttccaggtccttggcacctcctctggcctccccgtggagcgccgagaccagcctggggagccggcgaccgagttctcctgccgggagttggaggccggcagcctagtctatgtccactgcggtggtcctgcacaggacttgacgttccgggtcagcgatggactgcaggccagccccccggccacgctgaaggtggtggccatccggccggccatacagatccaccgcagcacagggttgcgactggcccaaggctctgccatgcccatcttgcccgccaacctgtcggtggagaccaatgccgtggggcaggatgtgagcgtgctgttccgcgtcactggggccctgcagtttggggagctgcagaagcatagtacaggtggggtggagggtgctgagtggtgggccacacaggcgttccaccagcgggatgtggagcagggccgcgtgaggtacctgagcactgacccacagcaccacgcttacgacaccgtggagaacctggccctggaggtgcaggtgggccaggagatcctgagcaatctgtccttcccagtgaccatccagagagccactgtgtggatgctgcggctggagccactgcacactcagaacacccagcaggagaccctcaccacagcccacctggaggccaccctggaggaggcaggcccaagccccccaaccttccattatgaggtggttcaggctcccaggaaaggcaaccttcaactacagggcacaaggctgtcagatggccagggcttcacccaggatgacatacaggctggccgggtgacctatggggccacagctcgtgcctcagaggcagtcgaggacaccttccgtttccgtgtcacagctccaccatatttctccccactctataccttccccatccacattggtggtgacccagatgcgcctgtcctcaccaatgtcctcctcgtggtgcctgagggtggtgagggtgtcctctctgctgaccacctctttgtcaagagtctcaacagtgccagctacctctatgaggtcatggagcggccccgccttgggaggttggcttggcgtgggacacaggacaagaccactatggtgacatccttcaccaatgaagacctgttgcgtggccggctggtctaccagcatgatgactccgagaccacagaagatgatatcccatttgttgctacccgccagggcgagagcagtggtgacatggcctgggaggaggtacggggtgtcttccgagtggccatccagcccgtgaatgaccacgcccctgtgcagaccatcagccggatcttccatgtggcccggggtgggcggcggctgctgactacagacgacgtggccttcagcgatgctgactcgggctttgctgacgcccagctggtgcttacccgcaaggacctcctctttggcagtatcgtggccgtagatgagcccacgcggcccatctaccgcttcacccaggaggacctcaggaagaggcgagtactgttcgtgcactcaggggctgaccgtggctggatccagctgcaggtgtccgacgggcaacaccaggccactgcgctgctggaggtgcaggcctcggaaccctacctccgtgtggccaacggctccagccttgtggtccctcaaggaggccagggcaccatcgacacggccgtgctccacctggacaccaacctcgacatccgcagtggggatgaggtccactaccacgtcacagctggccctcgctggggacaactagtccgggctggtcagccagccacagccttctcccagcaggacctgctggatggggccgttctctatagccacaatggcagcctcagccccgaagacaccatggccttctccgtggaagcagggccagtgcacacggatgccaccctacaagtgaccattgccctagagggcccactggccccactgaagctggtccggcacaagaagatctacgtcttccagggagaggcagctgagatcagaagggaccagctggaggcagcccaggaggcagtgccacctgcagacatcgtattctcagtgaagagcccaccgagtgccggctacctggtgatggtgtcgcgtggcgccttggcagatgagccacccagcctggaccctgtgcagagcttctcccaggaggcagtggacacaggcagggtcctgtacctgcactcccgccctgaggcctggagcgatgccttctcgctggatgtggcctcaggcctgggtgctcccctcgagggcgtccttgtggagctggaggtgctgcccgctgccatcccactagaggcgcaaaacttcagcgtccctgagggtggcagcctcaccctggcccctccactgctccgtgtctccgggccctacttccccactctcctgggcctcagcctgcaggtgctggagccaccccagcatggacccctgcagaaggaggacggacctcaagccaggaccctcagcgccttctcctggagaatggtggaagagcagctgatccgctacgtgcatgacgggagcgagacactgacagacagttttgtcctgatggctaatgcctccgagatggatcgccagagccatcctgtggccttcactgtcactgtcctgcctgtcaatgaccaaccccccatcctcactacaaacacaggcctgcagatgtgggagggggccactgcgcccatccctgcggaggctctgaggagcacggacggcgactctgggtctgaggatctggtctacaccatcgagcagcccagcaacgggcgggtagtgctgcggggggcgccgggcactgaggtgcgcagcttcacgcaggcccagctggacggcgggctcgtgctgttctcacacagaggaaccctggatggaggcttcccgttccgcctctctgacggcgagcacacttcccccggacacttcttccgagtgacggcccagaagcaagtgctcctctcgctgaagggcagccagacactgactgtctgcccagggtccgtccagccactcagcagtcagaccctcagggccagctccagcgcaggcactgacccccagctcctgctctaccgtgtggtgcggggcccccagctaggccggctgttccacgcccagcaggacagcacaggggaggccctggtgaacttcactcaggcagaggtctacgctgggaatattctgtatgagcatgagatgccccccgagcccttttgggaggcccatgataccctagagctccagctgtcctcgccgcctgcccgggacgtggccgccacccttgctgtggctgtgtcttttgaggctgcctgtccccagcgccccagccacctctggaagaacaaaggtctctgggtccccgagggccagcgggccaggatcaccgtggctgctctggatgcctccaatctcttggccagcgttccatcaccccagcgctcagagcatgatgtgctcttccaggtcacacagttccccagccggggccagctgttggtgtccgaggagcccctccatgctgggcagccccacttcctgcagtcccagctggctgcagggcagctagtgtatgcccacggcggtgggggcacccagcaggatggcttccactttcgtgcccacctccaggggccagcaggggcctccgtggctggaccccaaacctcagaggcctttgccatcacggtgagggatgtaaatgagcggccccctcagccacaggcctctgtcccactccggctcacccgaggctctcgtgcccccatctcccgggcccagctgagtgtggtggacccagactcagctcctggggagattgagtacgaggtccagcgggcaccccacaacggcttcctcagcctggtgggtggtggcctggggcccgtgacccgcttcacgcaagccgatgtggattcagggcggctggccttcgtggccaacgggagcagcgtggcaggcatcttccagctgagcatgtctgatggggccagcccacccctgcccatgtccctggctgtggacatcctaccatccgccatcgaggtgcagctgcgggcacccctggaggtgccccaagctttggggcgctcctcactgagccagcagcagctccgggtggtttcagatcgggaggagccagaggcagcataccgcctcatccagggaccccagtatgggcatctcctggtgggcgggcggcccacctcggccttcagccaattccagatagaccagggcgaggtggtctttgccttcaccaacttctcctcctctcatgaccacttcagagtcctggcactggctaggggtgtcaatgcatcagccgtagtgaacgtcactgtgagggctctgctgcatgtgtgggcaggtgggccatggccccagggtgccaccctgcgcctggaccccaccgtcctagatgctggcgagctggccaaccgcacaggcagtgtgccgcgcttccgcctcctggagggaccccggcatggccgcgtggtccgcgtgccccgagccaggacggagcccgggggcagccagctggtggagcagttcactcagcaggaccttgaggacgggaggctggggctggaggtgggcaggccagaggggagggcccccggccccgcaggtgacagtctcactctggagctgtgggcacagggcgtcccgcctgctgtggcctccctggactttgccactgagccttacaatgctgcccggccctacagcgtggccctgctcagtgtccccgaggccgcccggacggaagcagggaagccagagagcagcacccccacaggcgagccaggccccatggcatccagccctgagcccgctgtggccaagggaggcttcctgagcttccttgaggccaacatgttcagcgtcatcatccccatgtgcctggtacttctgctcctggcgctcatcctgcccctgctcttctacctccgaaaacgcaacaagacgggcaagcatgacgtccaggtcctgactgccaagccccgcaacggcctggctggtgacaccgagacctttcgcaaggtggagccaggccaggccatcccgctcacagctgtgcctggccaggggccccctccaggaggccagcctgacccagagctgctgcagttctgccggacacccaaccctgcccttaagaatggccagtactgggtgtgaaggcctggcctgggcccagatgctgatcgggccagggacaggcttgcccatgtcccgggccccattgcttccatgcccggtgctgtctgagtatccccagagcaagagagacctggagacaccaggggtggagggtcctgggagatagtcccaggggtccgggacagagtggagtcaagagctggaacctccctcagctcactccgagcctggagaactgcaggggccaaggtggaggcaggcttaagttcagtcctcctgccctggagctggtttgggctgtcaaaaccagggtaacctcctacatgggtcatgactctgggtcctgggtctgtgaccttgggtaagtcgcgcctgacccaggctgctaagagggcaaggagaaggaagtaccctggggagggaagggacagaggaagctattcctggcttttctactccaacccaggccaccctttgtctctnccccagagttgagaaaaaaacttcctcccctggttttttagggagatggtatcccctggagtagagggcaagaggagagagcgcctccagtctagaaggcataagccaataggataatatattcagggtgcagggtgggtaggttgctctggggatgggtttatttaagggagattgcaaggaagctatttaacatggtgctgagctagccaggactgatggagcccctgggggtgtgggatggaggagggtctgcagccagttcattcccagggccccatcttgatgggccaagggctaaacatgcatgtgtcagtggctttggagcaggctaggctggggctcatcgagggtctcaggccgaggccactgtagtgccagtgcccccctgaggactagggcaggcagctgggggcacttggttccatggagcctggataaacagtgctttggaggctctgg

SEQ ID NO: 73909 - DNA, 940 bp, Homo sapiens
cccggaagttccgggccgagttcctcgtgccaacgtgtcttgtaaggtgcggctagaaactggggacatggcagcgcctggcccagcgctctgcctcttcgacgtggatgggaccctcaccgccccgcggcagaaaattaccaaagaaatggatgacttcctacaaaaattgaggcagaagatcaaaatcggagtggtaggcggatcggactttgagaaagtgcaggagcaactgggaaatgatgtggttgaaaaatacgattatgtgtttccagaaaatggcttggtagcatacaaagatgggaaactcttgtgtagacagaatattcaaagtcatctgggtgaggccctaatccaagatttaatcaactactgtctgagctacattgcgaaaattaaactcccgaagaagaggggtactttcattgaattccgaaatgggatgttaaacgtgtcccctattggaagaagctgcagccaagaagaacgcattgagttctacgaactcgataaaaaagaaaatataagacaaaagtttgtagcagatctacggaaagagtttgctggaaaaggcctcacgttttccataggaggccagatcagctttgatgtctttcctgatggatgggacaagagatactgtctgcgacatgtggaaaatgacggttataagaccatttatttctttggagacaaaactatgccactgcaagctttcttcctggtggcagatgacatcatggattcatcccttacccgccggggacagatctgtggtatcagaagccgggcgtgggtttggatgccatcaaatgatgctaacctccttggaagcatgtatctacccgctgctgaagctctattggcgggagcaggcctattaactgaaactgatcgagctcttctgcagagttcctatcagactgagatgggcagaccg

SEQ ID NO: 73910 - DNA, 1032 bp, Homo sapiens
tgacgttagacagagtcttgcaccgttgccgaggctggagtgcagtggcacaatcttggctcactgaaccctctgcctcctgggttcaagcaattctcctgcctcagcctccggagtagctggggttacaggcgcacaccaccatgcctggctaattttttgtatttttagtagagacgggggtttcactatgttggccaggctggtctggaactcctgacctagtaaaaccccgccagcctcagcctcccaaagtgctgggattacaggtgtgagccacaccgcaccgcgactcaaagagcttttttaaaaatatatttagcctgtccctcagcaattctgattcaggaagcgagagagcaaagcttggaaatctgcattttcacactgccctggttgctgctggtgaaccatcagcatcatggacgagtatcttcctctacagacagtcaggctgaagtcagggacataagataacctgtcaccaagtccctaatctcctgcccagtcatcatcgtttaaatgtgtaaccaaaaagagccattaaaaaaacaaggaacttttttccatactcttctcttagtctgtaagatgagatagtctttcacagtccttgctggagtttagcggttttattggtggtcattgttaatcaaggagtaaaaacacaggttttgattctttgcattctaagtgtttttttggttttgattgtagtggttgaaaaatacgattatgtgtttccagaaaatggcttggtagcatacaaagatgggaaactcttgtgtagacaggtaggttcttgagtatctgaattactatatactattaaaagtgttttctaaaagggcatttcacaatgaatgcctctaggaagatgaggaacgggtagaaatgaatctttactctgtattttttgttttgcattttgaaccatgtgactattacatattctacattgataactaaatttttatactttttaaatctaatatttctctcttttcttattttgtttttgagacggagtct

SEQ ID NO: 73911 - DNA, 2780 bp, Homo sapiens
tgacgttagacagagtcttgcaccgttgccgaggctggagtgcagtggcacaatcttggctcactgaaccctctgcctcctgggttcaagcaattctcctgcctcagcctccggagtagctggggttacaggcgcacaccaccatgcctggctaattttttgtatttttagtagagacgggggtttcactatgttggccaggctggtctggaactcctgacctagtaaaaccccgccagcctcagcctcccaaagtgctgggattacaggtgtgagccacaccgcaccgcgactcaaagagcttttttaaaaatatatttagcctgtccctcagcaattctgattcaggaagcgagagagcaaagcttggaaatctgcattttcacactgccctggttgctgctggtgaaccatcagcatcatggacgagtatcttcctctacagacagtcaggctgaagtcagggacataagataacctgtcaccaagtccctaatctcctgcccagtcatcatcgtttaaatgtgtaaccaaaaagagccattaaaaaaacaaggaacttttttccatactcttctcttagtctgtaagatgagatagtctttcacagtccttgctggagtttagcggttttattggtggtcattgttaatcaaggagtaaaaacacaggttttgattctttgcattctaagtgtttttttggttttgattgtagtggttgaaaaatacgattatgtgtttccagaaaatggcttggtagcatacaaagatgggaaactcttgtgtagacagaatattcaaagtcatctgggtgaggccctaatccaagatttaatcaactactgtctgagctacattgcgaaaattaaactcccgaagaagaggggtactttcattgaattccgaaatgggatgttaaacgtgtcccctattggaagaagctgcagccaagaagaacgcattgagttctacgaactcgataaaaaagaaaatataagacaaaagtttgtagcagatctacggaaagagtttgctggaaaaggcctcacgttttccataggaggccagatcagctttgatgtctttcctgatggatgggacaagagatactgtctgcgacatgtggaaaatgacggttataagaccatttatttctttggagacaaaactatgccaggtggcaatgaccatgagatcttcacagaccccagaaccatgggctactccgtgacagcgcctgaggacacgcgcaggatctgtgaactgctgttctcctaacgtgggagcgggaggggcggggtcccggctgacaagccagcatagggcattcggtggccagagccgagggtcctcccacacgtgctcacccacccgcagcctaggcaggctctgcatgctatgccaggcatgtgcagtctggacttccacctccagtgccagaaacttccagaaggaaggagaaaactcttgtcaagaatggcccagaggaatgcctcgcacaaaaggtcttccccacccacccccagcccactagtctaatacccaccctgatacgtgcaatcatgtagttttggcggaaatttccccatcattctaggatgatacagaaagaaaaactgtgcctggaccctccctcttggtgggtctgtggaaacataagcggtttttttaatgggcccctgcatcaataccaaacatgggggtttggtaatgagaaaccaggacaggccatctgcagtgacccagcccaggacgaagtttacaaacacctcctggaacgaagctcccgcctgcatgtcaccttgatgggggctgtgagtggggcagtgtgatacccagtgactagacgcactctgcgttttcccgtgtttggggctgaggcctgctggacagatggctggccaagtgggagcagaccctagggagtttgcacctcggctgggccggattcggaccggctctgtgttcactacactcagaatagcctggctgcttctctgtctccgagaccggaggtagtgggaaccaacagctgggctggagagttggtgctggcaaaacagtccttcccctggggccggttcttacccaggtccagagaaaccaacgcgggatgtcagacttcaccaaaaggactttctggttgcccctggctggcttcctggaggcgttcgcctctagtttctcagggatggagcgagagcccagccagagaacagtaagaggagctgctctcctatctgcactcacccaggccttcacccagactttaccacggaggcggctgagtgcagctacagctaggtccgcgtccctcactcttttcatcttctgcacgttcttcgtgaaactggaaggatcccgggtctcagctagaacacggtggaagagaactttcctaggaaacggttcatgtgtcacttttcaggatgtggaaacactgagccatacaccctccattgcttggtgctggggttgtgtggcctccactgggcacttgccgacctgagtctggggccaggggagcccaggctgccctgcactcctgcctcccagcccacagccaggtgctttcatcacagctaaacctggttccctccaaacctcccagccactcgggcttgtaactgtctgagccccggatccggtggggtgaaagcagccagctcatcccagtgactcacaggacacagccatccagcggcatctttccttgtcgaatgatactgtaatgaccttccaaagtgaagagtagcacattaaagtgattttattgtt

SEQ ID NO: 73912 - DNA, 2204 bp, Homo sapiens
tcgccatgttgtccaggctcaaaatatgagcattttaacacaaagtcaatatacaacatgattgatgcaattacattcctttttcatactaaatctttcaaatctaatctcaattcatattagccacatttcaagtcttaatagtcacagtagttcatggctaccatattacatagcacagagctgagaaacattgaccacactagcctctgctttttagaatttcccaagattttaggctgtttatctatgatgttgcccaaatgaataacgtgtttttggagaaactctgtcaccctttcattcccaggggtactttcattgaattccgaaatgggatgttaaacgtgtcccctattggaagaagctgcagccaagaagaacgcattgagttctacgaactcgataaaaaagaaaatataagacaaaagtttgtagcagatctacggaaagagtttgctggaaaaggcctcacgttttccataggaggccagatcagctttgatgtctttcctgatggatgggacaagagatactgtctgcgacatgtggaaaatgacggttataagaccatttatttctttggagacaaaactatgccaggtggcaatgaccatgagatcttcacagaccccagaaccatgggctactccgtgacagcgcctgaggacacgcgcaggatctgtgaactgctgttctcctaacgtgggagcgggaggggcggggtcccggctgacaagccagcatagggcattcggtggccagagccgagggtcctcccacacgtgctcacccacccgcagcctaggcaggctctgcatgctatgccaggcatgtgcagtctggacttccacctccagtgccagaaacttccagaaggaaggagaaaactcttgtcaagaatggcccagaggaatgcctcgcacaaaaggtcttccccacccacccccagcccactagtctaatacccaccctgatacgtgcaatcatgtagttttggcggaaatttccccatcattctaggatgatacagaaagaaaaactgtgcctggaccctccctcttggtgggtctgtggaaacataagcggtttttttaatgggcccctgcatcaataccaaacatgggggtttggtaatgagaaaccaggacaggccatctgcagtgacccagcccaggacgaagtttacaaacacctcctggaacgaagctcccgcctgcatgtcaccttgatgggggctgtgagtggggcagtgtgatacccagtgactagacgcactctgcgttttcccgtgtttggggctgaggcctgctggacagatggctggccaagtgggagcagaccctagggagtttgcacctcggctgggccggattcggaccggctctgtgttcactacactcagaatagcctggctgcttctctgtctccgagaccggaggtagtgggaaccaacagctgggctggagagttggtgctggcaaaacagtccttcccctggggccggttcttacccaggtccagagaaaccaacgcgggatgtcagacttcaccaaaaggactttctggttgcccctggctggcttcctggaggcgttcgcctctagtttctcagggatggagcgagagcccagccagagaacagtaagaggagctgctctcctatctgcactcacccaggccttcacccagactttaccacggaggcggctgagtgcagctacagctaggtccgcgtccctcactcttttcatcttctgcacgttcttcgtgaaactggaaggatcccgggtctcagctagaacacggtggaagagaactttcctaggaaacggttcatgtgtcacttttcaggatgtggaaacactgagccatacaccctccattgcttggtgctggggttgtgtggcctccactgggcacttgccgacctgagtctggggccaggggagcccaggctgccctgcactcctgcctcccagcccacagccaggtgctttcatcacagctaaacctggttccctccaaacctcccagccactcgggcttgtaactgtctgagccccggatccggtggggtgaaagcagccagctcatcccagtgactcacaggacacagccatccagcggcatctttccttgtcgaatgatactgtaatgaccttccaaagtgaagagtagcacattaaagtgattttattgtt

SEQ ID NO: 73913 - DNA, 2231 bp, Homo sapiens
cccggaagttccgggccgagttcctcgtgccaacgtgtcttgtaaggtgcggctagaaactggggacatggcagcgcctggcccagcgctctgcctcttcgacgtggatgggaccctcaccgccccgcggcagaaaattaccaaagaaatggatgacttcctacaaaaattgaggcagaagatcaaaatcggagtggtaggcggatcggactttgagaaagtgcaggagcaactgggaaatgatgaatattcaaagtcatctgggtgaggccctaatccaagatttaatcaactactgtctgagctacattgcgaaaattaaactcccgaagaagaggggtactttcattgaattccgaaatgggatgttaaacgtgtcccctattggaagaagctgcagccaagaagaacgcattgagttctacgaactcgataaaaaagaaaatataagacaaaagtttgtagcagatctacggaaagagtttgctggaaaaggcctcacgttttccataggaggccagatcagctttgatgtctttcctgatggatgggacaagagatactgtctgcgacatgtggaaaatgacggttataagaccatttatttctttggagacaaaactatgccaggtggcaatgaccatgagatcttcacagaccccagaaccatgggctactccgtgacagcgcctgaggacacgcgcaggatctgtgaactgctgttctcctaacgtgggagcgggaggggcggggtcccggctgacaagccagcatagggcattcggtggccagagccgagggtcctcccacacgtgctcacccacccgcagcctaggcaggctctgcatgctatgccaggcatgtgcagtctggacttccacctccagtgccagaaacttccagaaggaaggagaaaactcttgtcaagaatggcccagaggaatgcctcgcacaaaaggtcttccccacccacccccagcccactagtctaatacccaccctgatacgtgcaatcatgtagttttggcggaaatttccccatcattctaggatgatacagaaagaaaaactgtgcctggaccctccctcttggtgggtctgtggaaacataagcggtttttttaatgggcccctgcatcaataccaaacatgggggtttggtaatgagaaaccaggacaggccatctgcagtgacccagcccaggacgaagtttacaaacacctcctggaacgaagctcccgcctgcatgtcaccttgatgggggctgtgagtggggcagtgtgatacccagtgactagacgcactctgcgttttcccgtgtttggggctgaggcctgctggacagatggctggccaagtgggagcagaccctagggagtttgcacctcggctgggccggattcggaccggctctgtgttcactacactcagaatagcctggctgcttctctgtctccgagaccggaggtagtgggaaccaacagctgggctggagagttggtgctggcaaaacagtccttcccctggggccggttcttacccaggtccagagaaaccaacgcgggatgtcagacttcaccaaaaggactttctggttgcccctggctggcttcctggaggcgttcgcctctagtttctcagggatggagcgagagcccagccagagaacagtaagaggagctgctctcctatctgcactcacccaggccttcacccagactttaccacggaggcggctgagtgcagctacagctaggtccgcgtccctcactcttttcatcttctgcacgttcttcgtgaaactggaaggatcccgggtctcagctagaacacggtggaagagaactttcctaggaaacggttcatgtgtcacttttcaggatgtggaaacactgagccatacaccctccattgcttggtgctggggttgtgtggcctccactgggcacttgccgacctgagtctggggccaggggagcccaggctgccctgcactcctgcctcccagcccacagccaggtgctttcatcacagctaaacctggttccctccaaacctcccagccactcgggcttgtaactgtctgagccccggatccggtggggtgaaagcagccagctcatcccagtgactcacaggacacagccatccagcggcatctttccttgtcgaatgatactgtaatgaccttccaaagtgaagagtagcacattaaagtgattttattgtt

SEQ ID NO: 73914 - DNA, 2139 bp, Homo sapiens
cccggaagttccgggccgagttcctcgtgccaacgtgtcttgtaaggtgcggctagaaactggggacatggcagcgcctggcccagcgctctgcctcttcgacgtggatgggaccctcaccgccccgcggcagaaaattaccaaagaaatggatgacttcctacaaaaattgaggcagaagatcaaaatcggagtggtaggcggatcggactttgagaaagtgcaggagcaactgggaaatgatggggtactttcattgaattccgaaatgggatgttaaacgtgtcccctattggaagaagctgcagccaagaagaacgcattgagttctacgaactcgataaaaaagaaaatataagacaaaagtttgtagcagatctacggaaagagtttgctggaaaaggcctcacgttttccataggaggccagatcagctttgatgtctttcctgatggatgggacaagagatactgtctgcgacatgtggaaaatgacggttataagaccatttatttctttggagacaaaactatgccaggtggcaatgaccatgagatcttcacagaccccagaaccatgggctactccgtgacagcgcctgaggacacgcgcaggatctgtgaactgctgttctcctaacgtgggagcgggaggggcggggtcccggctgacaagccagcatagggcattcggtggccagagccgagggtcctcccacacgtgctcacccacccgcagcctaggcaggctctgcatgctatgccaggcatgtgcagtctggacttccacctccagtgccagaaacttccagaaggaaggagaaaactcttgtcaagaatggcccagaggaatgcctcgcacaaaaggtcttccccacccacccccagcccactagtctaatacccaccctgatacgtgcaatcatgtagttttggcggaaatttccccatcattctaggatgatacagaaagaaaaactgtgcctggaccctccctcttggtgggtctgtggaaacataagcggtttttttaatgggcccctgcatcaataccaaacatgggggtttggtaatgagaaaccaggacaggccatctgcagtgacccagcccaggacgaagtttacaaacacctcctggaacgaagctcccgcctgcatgtcaccttgatgggggctgtgagtggggcagtgtgatacccagtgactagacgcactctgcgttttcccgtgtttggggctgaggcctgctggacagatggctggccaagtgggagcagaccctagggagtttgcacctcggctgggccggattcggaccggctctgtgttcactacactcagaatagcctggctgcttctctgtctccgagaccggaggtagtgggaaccaacagctgggctggagagttggtgctggcaaaacagtccttcccctggggccggttcttacccaggtccagagaaaccaacgcgggatgtcagacttcaccaaaaggactttctggttgcccctggctggcttcctggaggcgttcgcctctagtttctcagggatggagcgagagcccagccagagaacagtaagaggagctgctctcctatctgcactcacccaggccttcacccagactttaccacggaggcggctgagtgcagctacagctaggtccgcgtccctcactcttttcatcttctgcacgttcttcgtgaaactggaaggatcccgggtctcagctagaacacggtggaagagaactttcctaggaaacggttcatgtgtcacttttcaggatgtggaaacactgagccatacaccctccattgcttggtgctggggttgtgtggcctccactgggcacttgccgacctgagtctggggccaggggagcccaggctgccctgcactcctgcctcccagcccacagccaggtgctttcatcacagctaaacctggttccctccaaacctcccagccactcgggcttgtaactgtctgagccccggatccggtggggtgaaagcagccagctcatcccagtgactcacaggacacagccatccagcggcatctttccttgtcgaatgatactgtaatgaccttccaaagtgaagagtagcacattaaagtgattttattgtt

SEQ ID NO: 73915 - DNA, 2022 bp, Homo sapiens
  misc_feature (27)..(27): n is a, c, g, or t
aacttatggctaggtcaggctggtgtnatcggccgagggaaactggggacatggcagcgcctggcccagcgctctgcctcttcgacgtggatgggaccctcaccgccccgcggcagaaaattaccaaagaaatggatgacttcctacaaaaattgaggcagaagatcaaaatcggagtggtaggcggatcggactttgagaaagtgcaggagcaactgggaaatgatgaaagaaaatataagacaaaagtttgtagcagatctacggaaagagtttgctggaaaaggcctcacgttttccataggaggccagatcagctttgatgtctttcctgatggatgggacaagagatactgtctgcgacatgtggaaaatgacggttataagaccatttatttctttggagacaaaactatgccaggtggcaatgaccatgagatcttcacagaccccagaaccatgggctactccgtgacagcgcctgaggacacgcgcaggatctgtgaactgctgttctcctaacgtgggagcgggaggggcggggtcccggctgacaagccagcatagggcattcggtggccagagccgagggtcctcccacacgtgctcacccacccgcagcctaggcaggctctgcatgctatgccaggcatgtgcagtctggacttccacctccagtgccagaaacttccagaaggaaggagaaaactcttgtcaagaatggcccagaggaatgcctcgcacaaaaggtcttccccacccacccccagcccactagtctaatacccaccctgatacgtgcaatcatgtagttttggcggaaatttccccatcattctaggatgatacagaaagaaaaactgtgcctggaccctccctcttggtgggtctgtggaaacataagcggtttttttaatgggcccctgcatcaataccaaacatgggggtttggtaatgagaaaccaggacaggccatctgcagtgacccagcccaggacgaagtttacaaacacctcctggaacgaagctcccgcctgcatgtcaccttgatgggggctgtgagtggggcagtgtgatacccagtgactagacgcactctgcgttttcccgtgtttggggctgaggcctgctggacagatggctggccaagtgggagcagaccctagggagtttgcacctcggctgggccggattcggaccggctctgtgttcactacactcagaatagcctggctgcttctctgtctccgagaccggaggtagtgggaaccaacagctgggctggagagttggtgctggcaaaacagtccttcccctggggccggttcttacccaggtccagagaaaccaacgcgggatgtcagacttcaccaaaaggactttctggttgcccctggctggcttcctggaggcgttcgcctctagtttctcagggatggagcgagagcccagccagagaacagtaagaggagctgctctcctatctgcactcacccaggccttcacccagactttaccacggaggcggctgagtgcagctacagctaggtccgcgtccctcactcttttcatcttctgcacgttcttcgtgaaactggaaggatcccgggtctcagctagaacacggtggaagagaactttcctaggaaacggttcatgtgtcacttttcaggatgtggaaacactgagccatacaccctccattgcttggtgctggggttgtgtggcctccactgggcacttgccgacctgagtctggggccaggggagcccaggctgccctgcactcctgcctcccagcccacagccaggtgctttcatcacagctaaacctggttccctccaaacctcccagccactcgggcttgtaactgtctgagccccggatccggtggggtgaaagcagccagctcatcccagtgactcacaggacacagccatccagcggcatctttccttgtcgaatgatactgtaatgaccttccaaagtgaagagtagcacattaaagtgattttattgtt

SEQ ID NO: 73916 - DNA, 963 bp, Homo sapiens
taaggatcccggccgcggactatgtgactagacgcactctgcgttttcccgtgtttggggctgaggcctgctggacagatggctggccaagtgggagcagaccctagggagtttgcacctcggctgggccggattcggaccggctctgtgttcactacactcagaatagcctggctgcttctctgtctccgagaccggaggtagtgggaaccaacagctgggctggagagttggtgctggcaaaacagtccttcccctggggccggttcttacccaggtccagagaaaccaacgcgggatgtcagacttcaccaaaaggactttctggttgcccctggctggcttcctggaggcgttcgcctctagtttctcagggatggagcgagagcccagccagagaacagtaagaggagctgctctcctatctgcactcacccaggccttcacccagactttaccacggaggcggctgagtgcagctacagctaggtccgcgtccctcactcttttcatcttctgcacgttcttcgtgaaactggaaggatcccgggtctcagctagaacacggtggaagagaactttcctaggaaacggttcatgtgtcacttttcaggatgtggaaacactgagccatacaccctccattgcttggtgctggggttgtgtggcctccactgggcacttgccgacctgagtctggggccaggggagcccaggctgccctgcactcctgcctcccagcccacagccaggtgctttcatcacagctaaacctggttccctccaaacctcccagccactcgggcttgtaactgtctgagccccggatccggtggggtgaaagcagccagctcatcccagtgactcacaggacacagccatccagcggcatctttccttgtcgaatgatactgtaatgaccttccaaagtgaagagtagcacattaaagtgattttattgtt

SEQ ID NO: 73917 - DNA, 2308 bp, Homo sapiens
cccggaagttccgggccgagttcctcgtgccaacgtgtcttgtaaggtgcggctagaaactggggacatggcagcgcctggcccagcgctctgcctcttcgacgtggatgggaccctcaccgccccgcggcagaaaattaccaaagaaatggatgacttcctacaaaaattgaggcagaagatcaaaatcggagtggtaggcggatcggactttgagaaagtgcaggagcaactgggaaatgatgtggttgaaaaatacgattatgtgtttccagaaaatggcttggtagcatacaaagatgggaaactcttgtgtagacagaatattcaaagtcatctgggtgaggccctaatccaagatttaatcaactactgtctgagctacattgcgaaaattaaactcccgaagaagaggggtactttcattgaattccgaaatgggatgttaaacgtgtcccctattggaagaagctgcagccaagaagaacgcattgagttctacgaactcgataaaaaagaaaatataagacaaaagtttgtagcagatctacggaaagagtttgctggaaaaggcctcacgttttccataggaggccagatcagctttgatgtctttcctgatggatgggacaagagatactgtctgcgacatgtggaaaatgacggttataagaccatttatttctttggagacaaaactatgccaggtggcaatgaccatgagatcttcacagaccccagaaccatgggctactccgtgacagcgcctgaggacacgcgcaggatctgtgaactgctgttctcctaacgtgggagcgggaggggcggggtcccggctgacaagccagcatagggcattcggtggccagagccgagggtcctcccacacgtgctcacccacccgcagcctaggcaggctctgcatgctatgccaggcatgtgcagtctggacttccacctccagtgccagaaacttccagaaggaaggagaaaactcttgtcaagaatggcccagaggaatgcctcgcacaaaaggtcttccccacccacccccagcccactagtctaatacccaccctgatacgtgcaatcatgtagttttggcggaaatttccccatcattctaggatgatacagaaagaaaaactgtgcctggaccctccctcttggtgggtctgtggaaacataagcggtttttttaatgggcccctgcatcaataccaaacatgggggtttggtaatgagaaaccaggacaggccatctgcagtgacccagcccaggacgaagtttacaaacacctcctggaacgaagctcccgcctgcatgtcaccttgatgggggctgtgagtggggcagtgtgatacccagtgactagacgcactctgcgttttcccgtgtttggggctgaggcctgctggacagatggctggccaagtgggagcagaccctagggagtttgcacctcggctgggccggattcggaccggctctgtgttcactacactcagaatagcctggctgcttctctgtctccgagaccggaggtagtgggaaccaacagctgggctggagagttggtgctggcaaaacagtccttcccctggggccggttcttacccaggtccagagaaaccaacgcgggatgtcagacttcaccaaaaggactttctggttgcccctggctggcttcctggaggcgttcgcctctagtttctcagggatggagcgagagcccagccagagaacagtaagaggagctgctctcctatctgcactcacccaggccttcacccagactttaccacggaggcggctgagtgcagctacagctaggtccgcgtccctcactcttttcatcttctgcacgttcttcgtgaaactggaaggatcccgggtctcagctagaacacggtggaagagaactttcctaggaaacggttcatgtgtcacttttcaggatgtggaaacactgagccatacaccctccattgcttggtgctggggttgtgtggcctccactgggcacttgccgacctgagtctggggccaggggagcccaggctgccctgcactcctgcctcccagcccacagccaggtgctttcatcacagctaaacctggttccctccaaacctcccagccactcgggcttgtaactgtctgagccccggatccggtggggtgaaagcagccagctcatcccagtgactcacaggacacagccatccagcggcatctttccttgtcgaatgatactgtaatgaccttccaaagtgaagagtagcacattaaagtgattttattgtt

SEQ ID NO: 73918 - DNA, 2291 bp, Homo sapiens
  misc_feature (27)..(27): n is a, c, g, or t
aacttatggctaggtcaggctggtgtnatcggccgagggaaactggggacatggcagcgcctggcccagcgctctgcctcttcgacgtggatgggaccctcaccgccccgcggcagaaaattaccaaagaaatggatgacttcctacaaaaattgaggcagaagatcaaaatcggagtggtaggcggatcggactttgagaaagtgcaggagcaactgggaaatgatgtggttgaaaaatacgattatgtgtttccagaaaatggcttggtagcatacaaagatgggaaactcttgtgtagacagaatattcaaagtcatctgggtgaggccctaatccaagatttaatcaactactgtctgagctacattgcgaaaattaaactcccgaagaagaggggtactttcattgaattccgaaatgggatgttaaacgtgtcccctattggaagaagctgcagccaagaagaacgcattgagttctacgaactcgataaaaaagaaaatataagacaaaagtttgtagcagatctacggaaagagtttgctggaaaaggcctcacgttttccataggaggccagatcagctttgatgtctttcctgatggatgggacaagagatactgtctgcgacatgtggaaaatgacggttataagaccatttatttctttggagacaaaactatgccaggtggcaatgaccatgagatcttcacagaccccagaaccatgggctactccgtgacagcgcctgaggacacgcgcaggatctgtgaactgctgttctcctaacgtgggagcgggaggggcggggtcccggctgacaagccagcatagggcattcggtggccagagccgagggtcctcccacacgtgctcacccacccgcagcctaggcaggctctgcatgctatgccaggcatgtgcagtctggacttccacctccagtgccagaaacttccagaaggaaggagaaaactcttgtcaagaatggcccagaggaatgcctcgcacaaaaggtcttccccacccacccccagcccactagtctaatacccaccctgatacgtgcaatcatgtagttttggcggaaatttccccatcattctaggatgatacagaaagaaaaactgtgcctggaccctccctcttggtgggtctgtggaaacataagcggtttttttaatgggcccctgcatcaataccaaacatgggggtttggtaatgagaaaccaggacaggccatctgcagtgacccagcccaggacgaagtttacaaacacctcctggaacgaagctcccgcctgcatgtcaccttgatgggggctgtgagtggggcagtgtgatacccagtgactagacgcactctgcgttttcccgtgtttggggctgaggcctgctggacagatggctggccaagtgggagcagaccctagggagtttgcacctcggctgggccggattcggaccggctctgtgttcactacactcagaatagcctggctgcttctctgtctccgagaccggaggtagtgggaaccaacagctgggctggagagttggtgctggcaaaacagtccttcccctggggccggttcttacccaggtccagagaaaccaacgcgggatgtcagacttcaccaaaaggactttctggttgcccctggctggcttcctggaggcgttcgcctctagtttctcagggatggagcgagagcccagccagagaacagtaagaggagctgctctcctatctgcactcacccaggccttcacccagactttaccacggaggcggctgagtgcagctacagctaggtccgcgtccctcactcttttcatcttctgcacgttcttcgtgaaactggaaggatcccgggtctcagctagaacacggtggaagagaactttcctaggaaacggttcatgtgtcacttttcaggatgtggaaacactgagccatacaccctccattgcttggtgctggggttgtgtggcctccactgggcacttgccgacctgagtctggggccaggggagcccaggctgccctgcactcctgcctcccagcccacagccaggtgctttcatcacagctaaacctggttccctccaaacctcccagccactcgggcttgtaactgtctgagccccggatccggtggggtgaaagcagccagctcatcccagtgactcacaggacacagccatccagcggcatctttccttgtcgaatgatactgtaatgaccttccaaagtgaagagtagcacattaaagtgattttattgtt

SEQ ID NO: 73919 - DNA, 2131 bp, Homo sapiens
cccggaagttccgggccgagttcctcgtgccaacgtgtcttgtaaggtgcggctagaaactggggacatggcagcgcctggcccagcgctctgcctcttcgacgtggatgggaccctcaccgccccgcggcagaaaattaccaaagaaatggatgacttcctacaaaaattgaggcagaagatcaaaatcggagtggtaggcggatcggactttgagaaagtgcaggagcaactgggaaatgatgaatattcaaagtcatctgggtgaggccctaatccaagatttaatcaactactgtctgagctacattgcgaaaattaaactcccgaagaagagaaagaaaatataagacaaaagtttgtagcagatctacggaaagagtttgctggaaaaggcctcacgttttccataggaggccagatcagctttgatgtctttcctgatggatgggacaagagatactgtctgcgacatgtggaaaatgacggttataagaccatttatttctttggagacaaaactatgccaggtggcaatgaccatgagatcttcacagaccccagaaccatgggctactccgtgacagcgcctgaggacacgcgcaggatctgtgaactgctgttctcctaacgtgggagcgggaggggcggggtcccggctgacaagccagcatagggcattcggtggccagagccgagggtcctcccacacgtgctcacccacccgcagcctaggcaggctctgcatgctatgccaggcatgtgcagtctggacttccacctccagtgccagaaacttccagaaggaaggagaaaactcttgtcaagaatggcccagaggaatgcctcgcacaaaaggtcttccccacccacccccagcccactagtctaatacccaccctgatacgtgcaatcatgtagttttggcggaaatttccccatcattctaggatgatacagaaagaaaaactgtgcctggaccctccctcttggtgggtctgtggaaacataagcggtttttttaatgggcccctgcatcaataccaaacatgggggtttggtaatgagaaaccaggacaggccatctgcagtgacccagcccaggacgaagtttacaaacacctcctggaacgaagctcccgcctgcatgtcaccttgatgggggctgtgagtggggcagtgtgatacccagtgactagacgcactctgcgttttcccgtgtttggggctgaggcctgctggacagatggctggccaagtgggagcagaccctagggagtttgcacctcggctgggccggattcggaccggctctgtgttcactacactcagaatagcctggctgcttctctgtctccgagaccggaggtagtgggaaccaacagctgggctggagagttggtgctggcaaaacagtccttcccctggggccggttcttacccaggtccagagaaaccaacgcgggatgtcagacttcaccaaaaggactttctggttgcccctggctggcttcctggaggcgttcgcctctagtttctcagggatggagcgagagcccagccagagaacagtaagaggagctgctctcctatctgcactcacccaggccttcacccagactttaccacggaggcggctgagtgcagctacagctaggtccgcgtccctcactcttttcatcttctgcacgttcttcgtgaaactggaaggatcccgggtctcagctagaacacggtggaagagaactttcctaggaaacggttcatgtgtcacttttcaggatgtggaaacactgagccatacaccctccattgcttggtgctggggttgtgtggcctccactgggcacttgccgacctgagtctggggccaggggagcccaggctgccctgcactcctgcctcccagcccacagccaggtgctttcatcacagctaaacctggttccctccaaacctcccagccactcgggcttgtaactgtctgagccccggatccggtggggtgaaagcagccagctcatcccagtgactcacaggacacagccatccagcggcatctttccttgtcgaatgatactgtaatgaccttccaaagtgaagagtagcacattaaagtgattttattgtt

SEQ ID NO: 73920 - DNA, 2208 bp, Homo sapiens
cccggaagttccgggccgagttcctcgtgccaacgtgtcttgtaaggtgcggctagaaactggggacatggcagcgcctggcccagcgctctgcctcttcgacgtggatgggaccctcaccgccccgcggcagaaaattaccaaagaaatggatgacttcctacaaaaattgaggcagaagatcaaaatcggagtggtaggcggatcggactttgagaaagtgcaggagcaactgggaaatgatgtggttgaaaaatacgattatgtgtttccagaaaatggcttggtagcatacaaagatgggaaactcttgtgtagacagaatattcaaagtcatctgggtgaggccctaatccaagatttaatcaactactgtctgagctacattgcgaaaattaaactcccgaagaagagaaagaaaatataagacaaaagtttgtagcagatctacggaaagagtttgctggaaaaggcctcacgttttccataggaggccagatcagctttgatgtctttcctgatggatgggacaagagatactgtctgcgacatgtggaaaatgacggttataagaccatttatttctttggagacaaaactatgccaggtggcaatgaccatgagatcttcacagaccccagaaccatgggctactccgtgacagcgcctgaggacacgcgcaggatctgtgaactgctgttctcctaacgtgggagcgggaggggcggggtcccggctgacaagccagcatagggcattcggtggccagagccgagggtcctcccacacgtgctcacccacccgcagcctaggcaggctctgcatgctatgccaggcatgtgcagtctggacttccacctccagtgccagaaacttccagaaggaaggagaaaactcttgtcaagaatggcccagaggaatgcctcgcacaaaaggtcttccccacccacccccagcccactagtctaatacccaccctgatacgtgcaatcatgtagttttggcggaaatttccccatcattctaggatgatacagaaagaaaaactgtgcctggaccctccctcttggtgggtctgtggaaacataagcggtttttttaatgggcccctgcatcaataccaaacatgggggtttggtaatgagaaaccaggacaggccatctgcagtgacccagcccaggacgaagtttacaaacacctcctggaacgaagctcccgcctgcatgtcaccttgatgggggctgtgagtggggcagtgtgatacccagtgactagacgcactctgcgttttcccgtgtttggggctgaggcctgctggacagatggctggccaagtgggagcagaccctagggagtttgcacctcggctgggccggattcggaccggctctgtgttcactacactcagaatagcctggctgcttctctgtctccgagaccggaggtagtgggaaccaacagctgggctggagagttggtgctggcaaaacagtccttcccctggggccggttcttacccaggtccagagaaaccaacgcgggatgtcagacttcaccaaaaggactttctggttgcccctggctggcttcctggaggcgttcgcctctagtttctcagggatggagcgagagcccagccagagaacagtaagaggagctgctctcctatctgcactcacccaggccttcacccagactttaccacggaggcggctgagtgcagctacagctaggtccgcgtccctcactcttttcatcttctgcacgttcttcgtgaaactggaaggatcccgggtctcagctagaacacggtggaagagaactttcctaggaaacggttcatgtgtcacttttcaggatgtggaaacactgagccatacaccctccattgcttggtgctggggttgtgtggcctccactgggcacttgccgacctgagtctggggccaggggagcccaggctgccctgcactcctgcctcccagcccacagccaggtgctttcatcacagctaaacctggttccctccaaacctcccagccactcgggcttgtaactgtctgagccccggatccggtggggtgaaagcagccagctcatcccagtgactcacaggacacagccatccagcggcatctttccttgtcgaatgatactgtaatgaccttccaaagtgaagagtagcacattaaagtgattttattgtt

SEQ ID NO: 73921 - DNA, 1785 bp, Homo sapiens
gagcacgtgtgtttttatgagaattatgccgagataggtaacagatgaggatgaaatttgagctttggagggggatacctgatatcctttggagagtaaatgctgaaggagcagaagtgtgtcttgttgagaagattcaaaggaggggctacaaagaagaaggtcatcaatatattaaataagggtggcaatgaccatgagatcttcacagaccccagaaccatgggctactccgtgacagcgcctgaggacacgcgcaggatctgtgaactgctgttctcctaacgtgggagcgggaggggcggggtcccggctgacaagccagcatagggcattcggtggccagagccgagggtcctcccacacgtgctcacccacccgcagcctaggcaggctctgcatgctatgccaggcatgtgcagtctggacttccacctccagtgccagaaacttccagaaggaaggagaaaactcttgtcaagaatggcccagaggaatgcctcgcacaaaaggtcttccccacccacccccagcccactagtctaatacccaccctgatacgtgcaatcatgtagttttggcggaaatttccccatcattctaggatgatacagaaagaaaaactgtgcctggaccctccctcttggtgggtctgtggaaacataagcggtttttttaatgggcccctgcatcaataccaaacatgggggtttggtaatgagaaaccaggacaggccatctgcagtgacccagcccaggacgaagtttacaaacacctcctggaacgaagctcccgcctgcatgtcaccttgatgggggctgtgagtggggcagtgtgatacccagtgactagacgcactctgcgttttcccgtgtttggggctgaggcctgctggacagatggctggccaagtgggagcagaccctagggagtttgcacctcggctgggccggattcggaccggctctgtgttcactacactcagaatagcctggctgcttctctgtctccgagaccggaggtagtgggaaccaacagctgggctggagagttggtgctggcaaaacagtccttcccctggggccggttcttacccaggtccagagaaaccaacgcgggatgtcagacttcaccaaaaggactttctggttgcccctggctggcttcctggaggcgttcgcctctagtttctcagggatggagcgagagcccagccagagaacagtaagaggagctgctctcctatctgcactcacccaggccttcacccagactttaccacggaggcggctgagtgcagctacagctaggtccgcgtccctcactcttttcatcttctgcacgttcttcgtgaaactggaaggatcccgggtctcagctagaacacggtggaagagaactttcctaggaaacggttcatgtgtcacttttcaggatgtggaaacactgagccatacaccctccattgcttggtgctggggttgtgtggcctccactgggcacttgccgacctgagtctggggccaggggagcccaggctgccctgcactcctgcctcccagcccacagccaggtgctttcatcacagctaaacctggttccctccaaacctcccagccactcgggcttgtaactgtctgagccccggatccggtggggtgaaagcagccagctcatcccagtgactcacaggacacagccatccagcggcatctttccttgtcgaatgatactgtaatgaccttccaaagtgaagagtagcacattaaagtgattttattgtt

SEQ ID NO: 73922 - DNA, 286 bp, Homo sapiens
gtatttttagtagagacggggtttcaccgtgttagccaggatggtctcgatctcctgaccttgtgatctgcctgcctcggcctcccaaagtgctgggattacagatttgagtcaccttgcccggccagaaaactttaaactccatttatcttctttcaacttttgtgtgattgctgtcatatattttaaatcaatacatattttaaacccatagatattataattatggtttgaaacagtcctgaatgtgcatggattcatgcacattttctgttttagtggttct

SEQ ID NO: 73923 - DNA, 703 bp, Homo sapiens
  misc_feature (676)..(676): n is a, c, g, or t
atttctgtcatttcagccagctcagcctggttaagaacccttattaaagaactgatgtggtcattttaagacatgtgacactctggtcatttgaattactggagttcttgcattggttctttcttttctctgtgtgcctttgggagcctcttcccagggaaactctgtgtcactaacagtgggtatgctcagccatggctggggtgactgttctgcattcatgagccatgggccctgcctagtgaagagtaggggcaggggttcctagggaggagaggctgcactcctgtctgtatggtggctgtagtgtgctaaaaaagtcctttaactgcagtgtagtttgagtaattaatagacttccattctggatggtttcataggactcaagctttgtgcaaggtctttatttgttgctgacttcttttgtttgatttcatggggatgggtatgttagcgatatggtttggctctgtgtccccacccaaatctcaccttgaattgtaatccccataatccccacgtgtcaagggtgggaccaggtggaggtaattggatcataggggtggttttccccatgctgttctcgtgatagtgagtgagtctcatgagacctaatggttttataggtgtccagcatttcccctgctggcactcactctgtcctgccactctgtgnagaaggtgcctgtttctcctttgcctt

SEQ ID NO: 73924 - DNA, 374 bp, Homo sapiens
aaatattagtgacatcattgtctgcagtttaaccctagaagagtagtatctaaggacacagagtacttgccagctacttgaatgcattatttcagctgatgtgatttatattttgaaatatgagccagactgatggaattgactgacctatcttacagctataggactgtaattgagatcaagttctgttaagtttctgaaggcatgggtatgcggtttgctcaagagcattttttcacatttgtgttaggatagtaaattaccttgaaaactggaaacacattttaacaacattaaattggatttattcatttagtgtagatactgtagttcctaggtttgtaaactgtggcaagatgagttatatactgaaa

SEQ ID NO: 73925 - DNA, 425 bp, Homo sapiens
accatagcatgatctccacattaaacaactaattatcctaagaaaaattaacttggcaaggtagcatccactgttggttattaactaatattaataattgtcacattcatttaaaatgttggcacaagattcagtctccttctctatcccaagtaattccatgagtctggcttcagggagcatataagatattcaaccaacaacctagccttacagttctctgacctccttaaaaaataaataaatcaccaatgacctttagctccatttcactttgacacacaagctcccagggccacatcctgaactttatcatccatcacctagaagtgcttcatttctgaaataaaattcaaatgtctcatcctatgataacagtcttttactccgccagtcaccttccctttcttgcactccacctattt

SEQ ID NO: 73926 - DNA, 737 bp, Homo sapiens
agaaggggtagatgctggtgcgtggtctcagaccagtggaacaacctggaatgcatgttagaaatgcagattctccttcctcagtgcagactcattattcagaatctttgggggtcacacagtagaatctgcattgcaaacaggaactgtgatgtttcatatacactgtaaatgagaacctactgctgtggaagtgggaaaaccatttaggtagctgttaaagtagtcttatcttggtgagtggtgatgagatgaatttgagatatattttggaggaaggattagcaggaaatggggacaggtaggtatggctaaagaggattgaaaggtgtttacagtttgggtgacatatgacatacacatgcatatataatttttaaaaatagttgtgcttatacctgtagcctatgcttatttttataccttgatttgtcctcataacatattgaacaggcattttaaaatttaaacaacattctgtgtggaaaaaaatggaaatgggcttttattttcccttctaatgatccctctttttttaaagttagaaaagttttatcttccaagataaatggatagtcaacagttgcctattaacgttgatactagtatttcttcagagttgtacagaaaatgaattcttttggaagaaagaagaattccattttgagagttgaagaatgtgtttatttgttgggtttttgttggtgggtttgtggtatggttggactagtcggtat

SEQ ID NO: 73927 - DNA, 651 bp, Homo sapiens
atccagaggattcccgactagtccaaccatacacagtagaatctgcattgcaaacaggaactgtgatgtttcatatacactgtaaatgagaacctactgctgtggaagtgggaaaaccatttaggtagctgttaaagtagtcttatcttggtgagtggtgatgagatgaatttgagatatattttggaggaaggattagcaggaaatggggacaggtaggtatggctaaagaggattgaaaggtgtttacagtttgggtgacatatgacatacacatgcatatataatttttaaaaatagttgtgcttatacctgtagcctatgcttatttttataccttgatttgtcctcataacatattgaacaggcattttaaaatttaaacaacattctgtgtggaaaaaaatggaaatgggcttttattttcccttctaatgatccctctttttttaaagttagaaaagttttatcttccaagataaatggatagtcaacagttgcctattaacgttgatactagtatttcttcagagttgtacagaaaatgaattcttttggaagaaagaagaattccattttgagagttgaagaatgtgtttatttgttgggtttttgttggtgggtttgtggtatggttggactagtcggtat

SEQ ID NO: 73928 - DNA, 231 bp, Homo sapiens
ttaaagcaggcaagtagacattacaattctatgttaaaataagaagtgggatgttaatttaagagttgatctggtgaagactataactgcttgttcaaggatatgttaaaagattatcttgaagctttgacaagttcatattatagcatttgatggatcctatatacaaaggacttggaaatagccttcctaccctatattgggggatatatgtaatacgggacattttct

SEQ ID NO: 73929 - DNA, 322 bp, Homo sapiens
ggaggtgtgcccaggtctcagctgaggagggaagggatgcctgtaggagctgtggtcgtccataagatgttgtgggcagcagataccactcacaggcagagggcagaccctgccgtgtggctggaccacggatctgggggctcctgagcctggaggcagactcagtcgaggtaaaggctcaatggccacagccgaaatgtccccacccagctgggcctcagcatcatctatcaaggactggagagtcccccagcagtggacataccagggccaccactgatgaatgtccaaacctgttcagattttaaacttttttctttta

SEQ ID NO: 73930 - DNA, 356 bp, Homo sapiens
ggtgggaactgcagcactaggtgatgttgaagtctgagtgatgatggcacattaggtgagcccagaggtgctgtgaggagtgtagaataaggccgctgctttggagtgcagtctggggtcaaactaaaaggcataccttggagaaaccatgggtttgcttctagaccattgcaatacagcaaatactgcaataaagcaagtcccatgaaatgtttggtttccaagtgcatataaaatgcttttataggctgtaatgtagtctactaagtatgcagtagcattatgtctaaaaaagccaatgtatgtaccttaattttaaaatactttgttgctaaaaaatgctaatgatcatctga

SEQ ID NO: 73931 - DNA, 926 bp, Homo sapiens
aataacaccagctgattctgtgctaaacattctctcagatggtccccacgctaagtactgttagtcttttcgaaccagtaagtcaatttagaaaggctagctaatttgtctaaggtctccttggctggtaagtgactagcatactttaaaactgaggtttgtcagactggaagtcctttcctttacacactgagctgtgtgctttcctgagcttacttctctattccttttttccctcacatcattccacttcactctttaaccaccagctatttgtaattccttcttctaaggcatagtgaaaacttgctgcctgtctaaaaatgctttaagggaaacaaacattaaaaaaaaaaagtatttctgacagttttttggaacactttgataaaggatattaaacattttagcatccccaggatacaagaagataaaagaatgaggcacaggcaaagtaaaggtagttttccttatgcacatagttttgagtttcatagctgttgaattcctcacgtttaataaaagcttgagaccaagctgtgtagtgggaagattaggcaaagtgcaaaagcactttaagctatttgaaatgctaacaactccttaaataactgttggcttggaccttgtgctcattctgcatccgggtgtataaagcacctgcctgtgaacaaaagtcaaataacttactgagtaacttatacatagggtagagaggctacatagattattttgcatcaaatattctatcatcaaaaaagttaaataatgcagacaacattacttacaaataaaattgacgtgaacagaaaaatagttgatttggaatcattttcatttaaaatattttctctttgtcctctgtgccattccccctctaacatattttaaagcaaaaggacctctattggaccaaaaaaagaaaa

SEQ ID NO: 73932 - DNA, 919 bp, Homo sapiens
agagagagagagagagagagagagagagagagagagagatcaaaggcttgtagttttgggtagtccttgttctttggaaatacacagtgctgaccagacagcctccccctgtcccctctatgacctcgccctccacaaatgggaaaaccagactacttgggagcaccgcctgtgaaataccaacctgaagacaccgttcattcaggcaacgcacaaaacagaaaatgaaggtggaacaagcacagatgttcttcaactgtttttgtctacactctttctcttttcctctaccatgctgaaggctgaaagacaggaagatggtgccatcagcaaatattattcttaattgaaaacttgaaatgtgtatgtttcttactaatttttaaaaatgtattccttgccagggcaggcaaggtggctcacgcctgtaatcccagcacttcaggaggctgaggtgggcggatcacctgaggtcaggagtttgagaccagcctgatgaaaccctgtctctactaaaaatacaagaattagccgggcgtggtggcgcatgcctgtagtatcagctactcaagaggctgaggtgagattatcgcttgaacccaggaaacggaggttgtagtgagcggagatcgcgccactgcactccagcctgagtgacagagtgagaatccatctcaaaaaaagacaaaaaacaaaattgcttgctaaagaagtggtctcctgaggtcttaagacattcctgacagtgtcttgagtgggtgggagagaggttgctgtcattgcgctgtggaatttcacagatgagaaccacgcctagccaaaatcacttttcctgtttgcctcagtgacacagctgcagggaccctcgtggatgttgtattaaataaatttgacctttactctttgcaaaaaaaaaaaa

SEQ ID NO: 73933 - DNA, 3683 bp, Homo sapiens
gaattccgggagaagtgaccagagcaatttctgcttttcacagggcgggtttctcaacggtgacttgtgggcagtgccttctgctgagcgagtcatggcccgaaggcagaactaactgtgcctgcagtcttcactctcaggatgcagccgaggtgggcccaaggggccacgatgtggcttggagtcctgctgacccttctgctctgttcaagccttgagggtcaagaaaactctttcacaatcaacagtgttgacatgaagagcctgccggactggacggtgcaaaatgggaagaacctgaccctgcagtgcttcgcggatgtcagcaccacctctcacgtcaagcctcagcaccagatgctgttctataaggatgacgtgctgttttacaacatctcctccatgaagagcacagagagttattttattcctgaagtccggatctatgactcagggacatataaatgtactgtgattgtgaacaacaaagagaaaaccactgcagagtaccagctgttggtggaaggagtgcccagtcccagggtgacactggacaagaaagaggccatccaaggtgggatcgtgagggtcaactgttctgtcccagaggaaaaggccccaatacacttcacaattgaaaaacttgaactaaatgaaaaaatggtcaagctgaaaagagagaagaattctcgagaccagaattttgtgatactggaattccccgttgaggaacaggaccgcgttttatccttccgatgtcaagctaggatcatttctgggatccatatgcagacctcagaatctaccaagagtgaactggtcaccgtgacggaatccttctctacacccaagttccacatcagccccaccggaatgatcatggaaggagctcagctccacattaagtgcaccattcaagtgactcacctggcccaggagtttccagaaatcataattcagaaggacaaggcgattgtggcccacaacagacatggcaacaaggctgtgtactcagtcatggccatggtggagcacagtggcaactacacgtgcaaagtggagtccagccgcatatccaaggtcagcagcatcgtggtcaacataacagaactattttccaagcccgaactggaatcttccttcacacatctggaccaaggtgaaagactgaacctgtcctgctccatcccaggagcacctccagccaacttcaccatccagaaggaagatacgattgtgtcacagactcaagatttcaccaagatagcctcaaagtcggacagtgggacgtatatctgcactgcaggtattgacaaagtggtcaagaaaagcaacacagtccagatagtcgtatgtgaaatgctctcccagcccaggatttcttatgatgcccagtttgaggtcataaaaggacagaccatcgaagtccgttgcgaatcgatcagtggaactttgcctatttcttaccaacttttaaaaacaagtaaagttttggagaatagtaccaagaactcaaatgatcctgcggtattcaaagacaaccccactgaagacgtcgaataccagtgtgttgcagataattgccattcccatgccaaaatgttaagtgaggttctgagggtgaaggtgatagccccggtggatgaggtccagatttctatcctgtcaagtaaggtggtggagtctggagaggacattgtgctgcaatgtgctgtgaatgaaggatctggtcccatcacctataagttttacagagaaaaagagggcaaacccttctatcaaatgacctcaaatgccacccaggcattttggaccaagcagaaggctagcaaggaacaggagggagagtattactgcacagccttcaacagagccaaccacgcctccagtgtccccagaagcaaaatactgacagtcagagtcattcttgccccatggaagaaaggacttattgcagtggttatcatcggagtgatcattgctctcttgatcattgcggccaaatgttattttctgaggaaagccaaggccaagcagatgccagtggaaatgtccaggccagcagtaccacttctgaactccaacaacgagaaaatgtcagatcccaatatggaagctaacagtcattacggtcacaatgacgatgtcagaaaccatgcaatgaaaccaataaatgataataaagagcctctgaactcagacgtgcagtacacggaagttcaagtgtcctcagctgagtctcacaaagatctaggaaagaaggacacagagacagtgtacagtgaagtccggaaagctgtccctgatgccgtggaaagcagatactctagaacggaaggctcccttgatggaacttagacagcaaggccagatgcacatccctggaaggacatccatgttccgagaagaacagatgatccctgtatttcaagacctctgtgcacttatttatgaacctgccctgctcccacagaacacagcaattcctcaggctaagctgccggttcttaaatccatcctgctaagttaatgttgggtagaaagagatacagaggggctgttgaatttcccacataccctccttccaccaagttggaacatccttggaaattggaagagcacaagaggagatccagggcaaggccattgggatattctgaaacttgaatattttgttttgtgcagagataaagaccttttccatgcaccctcatacacagaaaccaattttcttttttatactcaatcatttctagcgcatggcctggttagaggctggttttttctcttttcctttggtccttcaaaggcttgtagttttgggtagtccttgttctttggaaatacacagtgctgaccagacagcctccccctgtcccctctatgacctcgccctccacaaatgggaaaaccagactacttgggagcaccgcctgtgaaataccaacctgaagacaccgttcattcaggcaacgcacaaaacagaaaatgaaggtggaacaagcacagatgttcttcaactgtttttgtctacactctttctcttttcctctaccatgctgaaggctgaaagacaggaagatggtgccatcagcaaatattattcttaattgaaaacttgaaatgtgtatgtttcttactaatttttaaaaatgtattccttgccagggcaggcaaggtggctcacgcctgtaatcccagcacttcaggaggctgaggtgggcggatcacctgaggtcaggagtttgagaccagcctgatgaaaccctgtctctactaaaaatacaagaattagccgggcgtggtggcgcatgcctgtagtatcagctactcaagaggctgaggtgagattatcgcttgaacccaggaaacggaggttgtagtgagcggagatcgcgccactgcactccagcctgagtgacagagtgagaatccatctcaaaaaaagacaaaaaacaaaattgcttgctaaagaagtggtctcctgaggtcttaagacattcctgacagtgtcttgagtgggtgggagagaggttgctgtcattgcgctgtggaatttcacagatgagaaccacgcctagccaaaatcacttttcctgtttgcctcagtgacacagctgcagggaccctcgtggatgttgtattaaataaatttgacctttactctttgcaaaaaaaaaaaa

SEQ ID NO: 73934 - DNA, 3629 bp, Homo sapiens
gaattccgggagaagtgaccagagcaatttctgcttttcacagggcgggtttctcaacggtgacttgtgggcagtgccttctgctgagcgagtcatggcccgaaggcagaactaactgtgcctgcagtcttcactctcaggatgcagccgaggtgggcccaaggggccacgatgtggcttggagtcctgctgacccttctgctctgttcaagccttgagggtcaagaaaactctttcacaatcaacagtgttgacatgaagagcctgccggactggacggtgcaaaatgggaagaacctgaccctgcagtgcttcgcggatgtcagcaccacctctcacgtcaagcctcagcaccagatgctgttctataaggatgacgtgctgttttacaacatctcctccatgaagagcacagagagttattttattcctgaagtccggatctatgactcagggacatataaatgtactgtgattgtgaacaacaaagagaaaaccactgcagagtaccagctgttggtggaaggagtgcccagtcccagggtgacactggacaagaaagaggccatccaaggtgggatcgtgagggtcaactgttctgtcccagaggaaaaggccccaatacacttcacaattgaaaaacttgaactaaatgaaaaaatggtcaagctgaaaagagagaagaattctcgagaccagaattttgtgatactggaattccccgttgaggaacaggaccgcgttttatccttccgatgtcaagctaggatcatttctgggatccatatgcagacctcagaatctaccaagagtgaactggtcaccgtgacggaatccttctctacacccaagttccacatcagccccaccggaatgatcatggaaggagctcagctccacattaagtgcaccattcaagtgactcacctggcccaggagtttccagaaatcataattcagaaggacaaggcgattgtggcccacaacagacatggcaacaaggctgtgtactcagtcatggccatggtggagcacagtggcaactacacgtgcaaagtggagtccagccgcatatccaaggtcagcagcatcgtggtcaacataacagaactattttccaagcccgaactggaatcttccttcacacatctggaccaaggtgaaagactgaacctgtcctgctccatcccaggagcacctccagccaacttcaccatccagaaggaagatacgattgtgtcacagactcaagatttcaccaagatagcctcaaagtcggacagtgggacgtatatctgcactgcaggtattgacaaagtggtcaagaaaagcaacacagtccagatagtcgtatgtgaaatgctctcccagcccaggatttcttatgatgcccagtttgaggtcataaaaggacagaccatcgaagtccgttgcgaatcgatcagtggaactttgcctatttcttaccaacttttaaaaacaagtaaagttttggagaatagtaccaagaactcaaatgatcctgcggtattcaaagacaaccccactgaagacgtcgaataccagtgtgttgcagataattgccattcccatgccaaaatgttaagtgaggttctgagggtgaaggtgatagccccggtggatgaggtccagatttctatcctgtcaagtaaggtggtggagtctggagaggacattgtgctgcaatgtgctgtgaatgaaggatctggtcccatcacctataagttttacagagaaaaagagggcaaacccttctatcaaatgacctcaaatgccacccaggcattttggaccaagcagaaggctagcaaggaacaggagggagagtattactgcacagccttcaacagagccaaccacgcctccagtgtccccagaagcaaaatactgacagtcagagtcattcttgccccatggaagaaaggacttattgcagtggttatcatcggagtgatcattgctctcttgatcattgcggccaaatgttattttctgaggaaagccaaggccaagcagatgccagtggaaatgtccaggccagcagtaccacttctgaactccaacaacgagaaaatgtcagatcccaatatggaagctaacagtcattacgagcctctgaactcagacgtgcagtacacggaagttcaagtgtcctcagctgagtctcacaaagatctaggaaagaaggacacagagacagtgtacagtgaagtccggaaagctgtccctgatgccgtggaaagcagatactctagaacggaaggctcccttgatggaacttagacagcaaggccagatgcacatccctggaaggacatccatgttccgagaagaacagatgatccctgtatttcaagacctctgtgcacttatttatgaacctgccctgctcccacagaacacagcaattcctcaggctaagctgccggttcttaaatccatcctgctaagttaatgttgggtagaaagagatacagaggggctgttgaatttcccacataccctccttccaccaagttggaacatccttggaaattggaagagcacaagaggagatccagggcaaggccattgggatattctgaaacttgaatattttgttttgtgcagagataaagaccttttccatgcaccctcatacacagaaaccaattttcttttttatactcaatcatttctagcgcatggcctggttagaggctggttttttctcttttcctttggtccttcaaaggcttgtagttttgggtagtccttgttctttggaaatacacagtgctgaccagacagcctccccctgtcccctctatgacctcgccctccacaaatgggaaaaccagactacttgggagcaccgcctgtgaaataccaacctgaagacaccgttcattcaggcaacgcacaaaacagaaaatgaaggtggaacaagcacagatgttcttcaactgtttttgtctacactctttctcttttcctctaccatgctgaaggctgaaagacaggaagatggtgccatcagcaaatattattcttaattgaaaacttgaaatgtgtatgtttcttactaatttttaaaaatgtattccttgccagggcaggcaaggtggctcacgcctgtaatcccagcacttcaggaggctgaggtgggcggatcacctgaggtcaggagtttgagaccagcctgatgaaaccctgtctctactaaaaatacaagaattagccgggcgtggtggcgcatgcctgtagtatcagctactcaagaggctgaggtgagattatcgcttgaacccaggaaacggaggttgtagtgagcggagatcgcgccactgcactccagcctgagtgacagagtgagaatccatctcaaaaaaagacaaaaaacaaaattgcttgctaaagaagtggtctcctgaggtcttaagacattcctgacagtgtcttgagtgggtgggagagaggttgctgtcattgcgctgtggaatttcacagatgagaaccacgcctagccaaaatcacttttcctgtttgcctcagtgacacagctgcagggaccctcgtggatgttgtattaaataaatttgacctttactctttgcaaaaaaaaaaaa

SEQ ID NO: 73935 - DNA, 1955 bp, Homo sapiens
caacatgtatgcagggacagaggctatggtccctacagagcaggcatggagagaaggagaaatacatacgggcaggagccaggagagggagggtgtagtgagcagagaccgcgccactgcactccagcctgagtgacagagtgagaatccatctaaaaaaaattgcttgctaaagaagtggtctcctgaggtcttaagacgttcctgacaatgtcttgagtgggtgggagagaggctgcagtcattgtgctgtggaatttcagaggtgagaaccacacctaaccaaaattactttccctgtttgcctcagtgacacagctgcaggaaccctggtgggtgttgtattaagtaaatttgacctttattctttgcagatctgtgaaatgttgtcttctgaggggccacgtgtatctgtagtgctgaggactccttgggcctctgaagtcacagagagaaccctgcagggtgggggaccagtgtgtgacagccctgctttgcattttctttgagaagtgctgtcattttgcatttctctccaccagggcaatcttcaatcttgagaggtgtgatcataacttgccttgtttcttgtcgctacagagaacggaaggctcccttgatggaacttagacagcaaggccagatgcacatccctggaaggacatccatgttccgagaagaacagatgatccctgtatttcaagacctctgtgcacttatttatgaacctgccctgctcccacagaacacagcaattcctcaggctaagctgccggttcttaaatccatcctgctaagttaatgttgggtagaaagagatacagaggggctgttgaatttcccacataccctccttccaccaagttggaacatccttggaaattggaagagcacaagaggagatccagggcaaggccattgggatattctgaaacttgaatattttgttttgtgcagagataaagaccttttccatgcaccctcatacacagaaaccaattttcttttttatactcaatcatttctagcgcatggcctggttagaggctggttttttctcttttcctttggtccttcaaaggcttgtagttttgggtagtccttgttctttggaaatacacagtgctgaccagacagcctccccctgtcccctctatgacctcgccctccacaaatgggaaaaccagactacttgggagcaccgcctgtgaaataccaacctgaagacaccgttcattcaggcaacgcacaaaacagaaaatgaaggtggaacaagcacagatgttcttcaactgtttttgtctacactctttctcttttcctctaccatgctgaaggctgaaagacaggaagatggtgccatcagcaaatattattcttaattgaaaacttgaaatgtgtatgtttcttactaatttttaaaaatgtattccttgccagggcaggcaaggtggctcacgcctgtaatcccagcacttcaggaggctgaggtgggcggatcacctgaggtcaggagtttgagaccagcctgatgaaaccctgtctctactaaaaatacaagaattagccgggcgtggtggcgcatgcctgtagtatcagctactcaagaggctgaggtgagattatcgcttgaacccaggaaacggaggttgtagtgagcggagatcgcgccactgcactccagcctgagtgacagagtgagaatccatctcaaaaaaagacaaaaaacaaaattgcttgctaaagaagtggtctcctgaggtcttaagacattcctgacagtgtcttgagtgggtgggagagaggttgctgtcattgcgctgtggaatttcacagatgagaaccacgcctagccaaaatcacttttcctgtttgcctcagtgacacagctgcagggaccctcgtggatgttgtattaaataaatttgacctttactctttgcaaaaaaaaaaaa

SEQ ID NO: 73936 - DNA, 3660 bp, Homo sapiens
gaattccgggagaagtgaccagagcaatttctgcttttcacagggcgggtttctcaacggtgacttgtgggcagtgccttctgctgagcgagtcatggcccgaaggcagaactaactgtgcctgcagtcttcactctcaggatgcagccgaggtgggcccaaggggccacgatgtggcttggagtcctgctgacccttctgctctgttcaagccttgagggtcaagaaaactctttcacaatcaacagtgttgacatgaagagcctgccggactggacggtgcaaaatgggaagaacctgaccctgcagtgcttcgcggatgtcagcaccacctctcacgtcaagcctcagcaccagatgctgttctataaggatgacgtgctgttttacaacatctcctccatgaagagcacagagagttattttattcctgaagtccggatctatgactcagggacatataaatgtactgtgattgtgaacaacaaagagaaaaccactgcagagtaccagctgttggtggaaggagtgcccagtcccagggtgacactggacaagaaagaggccatccaaggtgggatcgtgagggtcaactgttctgtcccagaggaaaaggccccaatacacttcacaattgaaaaacttgaactaaatgaaaaaatggtcaagctgaaaagagagaagaattctcgagaccagaattttgtgatactggaattccccgttgaggaacaggaccgcgttttatccttccgatgtcaagctaggatcatttctgggatccatatgcagacctcagaatctaccaagagtgaactggtcaccgtgacggaatccttctctacacccaagttccacatcagccccaccggaatgatcatggaaggagctcagctccacattaagtgcaccattcaagtgactcacctggcccaggagtttccagaaatcataattcagaaggacaaggcgattgtggcccacaacagacatggcaacaaggctgtgtactcagtcatggccatggtggagcacagtggcaactacacgtgcaaagtggagtccagccgcatatccaaggtcagcagcatcgtggtcaacataacagaactattttccaagcccgaactggaatcttccttcacacatctggaccaaggtgaaagactgaacctgtcctgctccatcccaggagcacctccagccaacttcaccatccagaaggaagatacgattgtgtcacagactcaagatttcaccaagatagcctcaaagtcggacagtgggacgtatatctgcactgcaggtattgacaaagtggtcaagaaaagcaacacagtccagatagtcgtatgtgaaatgctctcccagcccaggatttcttatgatgcccagtttgaggtcataaaaggacagaccatcgaagtccgttgcgaatcgatcagtggaactttgcctatttcttaccaacttttaaaaacaagtaaagttttggagaatagtaccaagaactcaaatgatcctgcggtattcaaagacaaccccactgaagacgtcgaataccagtgtgttgcagataattgccattcccatgccaaaatgttaagtgaggttctgagggtgaaggtgatagccccggtggatgaggtccagatttctatcctgtcaagtaaggtggtggagtctggagaggacattgtgctgcaatgtgctgtgaatgaaggatctggtcccatcacctataagttttacagagaaaaagagggcaaacccttctatcaaatgacctcaaatgccacccaggcattttggaccaagcagaaggctagcaaggaacaggagggagagtattactgcacagccttcaacagagccaaccacgcctccagtgtccccagaagcaaaatactgacagtcagagtcattcttgccccatggaagaaaggacttattgcagtggttatcatcggagtgatcattgctctcttgatcattgcggccaaatgttattttctgaggaaagccaaggccaagcagatgccagtggaaatgtccaggccagcagtaccacttctgaactccaacaacgagaaaatgtcagatcccaatatggaagctaacagtcattacggtcacaatgacgatgtcagaaaccatgcaatgaaaccaataaatgataataaagagcctctgaactcagacgtgcagtacacggaagttcaagtgtcctcagctgagtctcacaaagatctaggaaagaaggacacagagacagtgtacagtgaagtccggaaagctgtccctgagaacggaaggctcccttgatggaacttagacagcaaggccagatgcacatccctggaaggacatccatgttccgagaagaacagatgatccctgtatttcaagacctctgtgcacttatttatgaacctgccctgctcccacagaacacagcaattcctcaggctaagctgccggttcttaaatccatcctgctaagttaatgttgggtagaaagagatacagaggggctgttgaatttcccacataccctccttccaccaagttggaacatccttggaaattggaagagcacaagaggagatccagggcaaggccattgggatattctgaaacttgaatattttgttttgtgcagagataaagaccttttccatgcaccctcatacacagaaaccaattttcttttttatactcaatcatttctagcgcatggcctggttagaggctggttttttctcttttcctttggtccttcaaaggcttgtagttttgggtagtccttgttctttggaaatacacagtgctgaccagacagcctccccctgtcccctctatgacctcgccctccacaaatgggaaaaccagactacttgggagcaccgcctgtgaaataccaacctgaagacaccgttcattcaggcaacgcacaaaacagaaaatgaaggtggaacaagcacagatgttcttcaactgtttttgtctacactctttctcttttcctctaccatgctgaaggctgaaagacaggaagatggtgccatcagcaaatattattcttaattgaaaacttgaaatgtgtatgtttcttactaatttttaaaaatgtattccttgccagggcaggcaaggtggctcacgcctgtaatcccagcacttcaggaggctgaggtgggcggatcacctgaggtcaggagtttgagaccagcctgatgaaaccctgtctctactaaaaatacaagaattagccgggcgtggtggcgcatgcctgtagtatcagctactcaagaggctgaggtgagattatcgcttgaacccaggaaacggaggttgtagtgagcggagatcgcgccactgcactccagcctgagtgacagagtgagaatccatctcaaaaaaagacaaaaaacaaaattgcttgctaaagaagtggtctcctgaggtcttaagacattcctgacagtgtcttgagtgggtgggagagaggttgctgtcattgcgctgtggaatttcacagatgagaaccacgcctagccaaaatcacttttcctgtttgcctcagtgacacagctgcagggaccctcgtggatgttgtattaaataaatttgacctttactctttgcaaaaaaaaaaaa

SEQ ID NO: 73937 - DNA, 1407 bp, Homo sapiens
ccgacacacaaacggccgacacggaaactcgttgaccctcgaaaacccaccaagaacggaaggctcccttgatggaacttagacagcaaggccagatgcacatccctggaaggacatccatgttccgagaagaacagatgatccctgtatttcaagacctctgtgcacttatttatgaacctgccctgctcccacagaacacagcaattcctcaggctaagctgccggttcttaaatccatcctgctaagttaatgttgggtagaaagagatacagaggggctgttgaatttcccacataccctccttccaccaagttggaacatccttggaaattggaagagcacaagaggagatccagggcaaggccattgggatattctgaaacttgaatattttgttttgtgcagagataaagaccttttccatgcaccctcatacacagaaaccaattttcttttttatactcaatcatttctagcgcatggcctggttagaggctggttttttctcttttcctttggtccttcaaaggcttgtagttttgggtagtccttgttctttggaaatacacagtgctgaccagacagcctccccctgtcccctctatgacctcgccctccacaaatgggaaaaccagactacttgggagcaccgcctgtgaaataccaacctgaagacaccgttcattcaggcaacgcacaaaacagaaaatgaaggtggaacaagcacagatgttcttcaactgtttttgtctacactctttctcttttcctctaccatgctgaaggctgaaagacaggaagatggtgccatcagcaaatattattcttaattgaaaacttgaaatgtgtatgtttcttactaatttttaaaaatgtattccttgccagggcaggcaaggtggctcacgcctgtaatcccagcacttcaggaggctgaggtgggcggatcacctgaggtcaggagtttgagaccagcctgatgaaaccctgtctctactaaaaatacaagaattagccgggcgtggtggcgcatgcctgtagtatcagctactcaagaggctgaggtgagattatcgcttgaacccaggaaacggaggttgtagtgagcggagatcgcgccactgcactccagcctgagtgacagagtgagaatccatctcaaaaaaagacaaaaaacaaaattgcttgctaaagaagtggtctcctgaggtcttaagacattcctgacagtgtcttgagtgggtgggagagaggttgctgtcattgcgctgtggaatttcacagatgagaaccacgcctagccaaaatcacttttcctgtttgcctcagtgacacagctgcagggaccctcgtggatgttgtattaaataaatttgacctttactctttgcaaaaaaaaaaaa

SEQ ID NO: 73938 - DNA, 3735 bp, Homo sapiens
gaattccgggagaagtgaccagagcaatttctgcttttcacagggcgggtttctcaacggtgacttgtgggcagtgccttctgctgagcgagtcatggcccgaaggcagaactaactgtgcctgcagtcttcactctcaggatgcagccgaggtgggcccaaggggccacgatgtggcttggagtcctgctgacccttctgctctgttcaagccttgagggtcaagaaaactctttcacaatcaacagtgttgacatgaagagcctgccggactggacggtgcaaaatgggaagaacctgaccctgcagtgcttcgcggatgtcagcaccacctctcacgtcaagcctcagcaccagatgctgttctataaggatgacgtgctgttttacaacatctcctccatgaagagcacagagagttattttattcctgaagtccggatctatgactcagggacatataaatgtactgtgattgtgaacaacaaagagaaaaccactgcagagtaccagctgttggtggaaggagtgcccagtcccagggtgacactggacaagaaagaggccatccaaggtgggatcgtgagggtcaactgttctgtcccagaggaaaaggccccaatacacttcacaattgaaaaacttgaactaaatgaaaaaatggtcaagctgaaaagagagaagaattctcgagaccagaattttgtgatactggaattccccgttgaggaacaggaccgcgttttatccttccgatgtcaagctaggatcatttctgggatccatatgcagacctcagaatctaccaagagtgaactggtcaccgtgacggaatccttctctacacccaagttccacatcagccccaccggaatgatcatggaaggagctcagctccacattaagtgcaccattcaagtgactcacctggcccaggagtttccagaaatcataattcagaaggacaaggcgattgtggcccacaacagacatggcaacaaggctgtgtactcagtcatggccatggtggagcacagtggcaactacacgtgcaaagtggagtccagccgcatatccaaggtcagcagcatcgtggtcaacataacagaactattttccaagcccgaactggaatcttccttcacacatctggaccaaggtgaaagactgaacctgtcctgctccatcccaggagcacctccagccaacttcaccatccagaaggaagatacgattgtgtcacagactcaagatttcaccaagatagcctcaaagtcggacagtgggacgtatatctgcactgcaggtattgacaaagtggtcaagaaaagcaacacagtccagatagtcgtatgtgaaatgctctcccagcccaggatttcttatgatgcccagtttgaggtcataaaaggacagaccatcgaagtccgttgcgaatcgatcagtggaactttgcctatttcttaccaacttttaaaaacaagtaaagttttggagaatagtaccaagaactcaaatgatcctgcggtattcaaagacaaccccactgaagacgtcgaataccagtgtgttgcagataattgccattcccatgccaaaatgttaagtgaggttctgagggtgaaggtgatagccccggtggatgaggtccagatttctatcctgtcaagtaaggtggtggagtctggagaggacattgtgctgcaatgtgctgtgaatgaaggatctggtcccatcacctataagttttacagagaaaaagagggcaaacccttctatcaaatgacctcaaatgccacccaggcattttggaccaagcagaaggctagcaaggaacaggagggagagtattactgcacagccttcaacagagccaaccacgcctccagtgtccccagaagcaaaatactgacagtcagagtcattcttgccccatggaagaaaggacttattgcagtggttatcatcggagtgatcattgctctcttgatcattgcggccaaatgttattttctgaggaaagccaaggccaagcagatgccagtggaaatgtccaggccagcagtaccacttctgaactccaacaacgagaaaatgtcagatcccaatatggaagctaacagtcattacggtcacaatgacgatgtcagaaaccatgcaatgaaaccaataaatgataataaagagcctctgaactcagacgtgcagtacacggaagttcaagtgtcctcagctgagtctcacaaagatctaggaaagaaggacacagagacagtgtacagtgaagtccggaaagctgtccctgttgaactgggttatttgcgttgctcactgccatgtcatcctttgttttgtagatgccgtggaaagcagatactctagaacggaaggctcccttgatggaacttagacagcaaggccagatgcacatccctggaaggacatccatgttccgagaagaacagatgatccctgtatttcaagacctctgtgcacttatttatgaacctgccctgctcccacagaacacagcaattcctcaggctaagctgccggttcttaaatccatcctgctaagttaatgttgggtagaaagagatacagaggggctgttgaatttcccacataccctccttccaccaagttggaacatccttggaaattggaagagcacaagaggagatccagggcaaggccattgggatattctgaaacttgaatattttgttttgtgcagagataaagaccttttccatgcaccctcatacacagaaaccaattttcttttttatactcaatcatttctagcgcatggcctggttagaggctggttttttctcttttcctttggtccttcaaaggcttgtagttttgggtagtccttgttctttggaaatacacagtgctgaccagacagcctccccctgtcccctctatgacctcgccctccacaaatgggaaaaccagactacttgggagcaccgcctgtgaaataccaacctgaagacaccgttcattcaggcaacgcacaaaacagaaaatgaaggtggaacaagcacagatgttcttcaactgtttttgtctacactctttctcttttcctctaccatgctgaaggctgaaagacaggaagatggtgccatcagcaaatattattcttaattgaaaacttgaaatgtgtatgtttcttactaatttttaaaaatgtattccttgccagggcaggcaaggtggctcacgcctgtaatcccagcacttcaggaggctgaggtgggcggatcacctgaggtcaggagtttgagaccagcctgatgaaaccctgtctctactaaaaatacaagaattagccgggcgtggtggcgcatgcctgtagtatcagctactcaagaggctgaggtgagattatcgcttgaacccaggaaacggaggttgtagtgagcggagatcgcgccactgcactccagcctgagtgacagagtgagaatccatctcaaaaaaagacaaaaaacaaaattgcttgctaaagaagtggtctcctgaggtcttaagacattcctgacagtgtcttgagtgggtgggagagaggttgctgtcattgcgctgtggaatttcacagatgagaaccacgcctagccaaaatcacttttcctgtttgcctcagtgacacagctgcagggaccctcgtggatgttgtattaaataaatttgacctttactctttgcaaaaaaaaaaaa

SEQ ID NO: 73939 - DNA, 319 bp, Homo sapiens
gacgaggcatgcgtagcgtgagcagagttcgccttcctctggatcgagaatgtgatctggaccgtgacctatttttcacgttagagaaaaaacaaaattgcttgctaaagaagtggtctcctgaggtcttaagacattcctgacagtgtcttgagtgggtgggagagaggttgctgtcattgcgctgtggaatttcacagatgagaaccacgcctagccaaaatcacttttcctgtttgcctcagtgacacagctgcagggaccctcgtggatgttgtattaaataaatttgacctttactctttgcaaaaaaaaaaaa

SEQ ID NO: 73940 - DNA, 2508 bp, Homo sapiens
gaattccgggagaagtgaccagagcaatttctgcttttcacagggcgggtttctcaacggtgacttgtgggcagtgccttctgctgagcgagtcatggcccgaaggcagaactaactgtgcctgcagtcttcactctcaggatgcagccgaggtgggcccaaggggccacgatgtggcttggagtcctgctgacccttctgctctgttcaagccttgagggtcaagaaaactctttcacaatcaacagtgttgacatgaagagcctgccggactggacggtgcaaaatgggaagaacctgaccctgcagtgcttcgcggatgtcagcaccacctctcacgtcaagcctcagcaccagatgctgttctataaggatgacgtgctgttttacaacatctcctccatgaagagcacagagagttattttattcctgaagtccggatctatgactcagggacatataaatgtactgtgattgtgaacaacaaagagaaaaccactgcagagtaccagctgttggtggaaggagtgcccagtcccagggtgacactggacaagaaagaggccatccaaggtgggatcgtgagggtcaactgttctgtcccagaggaaaaggccccaatacacttcacaattgaaaaacttgaactaaatgaaaaaatggtcaagctgaaaagagagaagaattctcgagaccagaattttgtgatactggaattccccgttgaggaacaggaccgcgttttatccttccgatgtcaagctaggatcatttctgggatccatatgcagacctcagaatctaccaagagtgaactggtcaccgtgacggaatccttctctacacccaagttccacatcagccccaccggaatgatcatggaaggagctcagctccacattaagtgcaccattcaagtgactcacctggcccaggagtttccagaaatcataattcagaaggacaaggcgattgtggcccacaacagacatggcaacaaggctgtgtactcagtcatggccatggtggagcacagtggcaactacacgtgcaaagtggagtccagccgcatatccaaggtcagcagcatcgtggtcaacataacagaactattttccaagcccgaactggaatcttccttcacacatctggaccaaggtgaaagactgaacctgtcctgctccatcccaggagcacctccagccaacttcaccatccagaaggaagatacgattgtgtcacagactcaagatttcaccaagatagcctcaaagtcggacagtgggacgtatatctgcactgcaggtattgacaaagtggtcaagaaaagcaacacagtccagatagtcgtatgtgaaatgctctcccagcccaggatttcttatgatgcccagtttgaggtcataaaaggacagaccatcgaagtccgttgcgaatcgatcagtggaactttgcctatttcttaccaacttttaaaaacaagtaaagttttggagaatagtaccaagaactcaaatgatcctgcggtattcaaagacaaccccactgaagacgtcgaataccagtgtgttgcagataattgccattcccatgccaaaatgttaagtgaggttctgagggtgaaggtgatagccccggtggatgaggtccagatttctatcctgtcaagtaaggtggtggagtctggagaggacattgtgctgcaatgtgctgtgaatgaaggatctggtcccatcacctataagttttacagagaaaaagagggcaaacccttctatcaaatgacctcaaatgccacccaggcattttggaccaagcagaaggctagcaaggaacaggagggagagtattactgcacagccttcaacagagccaaccacgcctccagtgtccccagaagcaaaatactgacagtcagagtcattcttgccccatggaagaaaggacttattgcagtggttatcatcggagtgatcattgctctcttgatcattgcggccaaatgttattttctgaggaaagccaaggccaagcagatgccagtggaaatgtccaggccagcagtaccacttctgaactccaacaacgagaaaatgtcagatcccaatatggaagctaacagtcattacggtcacaatgacgatgtcagaaaccatgcaatgaaaccaataaatgataataaagagcctctgaactcagacgtgcagtacacggaagttcaagtgtcctcagctgagtctcacaaagatctaggaaagaaggacacagagacagtgtacagtgaagtccggaaagctgtccctgttgaactgggttatttgcgttgctcactgccatgtcatcctttgttttgtagatgccgtggaaagcagatactctgtaagtacacatttcatatacattatatttaaaagtactccactgaacagtgaaatatttccagactcacccacgtcctgcattcacatgaattcttccccgctccctagtctgtttcagaccagaag

SEQ ID NO: 73941 - DNA, 482 bp, Homo sapiens
tcaggagttggcggagctgtttaggcacctagaaggctggttattaatgactctacaggtcatgaaattactggaaatgtgtgttaccatttagaatttcatacagcttatcctcatactgaatcatcttttggtgtaatttttatttgattttccttttgtgaggagaatggggacaaaccatcaaaaagaaaagactgccatttttaaaagcagctttatagataaatgttggcccaaggtttctttattatggccttagcgacattgaatggttttaggggctacttaaaaactaaatcttaaagttaaatgaagtttttcctaaagttctgctatccgttgaactttgttcaaacttacagaaatgctccttttacagcatcatttttctttttttgcgaggaacggagtttaaagggatatgtttaggtcattgtatgcctccagtttaacagattgaaataaaacttggttataaa

SEQ ID NO: 73942 - DNA, 355 bp, Homo sapiens
taaaaagctgcctctggttgccacttctcaaatatattcacatattaatattttaagggttcaaagacagtgccaatcttctcaatgacattctataatttaattaaatatctcatttatgtgtaagaaaatactttttttgatttctttttctttccttttcttttctttctttctttcttttcttttcttttctttttttttttgagatagagtctcactctgttgcccaggctggagttcagtagtatgatcatggcacactgcagccttaaacctcccaggcttaagctatccttctgcctcagcctcctgagcagctgggactacaggcatgcattaccatgcctggcta

SEQ ID NO: 73943 - DNA, 362 bp, Homo sapiens
ctggcagaagtgagcaaaacagctcaatccagcaggctccatgttagcagtaagcaactctaatttcatatctgactgaaaaaagaaaagaagcctatttatgctctcaacataataaagcagcctttgttttatgctaaggccctggtgattttttcagcaccagtccagctgtgacacacagacgctggttcgatgcctgcataaatgctttctctttgtttagtggtgagaacgtgagacctcactaaggcccaagtcctgggttctcctgatgtcaaccccacaagtgagtagtggagcctcactggcaaggagacctacctgtgcctttcccaaatgcctgggaaggtaggttagag

SEQ ID NO: 73944 - DNA, 290 bp, Homo sapiens
ctcatttctataaaaaagaaaataaggaactgattcaccatgcatatacacataaatgtatgtaatacacagatgggattgaaaaggctgtaaccaaggctgggcacgatggttcacgcctgtaatcccagcactttgggaggctaaggcaagtggatcacttgaggccaggagttcaagaccagactgggcaacatggtgaaaacccacctgtactaaaaatacaaaaattagcccggtgtggtggcacatacctgtagttccagctacttgggaggctgaggcatgag

SEQ ID NO: 73945 - DNA, 329 bp, Homo sapiens
gtgatctgcctgcctcagcctcccaaagtgctaggattacagtgagccactgggccctgcctccccagggtttcttaatgccttggtgaagaaagtgctctctgcacctcttagtcgtatggtttagaggtagctgagcacgttgcaaataaggaagttgctcagttcttttgagccacccaaatacaacaatcctttcgagccttcagactagggtaaccaactgtcctggtttacctggaactgaggagtttcccaggatgcaggactctcagttttataaccagggacatttcaggcacactggctcgagtcagctacctcacttc

SEQ ID NO: 73946 - DNA, 394 bp, Homo sapiens
tgatgtacatttagaccatgggatgtgcctcacctccaagggcctgccctgcagctcttaggaaggtgggcagtctcatcacagcccaaagtgagatgtctccaagcaaagagtaaatggcagcctctcttcagcctagactcttaaatagcacagtattctcccacttcctcaaacaactcgatggtaggtttctttcaacataaagagtgggagcactactttgagacactgataaacaactttcaaatagaaaataaatttcaaagtgaatgtgttttcagggcaaaattggtactgtctcatttcaaactatgaaaatatgatctgatttaatgagttggagtcatccattcatccagcacctactatgtgctaggtactgtgtaatgtc

SEQ ID NO: 73947 - DNA, 493 bp, Homo sapiens
actaattgaatgaaaacatgtaaacattagcatagatctaagaagactctgatctttaaaatatatctagctcttttctttacatgtattcaggatgacacttaaacctatgaacagtcatctctgttctctttccccctttagatcagactaaaggcctgtcaagagcagttgaagaactttaaagagtggttagtggggagaattaatgtcaaaatgaccacagcccagcttttaccttggaatctctgctagttcctgtgtcattctcattcccgtaactctcactcctaacccacctttttgttttccttttctatttccttttcacaaaccaactttgtttctttctctcatttagctataataaggtgatttaaaatttttaacgaataaagttgtatcctcatttattttaaaaagtttaagagttaaatttctatttactttctccataactttctcccatcccaactctccctttctttccaaa

SEQ ID NO: 73948 - DNA, 451 bp, Homo sapiens
tgagacagactctcactctgtcactcaggctgaatgcagtggcgcaatctcagctcactgcaacctccacctcatgggttcaagggattctggtgcctcagcctcccaagtagctggaattacaggcatgtaccatcacacccagctaattttttatatttttagtagagatagggtttcgctatgttggccaggctggtcttgaactcgtcctcaagtgaaccacctgcctcagcctcccaaagtgctgggattacaggcgtgagccactgcgcctgcaaaagtcctaattttactaaatctaaactcaagtacatgccattctactcttctgtgtgctgacgtgggaagtgtgcacaatgcctgttgctgcaaacccaactctctgtgaaaagcgctcgtctctaagctgccagctgcactagccactttttcacctgaaccactatta

SEQ ID NO: 73949 - DNA, 563 bp, Homo sapiens
taaagatgtattactttattttttgttgaagtataattcacataacagaaaatttatatttttaaagtgtacaattcagtatttttggtgcattcactgtgttgtacaataatctccacaatttaatttcagaacatttccattactccaaaaagaaattccatatatatatatgcataattagtcacaatttctctcttccctcatcttctggcaaccctcaaatcaactttctacatgtatttgcgtattctggaaacttcacataaatggaataatacattatgtggctttttgtgtctggtttctttcacttaccgtaatgttttcaagtttcattcatgttgcaccatgtaacatacctcatttgtttttatggctgaatagtttcttttattaaatgtatatatcacattttgtttatccattcatcattgatagacatgtgagttgtttcaactttgggctactataaataatgctgttacgaactttcatgtacaagattttgtggaaacatttcttttcaattctcttgggtatttaccagtgagtggaattgc

SEQ ID NO: 73950 - DNA, 436 bp, Homo sapiens
  misc_feature (430)..(430): n is a, c, g, or t
cataaatatagaggaagtagttgggttaaagttgtgggatttgcactatgcctatacatttttatttatgccattattttgagaggctgattattgcttttttaaaatgatgcactggtgaagatgtgaaagtaaaattgccacgtggcattatttgccaagaataaatgaaaagggtaaaaaaacaattttttctttttttaaacatttttcagaaaagatacaattaccttttttaataggtgagcgccaccacgcccgtctctactaaaaatacaaaaattacctgggtgtggtggcgtgcacctgtaatcccagctactcagaggctgaggcaggggaatggcttgaacctgggaggcagaggttgcagtgagccaagatcgcaccattacactccagcctgggcgacaaagcgacactccatctnaaattt

SEQ ID NO: 73951 - DNA, 213 bp, Homo sapiens
tcacttacccagctcatcattttctccctctccaaagaataactttattcagtggtcataaaatatttaataaaacatgaaacttaagtcactgtgttcaatttgccatcacagccatctcagtggcagacccccttcccccagctggcccaccccctcctgaagccccttgcctgccctccacagcagccccagctgttgatttatcagggc

SEQ ID NO: 73952 - DNA, 296 bp, Homo sapiens
tttgggtcatgtgctgattttaataggaagcttctagtagaaagctagaaaaaccggccgggcgcggtggctcacgcctgtacttccagcactttgggaggccgaggcgggcggatcacgaggtcaggagatggagaccatcctggctaacacggtgaaaccccatctctactaaaaatacaaaaaatttagccgggcgtggtggcgggtgcctgtagtcccagctactcgggaggctgaggcaggagaatgacgcgaacccaggagccggagcctgcagtgagccaggaccatgc

SEQ ID NO: 73953 - DNA, 877 bp, Homo sapiens
gcgtccgcgttcagcggacacgggagcaagatggcgattccgggcaggcagaatattgttctgagaagccacagaaaaagggtatgggcttattttgccaaagaaaacacagcagttgcaccctgttttgcaaaaaccatcagtgtttgggaatgattctgatgatgatgatgagacctctgtgagtgaaagccttcagagggaagctgctaagaagcaggccatgaaacagaccaaactggaaatccagaaggcccttgcagaagatgctactgtgtatgaatatgacagtatttatgatgaaatgcagaaaaaaaaggaggaaaataatcccaaattgcttttggggaaagacagaaagcccaagtatattcacaacttgctaaaagcagttgagatcagaaaaaaggaacaggaaaaaagaatggaaaagaaaatacagagagaacgagaaatggaaaagggggagtttgatgataaagaagcatttgtgacatctgcatataagaaaaaactgcaagagagagctgaagaagaagaaagagaaaagagggctgctgcactggaagcatgtttggatgtaaccaagcagaaagatctcagtggattttataggcacctattaaatcaagcagttggtgaagaggaagtacctaaatgcagctttcgtgaagccagatctgtttaaggcagaaaatcaggggtttccatgagtagtccaacagataccaagagatgttctcaatggtgagtggaaccgatggaagggatgagtaaagggggggaaaaaattgaggaggaaggtagacttagtttgcaggtaaatggcttgaaggggggcaaggatggtaaagagacaaaaaaatgggagggagat

SEQ ID NO: 73954 - DNA, 767 bp, Homo sapiens
gcgtccgcgttcagcggacacgggagcaagatggcgattccgggcaggcagtatgggcttattttgccaaagaaaacacagcagttgcaccctgttttgcaaaaaccatcagtgtttgggaatgattctgatgatgatgatgagtagagacggggcttcatcaggttggccacgctgatctcaaactcctgagctcaagtgatccagccgcctcagcctcccaaagcgctgggattacagacctctgtgagtgaaagccttcagagggaagctgctaagaagcaggccatgaaacagaccaaactggaaatccagaaggcccttgcagaagatgctactgtgtatgaatatgacagtatttatgatgaaatgcagaaaaaaaaggaggaaaataatcccaaattgcttttggggaaagacagaaagcccaagtatattcacaacttgctaaaagcagttgagatcagaaaaaaggaacaggaaaaaagaatggaaaagaaaatacagagagaacgagaaatggaaaagggggagtttgatgataaagaagcatttgtgacatctgcatataagaaaaaactgcaagagagagctgaagaagaagaaagagaaaagagggctgctgcactggaagcatgtttggatgtaaccaagcagaaagatctcagtggattttataggcacctattaaatcaagcagttggtgaagaggaagtacctaaatgcagctttcgtgaagccaggtgaggagacgtgtatgaaatatt

SEQ ID NO: 73955 - DNA, 558 bp, Homo sapiens
agtttagtcatttaattataacagcttagaatgtaaatatagtcattattctttctcttctagatgaggaaattaaggtaccaaaagattacaaacaaacttgcccggagtaattagtaagtgtagagccagcattcatacccaggcagcctggctccagagtttatttgtatttcctatctaaaaatgtgattgtaatttttatgatatattttcaatttatgaaccattctcaaaaaacatagactttgttgtatctattggctggctcatatttttgaaacatgtttaatttttttttaagaccaaactggaaatccagaaggcccttgcagaagatgctactgtgtatgaatatgacagtatttatgatgaaatgcagaaaaaaaaggaggaaaataatcccaaattgcttttggggaaagacagaaagcccaagtatattcacaacttgctaaaagcagttgagatcagaaaaaaggaacaggaaaaaagaaagaaagaaagaaagaaagaaagaaagaaagaaagaaagaaagaaagaaaaaaagaaagaaa

SEQ ID NO: 73956 - DNA, 2633 bp, Homo sapiens
gcgtccgcgttcagcggacacgggagcaagatggcgattccgggcaggcagtatgggcttattttgccaaagaaaacacagcagttgcaccctgttttgcaaaaaccatcagtgtttgggaatgattctgatgatgatgatgagacctctgtgagtgaaagccttcagagggaagctgctaagaagcaggccatgaaacagaccaaactggaaatccagaaggcccttgcagaagatgctactgtgtatgaatatgacagtatttatgatgaaatgcagaaaaaaaaggaggaaaataatcccaaattgcttttggggaaagacagaaagcccaagtatattcacaacttgctaaaagcagttgagatcagaaaaaaggaacaggaaaaaagaatggaaaagaaaatacagagagaacgagaaatggaaaagggggagtttgatgataaagaagcatttgtgacatctgcatataagaaaaaactgcaagagagagctgaagaagaagaaagagaaaagagggctgctgcactggaagcatgtttggatgtaaccaagcagaaagatctcagtggattttataggcacctattaaatcaagcagttggtgaagaggaagtacctaaatgcagctttcgtgaagccagatctggtataaaggaagaaaaatcaaggggcttctccaatgaagtaagttcaaaaaacagaataccacaagagaaatgcattcttcaaactgatgtgaaagtagaggaaaacccagatgcagacagtgacttcgatgctaagagcagtgcggatgatgaaatagaagaaactagagtgaactgcagaagggaaaaggtcatagagacccctgagaatgacttcaagcaccacaggagtcaaaaccactctcggtcacctagtgaagaaagagggcacagtaccaggcaccacacgaaaggatcacgaacgtcgagaggacatgagaaaagggaagatcagcaccagcagaagcaatccagagaccaagagaaccattacactgaccgtgattaccggaaagaaagggattctcataggcacagagaggccagtcatagagattcccattggaagaggcatgaacaggaagataaaccaagggcgagggaccaaagagaaagaagtgacagagtatggaaaagggagaaagatagggagaaatattcccaaagagaacaagaaagagatagacaacaaaatgatcagaaccgacccagtgagaaaggagagaaggaagagaaaagcaaagcaaaggaagagcatatgaaagtaaggaaggaaagatatgaaaataatgataaatacagagatagagaaaaacgagaggtaggtgttcagtcttcagaaagaaatcaagacagaaaggaaagcagcccaaattctagggcaaaggataaatttcttgaccaagaaagatccaacaaaatgagaaacatggcaaaggacaaagaaagaaaccaagagaaaccctctaattctgaatcatcactgggagcaaaacacagactcacagaggaagggcaagagaagggtaaagaacaagagagaccacctgaggcagtgagcaagtttgcaaagcggaacaatgaagaaactgtaatgtcagctagagacaggtacttggccaggcagatggcgcgggttaatgcaaagacctatattgagaaagaagatgattgatggctaccccaagagaaagatttaaggaagcacagaaaactgtaattcctggaacctgctgcgtaaaaccataaaggagtgtgttaccagtagtttggagggcatttttaaatttattttcaaaattttaagttaaaagtcagtcttacagcttggatgtttggatgtggatgtttggctgaatttatatatagtgtgtactcatcaataccacattctttgttgtattcaagaaccgttaagagtgtgctaattccctgtaggtacataatgaggaaaatttgctccactacaaccattaaaaaataattttggccagatacggtagctcgtgcctgtaataccaacattttgggaggccaaggcagaaggatattgaggctaggcattcaagaccagcctaggcaggataataagaccttgtctctatttaaaaaacaaaaagcctagcatggtagtccatgcctgtagtcccagctgttcgagaggctgaggcaagaagatcacttgagcctaggaatttgatgttacagtgaggtatgatcatgccactgcactccaacctgggcaacagaatgagaccctgtctctaaaaaattttttttaaataaataatttaactcttctaataatgttttgttgcaggaaatgtatttcagataaaatatggatttgaaaaacagaaaatatactttatgttctgaaatttgtatttaagtataaaatgtgaatcatcttgtctaaatagcttacagcatagttggcttaaatgaaaataaaatgatatgcttataaaaaaaaaaagaaaaaaaaaaaaaaaaaaaggggggggggggcataaaaatttccccgggggggccaccagtttggggggatacccaggtttttgtggcccaaagggggccccaaaaggggagccgaaaaaa

SEQ ID NO: 73957 - DNA, 3016 bp, Homo sapiens
  misc_feature (10)..(10): n is a, c, g, or t
  misc_feature (259)..(259): n is a, c, g, or t
  misc_feature (265)..(265): n is a, c, g, or t
cgagaagtcntgaggaacatagattcccctcccccgtacattttcccggatggaagcccgaagtttgagggagaaacttgtgaggaaataaaggaagttaggctgaggggcagagagcgagacttttctattttccaaaagctcggtctgaggcccctcagtcttgcttcctaacccgcgcttgagtttctccccgcttggatgctctcaggggcagtgtgaagagagacagttcctggcttccttagagggccttgtnctcctnggcagaagctcaagtcctgattcccgcccttccttctcgttttaggaatattgttctgagaagccacagaaaaagggtatgggcttattttgccaaagaaaacacagcagttgcaccctgttttgcaaaaaccatcagtgtttgggaatgattctgatgatgatgatgagtgtatatccagtactggtgtttaaaggaaagttattaaagttggaataagagtacctgaattggaatcttgctttgccattcaccagctgtttggtccttaaattctctcaggtttttggcatttaatcgtcatccttagtggtaattgttaaagtacctttatttagaaaattgagaatcacatgaccttcaaaagatcatcagtttttcctgactttttcagacctctgtgagtgaaagccttcagagggaagctgctaagaagcaggccatgaaacagaccaaactggaaatccagaaggcccttgcagaagatgctactgtgtatgaatatgacagtatttatgatgaaatgcagaaaaaaaaggaggaaaataatcccaaattgcttttggggaaagacagaaagcccaagtatattcacaacttgctaaaagcagttgagatcagaaaaaaggaacaggaaaaaagaatggaaaagaaaatacagagagaacgagaaatggaaaagggggagtttgatgataaagaagcatttgtgacatctgcatataagaaaaaactgcaagagagagctgaagaagaagaaagagaaaagagggctgctgcactggaagcatgtttggatgtaaccaagcagaaagatctcagtggattttataggcacctattaaatcaagcagttggtgaagaggaagtacctaaatgcagctttcgtgaagccagatctggtataaaggaagaaaaatcaaggggcttctccaatgaagtaagttcaaaaaacagaataccacaagagaaatgcattcttcaaactgatgtgaaagtagaggaaaacccagatgcagacagtgacttcgatgctaagagcagtgcggatgatgaaatagaagaaactagagtgaactgcagaagggaaaaggtcatagagacccctgagaatgacttcaagcaccacaggagtcaaaaccactctcggtcacctagtgaagaaagagggcacagtaccaggcaccacacgaaaggatcacgaacgtcgagaggacatgagaaaagggaagatcagcaccagcagaagcaatccagagaccaagagaaccattacactgaccgtgattaccggaaagaaagggattctcataggcacagagaggccagtcatagagattcccattggaagaggcatgaacaggaagataaaccaagggcgagggaccaaagagaaagaagtgacagagtatggaaaagggagaaagatagggagaaatattcccaaagagaacaagaaagagatagacaacaaaatgatcagaaccgacccagtgagaaaggagagaaggaagagaaaagcaaagcaaaggaagagcatatgaaagtaaggaaggaaagatatgaaaataatgataaatacagagatagagaaaaacgagaggtaggtgttcagtcttcagaaagaaatcaagacagaaaggaaagcagcccaaattctagggcaaaggataaatttcttgaccaagaaagatccaacaaaatgagaaacatggcaaaggacaaagaaagaaaccaagagaaaccctctaattctgaatcatcactgggagcaaaacacagactcacagaggaagggcaagagaagggtaaagaacaagagagaccacctgaggcagtgagcaagtttgcaaagcggaacaatgaagaaactgtaatgtcagctagagacaggtacttggccaggcagatggcgcgggttaatgcaaagacctatattgagaaagaagatgattgatggctaccccaagagaaagatttaaggaagcacagaaaactgtaattcctggaacctgctgcgtaaaaccataaaggagtgtgttaccagtagtttggagggcatttttaaatttattttcaaaattttaagttaaaagtcagtcttacagcttggatgtttggatgtggatgtttggctgaatttatatatagtgtgtactcatcaataccacattctttgttgtattcaagaaccgttaagagtgtgctaattccctgtaggtacataatgaggaaaatttgctccactacaaccattaaaaaataattttggccagatacggtagctcgtgcctgtaataccaacattttgggaggccaaggcagaaggatattgaggctaggcattcaagaccagcctaggcaggataataagaccttgtctctatttaaaaaacaaaaagcctagcatggtagtccatgcctgtagtcccagctgttcgagaggctgaggcaagaagatcacttgagcctaggaatttgatgttacagtgaggtatgatcatgccactgcactccaacctgggcaacagaatgagaccctgtctctaaaaaattttttttaaataaataatttaactcttctaataatgttttgttgcaggaaatgtatttcagataaaatatggatttgaaaaacagaaaatatactttatgttctgaaatttgtatttaagtataaaatgtgaatcatcttgtctaaatagcttacagcatagttggcttaaatgaaaataaaatgatatgcttata

SEQ ID NO: 73958 - DNA, 2623 bp, Homo sapiens
gcgtccgcgttcagcggacacgggagcaagatggcgattccgggcaggcagtatgggcttattttgccaaagaaaacacagcagttgcaccctgttttgcaaaaaccatcagtgtttgggaatgattctgatgatgatgatgagatggggtttcactcttgttgcccaggctggagtgcaatggtgcaatctcggctcaccgaacctccacctcctgggttcaagcgattttcctgcctcagcctcccaaatagctgcaattacagacctctgtgagtgaaagccttcagagggaagctgctaagaagcaggccatgaaacagaccaaactggaaatccagaaggcccttgcagaagatgctactgtgtatgaatatgacagtatttatgatgaaatgcagaaaaaaaaggaggaaaataatcccaaattgcttttggggaaagacagaaagcccaagtatattcacaacttgctaaaagcagttgagatcagaaaaaaggaacaggaaaaaagaatggaaaagaaaatacagagagaacgagaaatggaaaagggggagtttgatgataaagaagcatttgtgacatctgcatataagaaaaaactgcaagagagagctgaagaagaagaaagagaaaagagggctgctgcactggaagcatgtttggatgtaaccaagcagaaagatctcagtggattttataggcacctattaaatcaagcagttggtgaagaggaagtacctaaatgcagctttcgtgaagccagatctggtataaaggaagaaaaatcaaggggcttctccaatgaagtaagttcaaaaaacagaataccacaagagaaatgcattcttcaaactgatgtgaaagtagaggaaaacccagatgcagacagtgacttcgatgctaagagcagtgcggatgatgaaatagaagaaactagagtgaactgcagaagggaaaaggtcatagagacccctgagaatgacttcaagcaccacaggagtcaaaaccactctcggtcacctagtgaagaaagagggcacagtaccaggcaccacacgaaaggatcacgaacgtcgagaggacatgagaaaagggaagatcagcaccagcagaagcaatccagagaccaagagaaccattacactgaccgtgattaccggaaagaaagggattctcataggcacagagaggccagtcatagagattcccattggaagaggcatgaacaggaagataaaccaagggcgagggaccaaagagaaagaagtgacagagtatggaaaagggagaaagatagggagaaatattcccaaagagaacaagaaagagatagacaacaaaatgatcagaaccgacccagtgagaaaggagagaaggaagagaaaagcaaagcaaaggaagagcatatgaaagtaaggaaggaaagatatgaaaataatgataaatacagagatagagaaaaacgagaggtaggtgttcagtcttcagaaagaaatcaagacagaaaggaaagcagcccaaattctagggcaaaggataaatttcttgaccaagaaagatccaacaaaatgagaaacatggcaaaggacaaagaaagaaaccaagagaaaccctctaattctgaatcatcactgggagcaaaacacagactcacagaggaagggcaagagaagggtaaagaacaagagagaccacctgaggcagtgagcaagtttgcaaagcggaacaatgaagaaactgtaatgtcagctagagacaggtacttggccaggcagatggcgcgggttaatgcaaagacctatattgagaaagaagatgattgatggctaccccaagagaaagatttaaggaagcacagaaaactgtaattcctggaacctgctgcgtaaaaccataaaggagtgtgttaccagtagtttggagggcatttttaaatttattttcaaaattttaagttaaaagtcagtcttacagcttggatgtttggatgtggatgtttggctgaatttatatatagtgtgtactcatcaataccacattctttgttgtattcaagaaccgttaagagtgtgctaattccctgtaggtacataatgaggaaaatttgctccactacaaccattaaaaaataattttggccagatacggtagctcgtgcctgtaataccaacattttgggaggccaaggcagaaggatattgaggctaggcattcaagaccagcctaggcaggataataagaccttgtctctatttaaaaaacaaaaagcctagcatggtagtccatgcctgtagtcccagctgttcgagaggctgaggcaagaagatcacttgagcctaggaatttgatgttacagtgaggtatgatcatgccactgcactccaacctgggcaacagaatgagaccctgtctctaaaaaattttttttaaataaataatttaactcttctaataatgttttgttgcaggaaatgtatttcagataaaatatggatttgaaaaacagaaaatatactttatgttctgaaatttgtatttaagtataaaatgtgaatcatcttgtctaaatagcttacagcatagttggcttaaatgaaaataaaatgatatgcttata

SEQ ID NO: 73959 - DNA, 2665 bp, Homo sapiens
gcgtccgcgttcagcggacacgggagcaagatggcgattccgggcaggcagacaccttgcagtaaatccatcaggaacttgctgtttatcaagcacagaccctcatggaagttcattgagcaaacagatgagggctgccacctcaacctggctagactgctgctctgatgttaccttcagcactagatggggtttcactcttgttgcccaggctggagtgcaatggtgcaatctcggctcaccgaacctccacctcctgggttcaagcgattttcctgcctcagcctcccaaatagctgcaattacagacctctgtgagtgaaagccttcagagggaagctgctaagaagcaggccatgaaacagaccaaactggaaatccagaaggcccttgcagaagatgctactgtgtatgaatatgacagtatttatgatgaaatgcagaaaaaaaaggaggaaaataatcccaaattgcttttggggaaagacagaaagcccaagtatattcacaacttgctaaaagcagttgagatcagaaaaaaggaacaggaaaaaagaatggaaaagaaaatacagagagaacgagaaatggaaaagggggagtttgatgataaagaagcatttgtgacatctgcatataagaaaaaactgcaagagagagctgaagaagaagaaagagaaaagagggctgctgcactggaagcatgtttggatgtaaccaagcagaaagatctcagtggattttataggcacctattaaatcaagcagttggtgaagaggaagtacctaaatgcagctttcgtgaagccagatctggtataaaggaagaaaaatcaaggggcttctccaatgaagtaagttcaaaaaacagaataccacaagagaaatgcattcttcaaactgatgtgaaagtagaggaaaacccagatgcagacagtgacttcgatgctaagagcagtgcggatgatgaaatagaagaaactagagtgaactgcagaagggaaaaggtcatagagacccctgagaatgacttcaagcaccacaggagtcaaaaccactctcggtcacctagtgaagaaagagggcacagtaccaggcaccacacgaaaggatcacgaacgtcgagaggacatgagaaaagggaagatcagcaccagcagaagcaatccagagaccaagagaaccattacactgaccgtgattaccggaaagaaagggattctcataggcacagagaggccagtcatagagattcccattggaagaggcatgaacaggaagataaaccaagggcgagggaccaaagagaaagaagtgacagagtatggaaaagggagaaagatagggagaaatattcccaaagagaacaagaaagagatagacaacaaaatgatcagaaccgacccagtgagaaaggagagaaggaagagaaaagcaaagcaaaggaagagcatatgaaagtaaggaaggaaagatatgaaaataatgataaatacagagatagagaaaaacgagaggtaggtgttcagtcttcagaaagaaatcaagacagaaaggaaagcagcccaaattctagggcaaaggataaatttcttgaccaagaaagatccaacaaaatgagaaacatggcaaaggacaaagaaagaaaccaagagaaaccctctaattctgaatcatcactgggagcaaaacacagactcacagaggaagggcaagagaagggtaaagaacaagagagaccacctgaggcagtgagcaagtttgcaaagcggaacaatgaagaaactgtaatgtcagctagagacaggtacttggccaggcagatggcgcgggttaatgcaaagacctatattgagaaagaagatgattgatggctaccccaagagaaagatttaaggaagcacagaaaactgtaattcctggaacctgctgcgtaaaaccataaaggagtgtgttaccagtagtttggagggcatttttaaatttattttcaaaattttaagttaaaagtcagtcttacagcttggatgtttggatgtggatgtttggctgaatttatatatagtgtgtactcatcaataccacattctttgttgtattcaagaaccgttaagagtgtgctaattccctgtaggtacataatgaggaaaatttgctccactacaaccattaaaaaataattttggccagatacggtagctcgtgcctgtaataccaacattttgggaggccaaggcagaaggatattgaggctaggcattcaagaccagcctaggcaggataataagaccttgtctctatttaaaaaacaaaaagcctagcatggtagtccatgcctgtagtcccagctgttcgagaggctgaggcaagaagatcacttgagcctaggaatttgatgttacagtgaggtatgatcatgccactgcactccaacctgggcaacagaatgagaccctgtctctaaaaaattttttttaaataaataatttaactcttctaataatgttttgttgcaggaaatgtatttcagataaaatatggatttgaaaaacagaaaatatactttatgttctgaaatttgtatttaagtataaaatgtgaatcatcttgtctaaatagcttacagcatagttggcttaaatgaaaataaaatgatatgcttata

SEQ ID NO: 73960 - DNA, 1997 bp, Homo sapiens
tgagttagaggatcccgtctctccacgacggaggcatgtttggatgtaaccaagcagaaagatctcagtggattttataggcacctattaaatcaagcagttggtgaagaggaagtacctaaatgcagctttcgtgaagccagatctggtataaaggaagaaaaatcaaggggcttctccaatgaagtaagttcaaaaaacagaataccacaagagaaatgcattcttcaaactgatgtgaaagtagaggaaaacccagatgcagacagtgacttcgatgctaagagcagtgcggatgatgaaatagaagaaactagagtgaactgcagaagggaaaaggtcatagagacccctgagaatgacttcaagcaccacaggagtcaaaaccactctcggtcacctagtgaagaaagagggcacagtaccaggcaccacacgaaaggatcacgaacgtcgagaggacatgagaaaagggaagatcagcaccagcagaagcaatccagagaccaagagaaccattacactgaccgtgattaccggaaagaaagggattctcataggcacagagaggccagtcatagagattcccattggaagaggcatgaacaggaagataaaccaagggcgagggaccaaagagaaagaagtgacagagtatggaaaagggagaaagatagggagaaatattcccaaagagaacaagaaagagatagacaacaaaatgatcagaaccgacccagtgagaaaggagagaaggaagagaaaagcaaagcaaaggaagagcatatgaaagtaaggaaggaaagatatgaaaataatgataaatacagagatagagaaaaacgagaggtaggtgttcagtcttcagaaagaaatcaagacagaaaggaaagcagcccaaattctagggcaaaggataaatttcttgaccaagaaagatccaacaaaatgagaaacatggcaaaggacaaagaaagaaaccaagagaaaccctctaattctgaatcatcactgggagcaaaacacagactcacagaggaagggcaagagaagggtaaagaacaagagagaccacctgaggcagtgagcaagtttgcaaagcggaacaatgaagaaactgtaatgtcagctagagacaggtacttggccaggcagatggcgcgggttaatgcaaagacctatattgagaaagaagatgattgatggctaccccaagagaaagatttaaggaagcacagaaaactgtaattcctggaacctgctgcgtaaaaccataaaggagtgtgttaccagtagtttggagggcatttttaaatttattttcaaaattttaagttaaaagtcagtcttacagcttggatgtttggatgtggatgtttggctgaatttatatatagtgtgtactcatcaataccacattctttgttgtattcaagaaccgttaagagtgtgctaattccctgtaggtacataatgaggaaaatttgctccactacaaccattaaaaaataattttggccagatacggtagctcgtgcctgtaataccaacattttgggaggccaaggcagaaggatattgaggctaggcattcaagaccagcctaggcaggataataagaccttgtctctatttaaaaaacaaaaagcctagcatggtagtccatgcctgtagtcccagctgttcgagaggctgaggcaagaagatcacttgagcctaggaatttgatgttacagtgaggtatgatcatgccactgcactccaacctgggcaacagaatgagaccctgtctctaaaaaattttttttaaataaataatttaactcttctaataatgttttgttgcaggaaatgtatttcagataaaatatggatttgaaaaacagaaaatatactttatgttctgaaatttgtatttaagtataaaatgtgaatcatcttgtctaaatagcttacagcatagttggcttaaatgaaaataaaatgatatgcttata

SEQ ID NO: 73961 - DNA, 1590 bp, Homo sapiens
ctctagaggctcccccaataagaacaccctgaaaggatcacgaacgtcgagaggacatgagaaaagggaagatcagcaccagcagaagcaatccagagaccaagagaaccattacactgaccgtgattaccggaaagaaagggattctcataggcacagagaggccagtcatagagattcccattggaagaggcatgaacaggaagataaaccaagggcgagggaccaaagagaaagaagtgacagagtatggaaaagggagaaagatagggagaaatattcccaaagagaacaagaaagagatagacaacaaaatgatcagaaccgacccagtgagaaaggagagaaggaagagaaaagcaaagcaaaggaagagcatatgaaagtaaggaaggaaagatatgaaaataatgataaatacagagatagagaaaaacgagaggtaggtgttcagtcttcagaaagaaatcaagacagaaaggaaagcagcccaaattctagggcaaaggataaatttcttgaccaagaaagatccaacaaaatgagaaacatggcaaaggacaaagaaagaaaccaagagaaaccctctaattctgaatcatcactgggagcaaaacacagactcacagaggaagggcaagagaagggtaaagaacaagagagaccacctgaggcagtgagcaagtttgcaaagcggaacaatgaagaaactgtaatgtcagctagagacaggtacttggccaggcagatggcgcgggttaatgcaaagacctatattgagaaagaagatgattgatggctaccccaagagaaagatttaaggaagcacagaaaactgtaattcctggaacctgctgcgtaaaaccataaaggagtgtgttaccagtagtttggagggcatttttaaatttattttcaaaattttaagttaaaagtcagtcttacagcttggatgtttggatgtggatgtttggctgaatttatatatagtgtgtactcatcaataccacattctttgttgtattcaagaaccgttaagagtgtgctaattccctgtaggtacataatgaggaaaatttgctccactacaaccattaaaaaataattttggccagatacggtagctcgtgcctgtaataccaacattttgggaggccaaggcagaaggatattgaggctaggcattcaagaccagcctaggcaggataataagaccttgtctctatttaaaaaacaaaaagcctagcatggtagtccatgcctgtagtcccagctgttcgagaggctgaggcaagaagatcacttgagcctaggaatttgatgttacagtgaggtatgatcatgccactgcactccaacctgggcaacagaatgagaccctgtctctaaaaaattttttttaaataaataatttaactcttctaataatgttttgttgcaggaaatgtatttcagataaaatatggatttgaaaaacagaaaatatactttatgttctgaaatttgtatttaagtataaaatgtgaatcatcttgtctaaatagcttacagcatagttggcttaaatgaaaataaaatgatatgcttata

SEQ ID NO: 73962 - DNA, 2501 bp, Homo sapiens
gcgtccgcgttcagcggacacgggagcaagatggcgattccgggcaggcagtatgggcttattttgccaaagaaaacacagcagttgcaccctgttttgcaaaaaccatcagtgtttgggaatgattctgatgatgatgatgagacctctgtgagtgaaagccttcagagggaagctgctaagaagcaggccatgaaacagaccaaactggaaatccagaaggcccttgcagaagatgctactgtgtatgaatatgacagtatttatgatgaaatgcagaaaaaaaaggaggaaaataatcccaaattgcttttggggaaagacagaaagcccaagtatattcacaacttgctaaaagcagttgagatcagaaaaaaggaacaggaaaaaagaatggaaaagaaaatacagagagaacgagaaatggaaaagggggagtttgatgataaagaagcatttgtgacatctgcatataagaaaaaactgcaagagagagctgaagaagaagaaagagaaaagagggctgctgcactggaagcatgtttggatgtaaccaagcagaaagatctcagtggattttataggcacctattaaatcaagcagttggtgaagaggaagtacctaaatgcagctttcgtgaagccagatctggtataaaggaagaaaaatcaaggggcttctccaatgaagtaagttcaaaaaacagaataccacaagagaaatgcattcttcaaactgatgtgaaagtagaggaaaacccagatgcagacagtgacttcgatgctaagagcagtgcggatgatgaaatagaagaaactagagtgaactgcagaagggaaaaggtcatagagacccctgagaatgacttcaagcaccacaggagtcaaaaccactctcggtcacctagtgaagaaagagggcacagtaccaggcaccacacgaaaggatcacgaacgtcgagaggacatgagaaaagggaagatcagcaccagcagaagcaatccagagaccaagagaaccattacactgaccgtgattaccggaaagaaagggattctcataggcacagagaggccagtcatagagattcccattggaagaggcatgaacaggaagataaaccaagggcgagggaccaaagagaaagaagtgacagagtatggaaaagggagaaagatagggagaaatattcccaaagagaacaagaaagagatagacaacaaaatgatcagaaccgacccagtgagaaaggagagaaggaagagaaaagcaaagcaaaggaagagcatatgaaagtaaggaaggaaagatatgaaaataatgataaatacagagatagagaaaaacgagaggtaggtgttcagtcttcagaaagaaatcaagacagaaaggaaagcagcccaaattctagggcaaaggataaatttcttgaccaagaaagatccaacaaaatgagaaacatggcaaaggacaaagaaagaaaccaagagaaaccctctaattctgaatcatcactgggagcaaaacacagactcacagaggaagggcaagagaagggtaaagaacaagagagaccacctgaggcagtgagcaagtttgcaaagcggaacaatgaagaaactgtaatgtcagctagagacaggtacttggccaggcagatggcgcgggttaatgcaaagacctatattgagaaagaagatgattgatggctaccccaagagaaagatttaaggaagcacagaaaactgtaattcctggaacctgctgcgtaaaaccataaaggagtgtgttaccagtagtttggagggcatttttaaatttattttcaaaattttaagttaaaagtcagtcttacagcttggatgtttggatgtggatgtttggctgaatttatatatagtgtgtactcatcaataccacattctttgttgtattcaagaaccgttaagagtgtgctaattccctgtaggtacataatgaggaaaatttgctccactacaaccattaaaaaataattttggccagatacggtagctcgtgcctgtaataccaacattttgggaggccaaggcagaaggatattgaggctaggcattcaagaccagcctaggcaggataataagaccttgtctctatttaaaaaacaaaaagcctagcatggtagtccatgcctgtagtcccagctgttcgagaggctgaggcaagaagatcacttgagcctaggaatttgatgttacagtgaggtatgatcatgccactgcactccaacctgggcaacagaatgagaccctgtctctaaaaaattttttttaaataaataatttaactcttctaataatgttttgttgcaggaaatgtatttcagataaaatatggatttgaaaaacagaaaatatactttatgttctgaaatttgtatttaagtataaaatgtgaatcatcttgtctaaatagcttacagcatagttggcttaaatgaaaataaaatgatatgcttata

SEQ ID NO: 73963 - DNA, 2532 bp, Homo sapiens
gcgtccgcgttcagcggacacgggagcaagatggcgattccgggcaggcagtatgggcttattttgccaaagaaaacacagcagttgcaccctgttttgcaaaaaccatcagtgtttgggaatgattctgatgatgatgatgagacctctgtgagtgaaagccttcagagggaagctgctaagaagcaggccatgaaacagaccaaactggaaatccagaaggcccttgcagaagatgctactgtgtatgaatatgacagtatttatgatgaaatgcagaaaaaaaaggaggaaaataatcccaaattgcttttggggaaagacagaaagcccaagtatattcacaacttgctaaaagcagttgagatcagaaaaaaggaacaggaaaaaagaatggaaaagaaaatacagagagaacgagaaatggaaaagggggagtttgatgataaagaagcatttgtgacatctgcatataagaaaaaactgcaagagagagctgaagaagaagaaagagaaaagagggctgctgcactggaagcatgtttggatgtaaccaagcagaaagatctcagtggattttataggcacctattaaatcaagcagttggtgaagaggaagtacctaaatgcagctttcgtgaagccagatctggtataaaggaagaaaaatcaaggggcttctccaatgaagtaagttcaaaaaacagaataccacaagagaaatgcattcttcaaactgatgtgaaagtagaggaaaacccagatgcagacagtgacttcgatgctaagagcagtgcggatgatgaaatagaagaaactagagtgaactgcagaagggaaaaggtcatagagacccctgagaatgacttcaagcaccacaggagtcaaaaccactctcggtcacctagtgaagaaagagggcacagtaccaggcaccacacgaaaggatcacgaacgtcgagaggacatgagaaaagggaagatcagcaccagcagaagcaatccagagaccaagagaaccattacactgaccgtgattaccggaaagaaagggattctcataggcacagagaggccagtcatagagattcccattggaagaggcatgaacaggaagataaaccaagggcgagggaccaaagagaaagaagtgacagagtatggaaaagggagaaagatagggagaaatattcccaaagagaacaagaaagagatagacaacaaaatgatcagaaccgacccagtgagaaaggagagaaggaagagaaaagcaaagcaaaggaagagcatatgaaagtaaggaaggaaagatatgaaaataatgataaatacagagatagagaaaaacgagaggtaggtgttcagtcttcagaaagaaatcaagacagaaaggaaagcagcccaaattctagggcaaaggataaatttcttgaccaagaaagatccaacaaaatgagaaacatggcaaaggacaaagaaagaaaccaagagaaaccctctaattctgaatcatcactgggagcaaaacacagactcacagaggaagggcaagagaagggtaaagaacaagagagaccacctgaggcagtgagcaagtttgcaaagcggaacaatgaagaaactgtaatgtcagctagagacaggtacttggccaggcagatggcgcgggttaatgcaaagacctatattgagaaagaagatgattgatggctaccccaagagaaagatttaaggaagcacagaaaactgtaattcctggaacctgctgcgtaaaaccataaaggagtgtgttaccagtagtttggagggcatttttaaatttattttcaaaattttaagttaaaagtcagtcttacagcttggatgtttggatgtggatgtttggctgaatttatatatagtgtgtactcatcaataccacattctttgttgtattcaagaaccgttaagagtgtgctaattccctgtaggtacataatgaggaaaatttgctccactacaaccattaaaaaataattttggccagatacggtagctcgtgcctgtaataccaacattttgggaggccaaggcagaaggatattgaggctaggcattcaagaccagcctaggcaggataataagaccttgtctctatttaaaaaacaaaaagcctagcatggtagtccatgcctgtagtcccagctgttcgagaggctgaggcaagaagatcacttgagcctaggaatttgatgttacagtgaggtatgatcatgccactgcactccaacctgggcaacagaatgagaccctgtctctaaaaaattttttttaaataaataatttaactcttctaataatgttttgttgcaggaaatgtatttcagataaaatatggatttgaaaaacagaaaatatactttatgttctgaaatttgtatttaagtataaaatgtgaatcatcttgtctaaatagcttacagcatagttggcttaaatgaaaataaaatgatatgcttatacattttatttatgcatttattttaaaataat

SEQ ID NO: 73964 - DNA, 2701 bp, Homo sapiens
  misc_feature (10)..(10): n is a, c, g, or t
  misc_feature (259)..(259): n is a, c, g, or t
  misc_feature (265)..(265): n is a, c, g, or t
cgagaagtcntgaggaacatagattcccctcccccgtacattttcccggatggaagcccgaagtttgagggagaaacttgtgaggaaataaaggaagttaggctgaggggcagagagcgagacttttctattttccaaaagctcggtctgaggcccctcagtcttgcttcctaacccgcgcttgagtttctccccgcttggatgctctcaggggcagtgtgaagagagacagttcctggcttccttagagggccttgtnctcctnggcagaagctcaagtcctgattcccgcccttccttctcgttttaggaatattgttctgagaagccacagaaaaagggagacctctgtgagtgaaagccttcagagggaagctgctaagaagcaggccatgaaacagaccaaactggaaatccagaaggcccttgcagaagatgctactgtgtatgaatatgacagtatttatgatgaaatgcagaaaaaaaaggaggaaaataatcccaaattgcttttggggaaagacagaaagcccaagtatattcacaacttgctaaaagcagttgagatcagaaaaaaggaacaggaaaaaagaatggaaaagaaaatacagagagaacgagaaatggaaaagggggagtttgatgataaagaagcatttgtgacatctgcatataagaaaaaactgcaagagagagctgaagaagaagaaagagaaaagagggctgctgcactggaagcatgtttggatgtaaccaagcagaaagatctcagtggattttataggcacctattaaatcaagcagttggtgaagaggaagtacctaaatgcagctttcgtgaagccagatctggtataaaggaagaaaaatcaaggggcttctccaatgaagtaagttcaaaaaacagaataccacaagagaaatgcattcttcaaactgatgtgaaagtagaggaaaacccagatgcagacagtgacttcgatgctaagagcagtgcggatgatgaaatagaagaaactagagtgaactgcagaagggaaaaggtcatagagacccctgagaatgacttcaagcaccacaggagtcaaaaccactctcggtcacctagtgaagaaagagggcacagtaccaggcaccacacgaaaggatcacgaacgtcgagaggacatgagaaaagggaagatcagcaccagcagaagcaatccagagaccaagagaaccattacactgaccgtgattaccggaaagaaagggattctcataggcacagagaggccagtcatagagattcccattggaagaggcatgaacaggaagataaaccaagggcgagggaccaaagagaaagaagtgacagagtatggaaaagggagaaagatagggagaaatattcccaaagagaacaagaaagagatagacaacaaaatgatcagaaccgacccagtgagaaaggagagaaggaagagaaaagcaaagcaaaggaagagcatatgaaagtaaggaaggaaagatatgaaaataatgataaatacagagatagagaaaaacgagaggtaggtgttcagtcttcagaaagaaatcaagacagaaaggaaagcagcccaaattctagggcaaaggataaatttcttgaccaagaaagatccaacaaaatgagaaacatggcaaaggacaaagaaagaaaccaagagaaaccctctaattctgaatcatcactgggagcaaaacacagactcacagaggaagggcaagagaagggtaaagaacaagagagaccacctgaggcagtgagcaagtttgcaaagcggaacaatgaagaaactgtaatgtcagctagagacaggtacttggccaggcagatggcgcgggttaatgcaaagacctatattgagaaagaagatgattgatggctaccccaagagaaagatttaaggaagcacagaaaactgtaattcctggaacctgctgcgtaaaaccataaaggagtgtgttaccagtagtttggagggcatttttaaatttattttcaaaattttaagttaaaagtcagtcttacagcttggatgtttggatgtggatgtttggctgaatttatatatagtgtgtactcatcaataccacattctttgttgtattcaagaaccgttaagagtgtgctaattccctgtaggtacataatgaggaaaatttgctccactacaaccattaaaaaataattttggccagatacggtagctcgtgcctgtaataccaacattttgggaggccaaggcagaaggatattgaggctaggcattcaagaccagcctaggcaggataataagaccttgtctctatttaaaaaacaaaaagcctagcatggtagtccatgcctgtagtcccagctgttcgagaggctgaggcaagaagatcacttgagcctaggaatttgatgttacagtgaggtatgatcatgccactgcactccaacctgggcaacagaatgagaccctgtctctaaaaaattttttttaaataaataatttaactcttctaataatgttttgttgcaggaaatgtatttcagataaaatatggatttgaaaaacagaaaatatactttatgttctgaaatttgtatttaagtataaaatgtgaatcatcttgtctaaatagcttacagcatagttggcttaaatgaaaataaaatgatatgcttata

SEQ ID NO: 73965 - DNA, 2532 bp, Homo sapiens
gcgtccgcgttcagcggacacgggagcaagatggcgattccgggcaggcagaatattgttctgagaagccacagaaaaagggtatgggcttattttgccaaagaaaacacagcagttgcaccctgttttgcaaaaaccatcagtgtttgggaatgattctgatgatgatgatgagacctctgtgagtgaaagccttcagagggaagctgctaagaagcaggccatgaaacagaccaaactggaaatccagaaggcccttgcagaagatgctactgtgtatgaatatgacagtatttatgatgaaatgcagaaaaaaaaggaggaaaataatcccaaattgcttttggggaaagacagaaagcccaagtatattcacaacttgctaaaagcagttgagatcagaaaaaaggaacaggaaaaaagaatggaaaagaaaatacagagagaacgagaaatggaaaagggggagtttgatgataaagaagcatttgtgacatctgcatataagaaaaaactgcaagagagagctgaagaagaagaaagagaaaagagggctgctgcactggaagcatgtttggatgtaaccaagcagaaagatctcagtggattttataggcacctattaaatcaagcagttggtgaagaggaagtacctaaatgcagctttcgtgaagccagatctggtataaaggaagaaaaatcaaggggcttctccaatgaagtaagttcaaaaaacagaataccacaagagaaatgcattcttcaaactgatgtgaaagtagaggaaaacccagatgcagacagtgacttcgatgctaagagcagtgcggatgatgaaatagaagaaactagagtgaactgcagaagggaaaaggtcatagagacccctgagaatgacttcaagcaccacaggagtcaaaaccactctcggtcacctagtgaagaaagagggcacagtaccaggcaccacacgaaaggatcacgaacgtcgagaggacatgagaaaagggaagatcagcaccagcagaagcaatccagagaccaagagaaccattacactgaccgtgattaccggaaagaaagggattctcataggcacagagaggccagtcatagagattcccattggaagaggcatgaacaggaagataaaccaagggcgagggaccaaagagaaagaagtgacagagtatggaaaagggagaaagatagggagaaatattcccaaagagaacaagaaagagatagacaacaaaatgatcagaaccgacccagtgagaaaggagagaaggaagagaaaagcaaagcaaaggaagagcatatgaaagtaaggaaggaaagatatgaaaataatgataaatacagagatagagaaaaacgagaggtaggtgttcagtcttcagaaagaaatcaagacagaaaggaaagcagcccaaattctagggcaaaggataaatttcttgaccaagaaagatccaacaaaatgagaaacatggcaaaggacaaagaaagaaaccaagagaaaccctctaattctgaatcatcactgggagcaaaacacagactcacagaggaagggcaagagaagggtaaagaacaagagagaccacctgaggcagtgagcaagtttgcaaagcggaacaatgaagaaactgtaatgtcagctagagacaggtacttggccaggcagatggcgcgggttaatgcaaagacctatattgagaaagaagatgattgatggctaccccaagagaaagatttaaggaagcacagaaaactgtaattcctggaacctgctgcgtaaaaccataaaggagtgtgttaccagtagtttggagggcatttttaaatttattttcaaaattttaagttaaaagtcagtcttacagcttggatgtttggatgtggatgtttggctgaatttatatatagtgtgtactcatcaataccacattctttgttgtattcaagaaccgttaagagtgtgctaattccctgtaggtacataatgaggaaaatttgctccactacaaccattaaaaaataattttggccagatacggtagctcgtgcctgtaataccaacattttgggaggccaaggcagaaggatattgaggctaggcattcaagaccagcctaggcaggataataagaccttgtctctatttaaaaaacaaaaagcctagcatggtagtccatgcctgtagtcccagctgttcgagaggctgaggcaagaagatcacttgagcctaggaatttgatgttacagtgaggtatgatcatgccactgcactccaacctgggcaacagaatgagaccctgtctctaaaaaattttttttaaataaataatttaactcttctaataatgttttgttgcaggaaatgtatttcagataaaatatggatttgaaaaacagaaaatatactttatgttctgaaatttgtatttaagtataaaatgtgaatcatcttgtctaaatagcttacagcatagttggcttaaatgaaaataaaatgatatgcttata

SEQ ID NO: 73966 - DNA, 2169 bp, Homo sapiens
atgcagacagtgacttcgatgctaagagcagtgcggatgatgtaatagaagaaactagagtgaactgcagaagggaaaaggtcatagagacccctgagaatgacttcaagcaccacaggagtcgtaaccactctcgttcacctagtgtagaaagagggcaacagtacggcaagaagaaagagaaaagagggctgccgtactggaagcatgtttggatgtaaccaagcagaaagatctcagtggattttataggcacctattaaatcaagcagttggtgaagaggaagtacctaaatgcagctttcgtgaagccagatctggtataaaggaagaaaaatcaaggggcttctccaatgaagtaagttcaaaaaacagaataccacaagagaaatgcattcttcaaactgatgtgaaagtagaggaaaacccagatgcagacagtgacttcgatgctaagagcagtgcggatgatgaaatagaagaaactagagtgaactgcagaagggaaaaggtcatagagacccctgagaatgacttcaagcaccacaggagtcaaaaccactctcggtcacctagtgaagaaagagggcacagtaccaggcaccacacgaaaggatcacgaacgtcgagaggacatgagaaaagggaagatcagcaccagcagaagcaatccagagaccaagagaaccattacactgaccgtgattaccggaaagaaagggattctcataggcacagagaggccagtcatagagattcccattggaagaggcatgaacaggaagataaaccaagggcgagggaccaaagagaaagaagtgacagagtatggaaaagggagaaagatagggagaaatattcccaaagagaacaagaaagagatagacaacaaaatgatcagaaccgacccagtgagaaaggagagaaggaagagaaaagcaaagcaaaggaagagcatatgaaagtaaggaaggaaagatatgaaaataatgataaatacagagatagagaaaaacgagaggtaggtgttcagtcttcagaaagaaatcaagacagaaaggaaagcagcccaaattctagggcaaaggataaatttcttgaccaagaaagatccaacaaaatgagaaacatggcaaaggacaaagaaagaaaccaagagaaaccctctaattctgaatcatcactgggagcaaaacacagactcacagaggaagggcaagagaagggtaaagaacaagagagaccacctgaggcagtgagcaagtttgcaaagcggaacaatgaagaaactgtaatgtcagctagagacaggtacttggccaggcagatggcgcgggttaatgcaaagacctatattgagaaagaagatgattgatggctaccccaagagaaagatttaaggaagcacagaaaactgtaattcctggaacctgctgcgtaaaaccataaaggagtgtgttaccagtagtttggagggcatttttaaatttattttcaaaattttaagttaaaagtcagtcttacagcttggatgtttggatgtggatgtttggctgaatttatatatagtgtgtactcatcaataccacattctttgttgtattcaagaaccgttaagagtgtgctaattccctgtaggtacataatgaggaaaatttgctccactacaaccattaaaaaataattttggccagatacggtagctcgtgcctgtaataccaacattttgggaggccaaggcagaaggatattgaggctaggcattcaagaccagcctaggcaggataataagaccttgtctctatttaaaaaacaaaaagcctagcatggtagtccatgcctgtagtcccagctgttcgagaggctgaggcaagaagatcacttgagcctaggaatttgatgttacagtgaggtatgatcatgccactgcactccaacctgggcaacagaatgagaccctgtctctaaaaaattttttttaaataaataatttaactcttctaataatgttttgttgcaggaaatgtatttcagataaaatatggatttgaaaaacagaaaatatactttatgttctgaaatttgtatttaagtataaaatgtgaatcatcttgtctaaatagcttacagcatagttggcttaaatgaaaataaaatgatatgcttata

SEQ ID NO: 73967 - DNA, 2034 bp, Homo sapiens
gcagtgagccgagatcgtgccactgcactccagcctggtaacagagtgacactccgtctcaaaaaaaaaaccatgtttggatgtaaccaagcagaaagatctcagtggattttataggcacctattaaatcaagcagttggtgaagaggaagtacctaaatgcagctttcgtgaagccagatctggtataaaggaagaaaaatcaaggggcttctccaatgaagtaagttcaaaaaacagaataccacaagagaaatgcattcttcaaactgatgtgaaagtagaggaaaacccagatgcagacagtgacttcgatgctaagagcagtgcggatgatgaaatagaagaaactagagtgaactgcagaagggaaaaggtcatagagacccctgagaatgacttcaagcaccacaggagtcaaaaccactctcggtcacctagtgaagaaagagggcacagtaccaggcaccacacgaaaggatcacgaacgtcgagaggacatgagaaaagggaagatcagcaccagcagaagcaatccagagaccaagagaaccattacactgaccgtgattaccggaaagaaagggattctcataggcacagagaggccagtcatagagattcccattggaagaggcatgaacaggaagataaaccaagggcgagggaccaaagagaaagaagtgacagagtatggaaaagggagaaagatagggagaaatattcccaaagagaacaagaaagagatagacaacaaaatgatcagaaccgacccagtgagaaaggagagaaggaagagaaaagcaaagcaaaggaagagcatatgaaagtaaggaaggaaagatatgaaaataatgataaatacagagatagagaaaaacgagaggtaggtgttcagtcttcagaaagaaatcaagacagaaaggaaagcagcccaaattctagggcaaaggataaatttcttgaccaagaaagatccaacaaaatgagaaacatggcaaaggacaaagaaagaaaccaagagaaaccctctaattctgaatcatcactgggagcaaaacacagactcacagaggaagggcaagagaagggtaaagaacaagagagaccacctgaggcagtgagcaagtttgcaaagcggaacaatgaagaaactgtaatgtcagctagagacaggtacttggccaggcagatggcgcgggttaatgcaaagacctatattgagaaagaagatgattgatggctaccccaagagaaagatttaaggaagcacagaaaactgtaattcctggaacctgctgcgtaaaaccataaaggagtgtgttaccagtagtttggagggcatttttaaatttattttcaaaattttaagttaaaagtcagtcttacagcttggatgtttggatgtggatgtttggctgaatttatatatagtgtgtactcatcaataccacattctttgttgtattcaagaaccgttaagagtgtgctaattccctgtaggtacataatgaggaaaatttgctccactacaaccattaaaaaataattttggccagatacggtagctcgtgcctgtaataccaacattttgggaggccaaggcagaaggatattgaggctaggcattcaagaccagcctaggcaggataataagaccttgtctctatttaaaaaacaaaaagcctagcatggtagtccatgcctgtagtcccagctgttcgagaggctgaggcaagaagatcacttgagcctaggaatttgatgttacagtgaggtatgatcatgccactgcactccaacctgggcaacagaatgagaccctgtctctaaaaaattttttttaaataaataatttaactcttctaataatgttttgttgcaggaaatgtatttcagataaaatatggatttgaaaaacagaaaatatactttatgttctgaaatttgtatttaagtataaaatgtgaatcatcttgtctaaatagcttacagcatagttggcttaaatgaaaataaaatgatatgcttata

SEQ ID NO: 73968 - DNA, 1949 bp, Homo sapiens
gcgtccgcgttcagcggacacgggagcaagatggcgattccgggcaggcagtatgggcttattttgccaaagaaaacacagcagttgcaccctgttttgcaaaaaccatcagtgtttgggaatgattctgatgatgatgatgagacctctgtgagtgaaagccttcagagggaagctgctaagaagcaggccatgaaacagaccaaactggaaatccagaaggcccttgcagaagatgctactgtgtatgaatatgacagtatttatgatgaaatgcagaaaaaaaaggaggaaaataatcccaaattgcttttggggaaagacagaaagcccaagtatattcacaacttgctaaaagcagttgagatcagaaaaaaggaacaggaaaaaagaatggaaaagaaaatacagagagaacgagaaatggaaaagggggagtttgatgataaagaagcatttgtgacatctgcatataagaaaaaactgcaagagagagctgaagaagaagaaagagaaaagagggctgctgcactggaagcatgtttggatgtaaccaagcagaaagatctcagtggattttataggcacctattaaatcaagcagttggtgaagaggaagtacctaaatgcagctttcgtgaagccagatctggtataaaggaagaaaaatcaaggggcttctccaatgaagtaagttcaaaaaacagaataccacaagagaaatgcattcttcaaactgatgtgaaagtagaggaaaacccagatgcagacagtgacttcgatgctaagagcagtgcggatgatgaaatagaagaaactagagtgaactgcagaagggaaaaggtcatagagacccctgagaatgacttcaagcaccacaggagtcaaaaccactctcggtcacctagtgaagaaagagggcacagtaccaggcaccacacgaaaggatcacgaacgtcgagaggacatgagaaaagggaagatcagcaccagcagaagcaatccagagaccaagagaaccattacactgaccgtgattaccggaaagaaagggattctcataggcacagagaggccagtcatagagattcccattggaagaggcatgaacaggaagataaaccaagggcgagggaccaaagagaaagaagtgacagagtatggaaaagggagaaagatagggagaaatattcccaaagagaacaagaaagagatagacaacaaaatgatcagaaccgacccagtgagaaaggagagaaggaagagaaaagcaaagcaaaggaagagcatatgaaagtaaggaaggaaagatatgaaaataatgataaatacagagatagagaaaaacgagaggtaggtgttcagtcttcagaaagaaatcaagacagaaaggaaagcagcccaaattctagggcaaaggataaatttcttgaccaagaaagatccaacaaaatgagaaacatggcaaaggacaaagaaagaaaccaagagaaaccctctaattctgaatcatcactgggagcaaaacacagactcacagaggaagggcaagagaagggtaaagaacaagagagaccacctgaggcagtgagcaagtttgcaaagcggaacaatgaagaaactgtaatgtcactgttcgagaggctgaggcaagaagatcacttgagcctaggaatttgatgttacagtgaggtatgatcatgccactgcactccaacctgggcaacagaatgagaccctgtctctaaaaaattttttttaaataaataatttaactcttctaataatgttttgttgcaggaaatgtatttcagataaaatatggatttgaaaaacagaaaatatactttatgttctgaaatttgtatttaagtataaaatgtgaatcatcttgtctaaatagcttacagcatagttggcttaaatgaaaataaaatgatatgcttata

SEQ ID NO: 73969 - DNA, 1270 bp, Homo sapiens
ctcgtgccggccgagtggacagtggctgattatggagagcagaggcccactggctacctcgcgcctgctgctgttgctgctgttgctactactgcgtcacacccgccagggatgggccctgagacctgttctccccacccagagtgcccacgaccctccggctgtccacctcagcaatggcccaggacaagagcctatcgctgtcatgacctttgacctcaccaagatcacaaaaacctcctcctcctttgaggttcgaacctgggacccagagggagtgattttttatggggataccaaccctaaggatgactggtttatgctgggacttcgagacggcaggcctgagatccaactgcacaatcactgggcccagcttacggtgggtgctggaccacggctggatgatgggagatggcaccaggtggaagtcaagatggagggggactctgtgctgctggaggtggatggggaggaggtgctgcgcctgagacaggtctctgggcccctgaccagcaaacgccatcccatcatgaggattgcgcttggggggctgctcttccccgcttccaaccttcggttgccgctggttcctgccctggatggctgcctgcgccgggattcctggctggacaaacaggccgagatctcagcatctgcccccactagcctcagaagctgtgatgtagaatcaaatcccgggatatttctccctccagggactcaggcagaattcaatctccgagacattccccagcctcatgcagagccctgggccttctctttggacctgggactcaagcaggcagcaggctcaggccacctccttgctcttgggacaccagagaacccatcttggctcagtctccacctccaagatcaaaaggtggtgttgtcttctgggtcggggccagggctggatctgcccctggtcttgggactccctcttcagctgaagctgagtatgtccagggtggtcttgagccaagggtcgaagatgaaggcccttgccctgcctcccttaggcctggctcccctccttaacctctgggccaagcctcaagggcgtctcttcctgggggctttaccaggagaagactcttccacctctttttgcctgaatggcctttgggcacaaggtcagaggctggatgtggaccaggccctgaacagaagccatgagatctggactcacagctgcccccagagcccaggcaatggcactgacgcttcccattaaagctccacctaagaaccccctttgaaagtt

SEQ ID NO: 73970 - DNA, 1016 bp, Homo sapiens
ccgcggttcaaaggctcccccgcagtgctttttaaattgacatatgcagtgataacctgctttagcctcaggctcactcacccgcccagaccctggagtgcccacgaccctccggctgtccacctcagcaatggcccaggacaagagcctatcgctgtcatgacctttgacctcaccaagatcacaaaaacctcctcctcctttgaggttcgaacctgggacccagagggagtgattttttatggggataccaaccctaaggatgactggtttatgctgggacttcgagacggcaggcctgagatccaactgcacaatcactgggcccagcttacggtgggtgctggaccacggctggatgatgggagatggcaccaggtggaagtcaagatggagggggactctgtgctgctggaggtggatggggaggaggtgctgcgcctgagacaggtctctgggcccctgaccagcaaacgccatcccatcatgaggattgcgcttggggggctgctcttccccgcttccaaccttcggttgccgctggttcctgccctggatggctgcctgcgccgggattcctggctggacaaacaggccgagatctcagcatctgcccccactagcctcagaagctgtgatgtagaatcaaatcccgggatatttctccctccagggactcaggcagaattcaatctccgagacattccccagcctcatgcagagccctgggccttctctttggacctgggactcaagcaggcagcaggctcaggccacctccttgctcttgggacaccagagaacccatcttggctcagtctccacctccaagatcaagagaagactcttccacctctttttgcctgaatggcctttgggcacaaggtcagaggctggatgtggaccaggccctgaacagaagccatgagatctggactcacagctgcccccagagcccaggcaatggcactgacgcttcccattaaagctccacctaagaaccccctttgaaagtt

SEQ ID NO: 73971 - DNA, 528 bp, Homo sapiens
  misc_feature (20)..(21): n is a, c, g, or t
actagtcacggttggctagnntgggggctgctttcccgcttccaaccttcggttgccgctggttcctgccctggatggctgcctgcgccgggattcctggctggacaaacaggccgagatctcagcatctgcccccactagcctcagaagctgtgatgtagaatcaaatcccgggatatttctccctccagggactcaggcagaattcaatctccgaggtagatttcctcggagtctatttttcccaccctggccagctcagcctgcctctgtccccctctaccactggcccctttcctccttgagaccccagctttgaggcctcaggataatcatttctccccacagacattccccagcctcatgcagagccctgggccttctctttggacctgggactcaagcaggcagcaggctcaggccacctccttgctcttgggacaccagagaacccatcttggctcagtctccacctccaagatcaaagtaaagggggacagtggggcattgcctgtattcagtggagcc

SEQ ID NO: 73972 - DNA, 1348 bp, Homo sapiens
ctcgtgccggccgagtggacagtggctgattatggagagcagaggcccactggctacctcgcgcctgctgctgttgctgctgttgctactactgcgtcacacccgccagggatgggccctgagacctgttctccccacccagagtgcccacgaccctccggctgtccacctcagcaatggcccaggacaagagcctatcgctgtcatgacctttgacctcaccaagatcacaaaaacctcctcctcctttgaggttcgaacctgggacccagagggagtgattttttatggggataccaaccctaaggatgactggtttatgctgggacttcgagacggcaggcctgagatccaactgcacaatcactgggcccagcttacggtgggtgctggaccacggctggatgatgggagatggcaccaggtggaagtcaagatggagggggactctgtgctgctggaggtggatggggaggaggtgctgcgcctgagacaggtctctgggcccctgaccagcaaacgccatcccatcatgaggattgcgcttggggggctgctcttccccgcttccaaccttcggttgccgctggttcctgccctggatggctgcctgcgccgggattcctggctggacaaacaggccgagatctcagcatctgcccccactagcctcagaagctgtgatgtagaatcaaatcccgggatatttctccctccagggactcaggcagaattcaatctccgaggtagatttcctcggagtctatttttcccaccctggccagctcagcctgcctctgtccccctctaccactggcccctttcctccttgagaccccagctttgaggcctcaggataatcatttctccccacagacattccccagcctcatgcagagccctgggccttctctttggacctgggactcaagcaggcagcaggctcaggccacctccttgctcttgggacaccagagaacccatcttggctcagtctccacctccaagatcaatgggactccctcttcagctgaagctgagtatgtccagggtggtcttgagccaagggtcgaagatgaaggcccttgccctgcctcccttaggcctggctcccctccttaacctctgggccaagcctcaagggcgtctcttcctgggggctttaccaggagaagactcttccacctctttttgcctgaatggcctttgggcacaaggtcagaggctggatgtggaccaggccctgaacagaagccatgagatctggactcacagctgcccccagagcccaggcaatggcactgacgcttcccattaaagctccacctaagaaccccctttgaaagtt

SEQ ID NO: 73973 - DNA, 623 bp, Homo sapiens
ctcgtgccggccgagtggacagtggctgattatggagagcagaggcccactggctacctcgcgcctgctgctgttgctgctgttgctactactgcgtcacacccgccagggatgggccctgagacctgttctccccacccagagtgcccacgaccctccggctgtccacctcagcaatggcccaggacaagagcctatcgctgtcatgacctttgacctcaccaagatcacaaaaacctcctcctcctttgaggttcgaacctgggacccagagggagtgattttttatggggataccaaccctaaggatgactggtttatgctgggacttcgagacggcaggcctgagatccaactgcacaatcactgggcccagcttacggtgggtgctggaccacggctggatgatgggagatggcaccaggtggaagtcaagatggagggggactctgtgctgctggaggtggatggggaggaggtgctgcgcctgagacaggtctctgggcccctgaccagcaaacgccatcccatcatgaggattgcgcttgggggggcctgattattaccccgctttacaaaccttttagtttgcccgttcggaatccttggcaaaggaatgggtt

SEQ ID NO: 73974 - DNA, 1258 bp, Homo sapiens
ctcgtgccggccgagtggacagtggctgattatggagagcagaggcccactggctacctcgcgcctgctgctgttgctgctgttgctactactgcgtcacacccgccagggatgggccctgagacctgttctccccacccagagtgcccacgaccctccggctgtccacctcagcaatggcccaggacaagagcctatcgctgtcatgacctttgacctcaccaagatcacaaaaacctcctcctcctttgaggttcgaacctgggacccagagggagtgattttttatggggataccaaccctaaggatgactggtttatgctgggacttcgagacggcaggcctgagatccaactgcacaatcactgggcccagcttacggtgggtgctggaccacggctggatgatgggagatggcaccaggtggaagtcaagatggagggggactctgtgctgctggaggtggatggggaggaggtgctgcgcctgagacaggtctctgggcccctgaccagcaaacgccatcccatcatgaggattgcgcttggggggctgctcttccccgcttccaaccttcggttgccgctggttcctgccctggatggctgcctgcgccgggattcctggctggacaaacaggccgagatctcagcatctgcccccactagcctcagaagctgtgatgtagaatcaaatcccgggatatttctccctccagggactcaggcagaattcaatctccgaggtagatttcctcggagtctatttttcccaccctggccagctcagcctgcctctgtccccctctaccactggcccctttcctccttgagaccccagctttgaggcctcaggataatcatttctccccacagacattccccagcctcatgcagagccctgggccttctctttggacctgggactcaagcaggcagcaggctcaggccacctccttgctcttgggacaccagagaacccatcttggctcagtctccacctccaagatcaagcctggctcccctccttaacctctgggccaagcctcaagggcgtctcttcctgggggctttaccaggagaagactcttccacctctttttgcctgaatggcctttgggcacaaggtcagaggctggatgtggaccaggccctgaacagaagccatgagatctggactcacagctgcccccagagcccaggcaatggcactgacgcttcccattaaagctccacctaagaaccccctttgaaagtt

SEQ ID NO: 73975 - DNA, 344 bp, Homo sapiens
ccatctacaagctagagaaccaggaacgttggtagagtggctcagtccaagcccaacggcctcagaactgtggaagccactgctgtcgttctcaggccaaaggtctatgaacctggcaggctgctgtgcaagtcctggagttaaaaagtaggaggaactcaagttctgatatctgagggcaagagaagacgggtgtcccatctttagaagagagagagagaattcaccttttctgttctatctgggtgctcagcttattagatggtgcctgccaacattggaggagggtggatcttcctcactcagtctactgatttaaatgccaatctcttccagaaataccc

SEQ ID NO: 73976 - DNA, 486 bp, Homo sapiens
gtaacagaaaagcacctagacactataagcgtattgttttcaggatacgttgcattgaaaacatttctgagttttggtactgttgtaggtaagcgttacaaaccaatgaaataaaagtacctgagaatttttcttattctgtaggatagtttaatgacttggaaaaaccttaaggccattcattcactacttagttctgagcattcttctcacataatggtttatggtttggaagggtgtgaagtgtataagaacagccaaaggatggcttttaggaaacattttgggatcagttgaatcctcttgcaattaaatcaactgatactttaaaaagttgaattttcatgcgttagatcatatttgggtactgaaagtactctgaagtacatgctctttttgcacattgtaattgtatttagggccgggcacggtggctcactcctgtaatcccacccagcactttgggaggctgaggcgggcggatca

SEQ ID NO: 73977 - DNA, 250 bp, Homo sapiens
caatgttgaacagaataagtcttttcaacaatgaatttcaaagtcttttcatcaaacatttgatgcttttataggggtttcccctttcgtttggctctctttctctcttgcctgctgccatgtaagacgtcccattgctcttccttcatcttccaccatgattatgaggcgtctccagccacatggaactgcaaatggagaacctgctctctgggagaaaagtcaaatcggtcccacggctctcttctcc

SEQ ID NO: 73978 - DNA, 482 bp, Homo sapiens
gcattggaaatagcagagtgcttcgcggtaacaggggttggagtgcaatggtgtgatctcagctcactgcaacccctgcctcccaggctccagcgatcctcccacctcagcctcctgaatagctgaccaccagcacactaggcaaacccaccccactcacggcctcccttgggaattcagacctaaccatcgctgagctgaagtacaaatgtactgaggctggagcctgtgtgaacagaacagaagaggccttcactctagtagtgctcacagtccagcagcaggtgtttgctgaagacagcttactcagatcactactgcctggaggtggttgatatatcctggtgtaaaccttcaagaagggcacaggcaggaaaacatgagccagcaactgaagaaacgggcaaagacaagacaccagaaaggcctgggtggaagagcccccagtggggctaagcccaggcaaggcaagtcaagccaag

SEQ ID NO: 73979 - DNA, 370 bp, Homo sapiens
acgaggggggcaacccacaccgtccctttgccacctctctggtcgtccattcccgcctcttgctggagatttagagtccgggaatagggaggcaggagcgcacccgcctgggaaagggctctggggactccgagggcgggggaaggactggggctgagaccactcctccccctgccccgttgccttccttggcgtttgaccctcctttcctttcagatagggtcctggagggtctggcaaagtgcagcgctatgtggagagatgacggccaggccttctccgcaggcccctcttcctcctcctgccctgttaatgctggagcaccagggctcagtcctaagccttctcttcagtttccaccatgtccagt

SEQ ID NO: 73980 - DNA, 270 bp, Homo sapiens
ataattctcaagtgaagaaagaaacagaggtggggatatgggagtagtgagtaggagggaagaacaaacattaatttgccaagaagattctttaaaatatttttgtttgtgtagaagatagagaaagtagtcacctgggaaaatggctggaatctaaaactttatcaataccttcacactgtattaatttagtcgagcagtttgaacattcttttgtttttcttttaaaaatattacactgataaattaaccatgtctataaagggtcaa

SEQ ID NO: 73981 - DNA, 505 bp, Homo sapiens
tcccctcttctgtctacatcttaggtttgggggttttttttgtttgtttttttaattgtggtaaaacacacataacataaaattaccatcttaaccttttttaagtatacagtttaatggcattaggtacatttacagcattgcactaccagctccaccctccatccacagaactcttcatcttgctgaaaactgaagctctgaacctgttaaataatagctctccattttcctctcccctaagcttatctttgtattttaaatgttcttactcatcagaaaagtggttttaatttcataaataatttagccatttatttttaatcaaataaatatcttgtcgtaaacaacaacaaaaaagacactagaagacctatggcttctatgcccacaaagtagataagaacatggaatctgaagccaagttgcccaagtgcaaatactagctccctcactttctacctatatgaccctgggcaagttatttaacatctctatgtctcag

SEQ ID NO: 73982 - DNA, 267 bp, Homo sapiens
tatgatagaaaaaagcaaatacaatacagcttaagaaactctcaggtttctagctcatgaatgcatgtgagtgagtgaaagagaaagagcaaacaaaaaaataaaataagcgcacgtcatggggttcccagccatatgtagttttgctgcctacattctcattttcttttatattctttcaattttttattacccttctttggagcacaaaaacatatgaaaataaaaatacaaccttcgaaatttgtctgttattttaatttcatg

SEQ ID NO: 73983 - DNA, 6738 bp, Homo sapiens
  misc_feature (621)..(621): n is a, c, g, or t
  misc_feature (3196)..(3196): n is a, c, g, or t
  misc_feature (5116)..(5116): n is a, c, g, or t
ggggagatggcgctgtttgagtgcctggtggcggggcccactgacgtggaggtggattggctgtgccgtggccgcctgctgcagcctgcactgctcaaatgcaagatgcatttcgatggccgcaaatgcaagctgctacttacatctgtacatgaggacgacagtggcgtctacacctgcaagctcagcacggccaaagatgagctgacctgcagtgcccggctgaccgtgcggccctcgttggcacccctgttcacacggctgctggaagatgtggaggtgttggagggccgagctgcccgtttcgactgcaagatcagtggcaccccgccccctgttgttacctggactcattttggctgccccatggaggagagtgagaacttgcggctgcggcaggacgggggtctgcactcactgcacattgcccatgtgggcagcgaggacgaggggctctatgcggtcagtgctgttaacacccatggccaggcccactgctcagcccagctgtatgtagaagagccccggacagccgcctcaggccccagctcgaagctggagaagatgccatccattcccgaggagccagagcagggtgagctggagcggctgtccattccngacttcctgcggccactgcaggacctggaggtgggactggccaaggaggccatgctagagtgccaggtgaccggcctgccctaccccaccatcagctggttccacaatggccaccgcatccagagcagcgacgaccggcgcatgacacagtacagggatgtccatcgcttggtgttccctgccgtggggcctcagcacgccggtgtctacaagagcgtcattgccaacaagctgggcaaagctgcctgctatgcccacctgtatgtcacagatgtggtcccaggccctccagatggcgccccgcaggtggtggctgtgacggggaggatggtcacactcacatggaacccccccaggagtctggacatggccatcgacccggactccctgacgtacacagtgcagcaccaggtgctgggctcggaccagtggacggcactggtcacaggcctgcgggagccagggtgggcagccacagggctgcgtaagggggtccagcacatcttccgggtcctcagcaccactgtcaagagcagcagcaagccctcacccccttctgagcctgtgcagctgctggagcacggcccaaccctggaggaggcccctgccatgctggacaaaccagacatcgtgtatgtggtggagggacagcctgccagcgtcaccgtcacattcaaccatgtggaggcccaggtcgtctggaggagctgccgaggggccctcctagaggcacgggccggtgtgtacgagctgagccagccagatgatgaccagtactgtcttcggatctgccgggtgagccgccgggacatgggggccctcacctgcaccgcccgaaaccgtcacggcacacagacctgctcggtcacattggagctggcagaggcccctcggtttgagtccatcatggaggacgtggaggtgggggctggggaaactgctcgctttgcggtggtggtcgagggaaaaccactgccggacatcatgtggtacaaggacgaggtgctgctgaccgagagcagccatgtgagcttcgtgtacgaggagaatgagtgctccctggtggtgctcagcacgggggcccaggatggaggcgtctacacctgcaccgcccagaacctggcgggtgaggtctcctgcaaagcagagttggctgtgcattcagctcagacagctatggaggtcgagggggtcggggaggatgaggaccatcgaggaaggagactcagcgacttttatgacatccaccaggagatcggcaggggtgctttctcctacttgcggcgcatagtggagcgtagctccggcctggagtttgcggccaagttcatccccagccaggccaagccaaaggcatcagcgcgtcgggaggcccggctgctggccaggctccagcacgactgtgtcctctacttccatgaggccttcgagaggcgccggggactggtcattgtcaccgagctctgcacagaggagctgctggagcgaatcgccaggaaacccaccgtgtgtgagtctgagatccgggcctatatgcggcaggtgctagagggaatacactacctgcaccagagccacgtgctgcacctcgatgtcaagcctgagaacctgctggtgtgggatggtgctgcgggcgagcagcaggtgcggatctgtgactttgggaatgcccaggagctgactccaggagagccccagtactgccagtatggcacacctgagtttgtagcacccgagattgtcaatcagagccccgtgtctggagtcactgacatctggcctgtgggtgttgttgccttcctctgtctgacaggaatctccccgtttgttggggaaaatgaccggacaacattgatgaacatccgaaactacaacgtggccttcgaggagaccacattcctgagcctgagcagggaggcccggggcttcctcatcaaagtgttggtgcaggaccggctgagacctaccgcagaagagaccctagaacatccttggttcaaaactcaggcaaagggcgcagaggtgagcacggatcacctgaagctattcctctcccggcggaggtggcagcgctcccagatcagctacaaatgccacctggtgctgcgccccatccccgagctgctgcgggcccccccagagcgggtgtgggtgaccatgcccagaaggccaccccccagtggggggctctcatcctcctcggattctgaagaggaagagctggaagagctgccctcagtgccccgcccactgcagcccgagttctctggctcccgggtgtccctcacagacattcccactgaggatgaggccctggggaccccagagactggggctgccacccccatggactggcaggagcagggaagggctccctctcaggaccaggaggctcccagcccagaggccctcccctccccaggccaggagcccgcagctggggctagccccaggcggggagagctccgcaggggcagctcggctgagagcgccctgccccgggccgggccgcgggagctgggccggggcctgcacaaggcggcgtctgtggagctgccgcagcgccggagccccngcccgggagccacccgcctggcccggggaggcctgggtgagggcgagtatgcccagaggctgcaggccctgcgccagcggctgctgcggggaggccccgaggatggcaaggtcagcggcctcaggggtcccctgctggagagcctggggggccgtgctcgggacccccggatggcacgagctgcctccagcgaggcagcgccccaccaccagcccccactcgagaaccggggcctgcaaaagagcagcagcttctcccagggtgaggcggagccccggggccggcaccgccgagcgggggcgcccctcgagatccccgtggccaggcttggggcccgtaggctacaggagtctccttccctgtctgccctcagcgaggcccagccatccagccctgcacggcccagcgcccccaaacccagtacccctaagtctgcagaaccttctgccaccacacctagtgatgctccgcagccccccgcaccccagcctgcccaagacaaggctccagagcccaggccagaaccagtccgagcctccaagcctgcaccacccccccaggccctgcaaaccctagcgctgcccctcacaccctatgctcagatcattcagtccctccagctgtcaggccacgcccagggcccctcgcagggccctgccgcgccgccttcagagcccaagccccacgctgctgtctttgccagggtggcctccccacctccgggagcccccgagaagcgcgtgccctcagccgggggtcccccggtgctagccgagaaagcccgagttcccacggtgccccccaggccaggcagcagtctcagtagcagcatcgaaaacttggagtcggaggccgtgttcgaggccaagttcaagcgcagccgcgagtcgcccctgtcgctggggctgcggctgctgagccgttcgcgctcggaggagcgcggccccttccgtggggccgaggaggaggatggcatataccggcccagcccggcggggaccccgctggagctggtgcgacggcctgagcgctcacgctcggtgcaggacctcagggctgtcggagagcctggcctcgtccgccgcctctcgctgtcactgtcccagcggctgcggcggacccctcccgcgcagcgccacccggcctgggaggcccgcggcggggacggagagagctcggagggcgggagctcggcgcggggctccccggtgctggcgatgcgcaggcggctgagcttcaccctggagcggctgtccagccgattgcagcgcagtggcagcagcgaggactcggggggcgcgtcgggccgcagcacgccgctgttcggacggcttcgcagggccacgtccgagggcgagagtctgcggcgccttggccttccgcacaaccagttggccgcccaggccggcgccaccacgccttccgccgagtccctgggctccgaggccagcgccacgtcgggctcctcagccccaggggaaagccgaagccggctccgctggggcttctctcggccgcggaaggacaaggggttatcgccaccaaacctctctgccagcgtccaggaggagttgggtcaccagtacgtgcgcagtgagtcagacttccccccagtcttccacatcaaactcaaggaccaggtgctgctggagggggaggcagccaccctgctctgcctgccagcggcctgccctgcaccgcacatctcctggatgaaagacaagaagtccttgaggtcagagccctcagtgatcatcgtgtcctgcaaagatgggcggcagctgctcagcatcccccgggcgggcaagcggcacgccggtctctatgagtgctcggccaccaacgtactgggcagcatcaccagctcctgtaccgtggctgtggcccgagtcccaggaaagctagctcctccagaggtancccagacctaccaggacacggcgctggtgctgtggaagccgggagacagccgggcaccttgcacgtatacgctggagcggcgagtggatggggagtctgtgtggcaccctgtgagctcaggcatccccgactgttactacaacgtgacccacctgccagttggcgtgactgtgaggttccgtgtggcctgtgccaaccgtgctgggcaggggcccttcagcaactcttctgagaaggtctttgtcaggggtactcaagattcttcagctgtgccatctgctgcccaccaagaggcccctgtcacctcaaggccagccagggcccggcctcctgactctcctacctcactggccccacccctagctcctgctgcccccacacccccgtcagtcactgtcagcccctcatctccccccacacctcctagccaggccttgtcctcgctcaaggctgtgggtccaccaccccaaacccctccacgaagacacaggggcctgcaggctgcccggccagcggagcccaccctacccagtacccacgtcaccccaagtgagcccaagcctttcgtccttgacactgggaccccgatcccagcctccactcctcaaggggttaaaccagtgtcttcctctactcctgtgtatgtggtgacttcctttgtgtctgcaccaccagcccctgagcccccagcccctgagccccctcctgagcctaccaaggtgactgtgcagagcctcagcccggccaaggaggtggtcagctcccctgggagcagtccccgaagctctcccaggcctgagggtaccactcttcgacagggtccccctcagaaaccctacaccttcctggaggagaaagccaggggccgctttggtgttgtgcgagcgtgccgggagaatgccacggggcgaacgttcgtggccaagatcgtgccctatgctgccgagggcaagcggcgggtcctgcaggagtacgaggtgctgcggaccctgcaccacgagcggatcatgtccctgcacgaggcctacatcacccctcggtacctcgtgctcattgctgagagctgtggcaaccgggaactcctctgtgggctcagtgacaggttccggtattctgaggatgacgtggccacttacatggtgcagctgctacaaggcctggactacctccacggccaccacgtgctccacctagacatcaagccagacaacctgctgctggcccctgacaatgccctcaagattgtggactttggcagtgcccagccctacaacccccaggcccttaggccccttggccaccgcacgggcacgctggagttcatggctccggagatggtgaagggagaacccatcggctctgccacggacatctggggagcgggtgtgctcacttacattatgctcagtggacgctccccgttctatgagccagacccccaggaaacggaggctcggattgtggggggccgctttgatgccttccagctgtaccccaatacatcccagagcgccaccctcttcttgcgaaaggttctctctgtacatccctggtgaccagccatccagctgtctgtctgtctgccacaaggaaataaaaatggcaagcagcataacctgtgt

SEQ ID NO: 73984 - DNA, 8288 bp, Homo sapiens
  misc_feature (621)..(621): n is a, c, g, or t
  misc_feature (3196)..(3196): n is a, c, g, or t
  misc_feature (5116)..(5116): n is a, c, g, or t
ggggagatggcgctgtttgagtgcctggtggcggggcccactgacgtggaggtggattggctgtgccgtggccgcctgctgcagcctgcactgctcaaatgcaagatgcatttcgatggccgcaaatgcaagctgctacttacatctgtacatgaggacgacagtggcgtctacacctgcaagctcagcacggccaaagatgagctgacctgcagtgcccggctgaccgtgcggccctcgttggcacccctgttcacacggctgctggaagatgtggaggtgttggagggccgagctgcccgtttcgactgcaagatcagtggcaccccgccccctgttgttacctggactcattttggctgccccatggaggagagtgagaacttgcggctgcggcaggacgggggtctgcactcactgcacattgcccatgtgggcagcgaggacgaggggctctatgcggtcagtgctgttaacacccatggccaggcccactgctcagcccagctgtatgtagaagagccccggacagccgcctcaggccccagctcgaagctggagaagatgccatccattcccgaggagccagagcagggtgagctggagcggctgtccattccngacttcctgcggccactgcaggacctggaggtgggactggccaaggaggccatgctagagtgccaggtgaccggcctgccctaccccaccatcagctggttccacaatggccaccgcatccagagcagcgacgaccggcgcatgacacagtacagggatgtccatcgcttggtgttccctgccgtggggcctcagcacgccggtgtctacaagagcgtcattgccaacaagctgggcaaagctgcctgctatgcccacctgtatgtcacagatgtggtcccaggccctccagatggcgccccgcaggtggtggctgtgacggggaggatggtcacactcacatggaacccccccaggagtctggacatggccatcgacccggactccctgacgtacacagtgcagcaccaggtgctgggctcggaccagtggacggcactggtcacaggcctgcgggagccagggtgggcagccacagggctgcgtaagggggtccagcacatcttccgggtcctcagcaccactgtcaagagcagcagcaagccctcacccccttctgagcctgtgcagctgctggagcacggcccaaccctggaggaggcccctgccatgctggacaaaccagacatcgtgtatgtggtggagggacagcctgccagcgtcaccgtcacattcaaccatgtggaggcccaggtcgtctggaggagctgccgaggggccctcctagaggcacgggccggtgtgtacgagctgagccagccagatgatgaccagtactgtcttcggatctgccgggtgagccgccgggacatgggggccctcacctgcaccgcccgaaaccgtcacggcacacagacctgctcggtcacattggagctggcagaggcccctcggtttgagtccatcatggaggacgtggaggtgggggctggggaaactgctcgctttgcggtggtggtcgagggaaaaccactgccggacatcatgtggtacaaggacgaggtgctgctgaccgagagcagccatgtgagcttcgtgtacgaggagaatgagtgctccctggtggtgctcagcacgggggcccaggatggaggcgtctacacctgcaccgcccagaacctggcgggtgaggtctcctgcaaagcagagttggctgtgcattcagctcagacagctatggaggtcgagggggtcggggaggatgaggaccatcgaggaaggagactcagcgacttttatgacatccaccaggagatcggcaggggtgctttctcctacttgcggcgcatagtggagcgtagctccggcctggagtttgcggccaagttcatccccagccaggccaagccaaaggcatcagcgcgtcgggaggcccggctgctggccaggctccagcacgactgtgtcctctacttccatgaggccttcgagaggcgccggggactggtcattgtcaccgagctctgcacagaggagctgctggagcgaatcgccaggaaacccaccgtgtgtgagtctgagatccgggcctatatgcggcaggtgctagagggaatacactacctgcaccagagccacgtgctgcacctcgatgtcaagcctgagaacctgctggtgtgggatggtgctgcgggcgagcagcaggtgcggatctgtgactttgggaatgcccaggagctgactccaggagagccccagtactgccagtatggcacacctgagtttgtagcacccgagattgtcaatcagagccccgtgtctggagtcactgacatctggcctgtgggtgttgttgccttcctctgtctgacaggaatctccccgtttgttggggaaaatgaccggacaacattgatgaacatccgaaactacaacgtggccttcgaggagaccacattcctgagcctgagcagggaggcccggggcttcctcatcaaagtgttggtgcaggaccggctgagacctaccgcagaagagaccctagaacatccttggttcaaaactcaggcaaagggcgcagaggtgagcacggatcacctgaagctattcctctcccggcggaggtggcagcgctcccagatcagctacaaatgccacctggtgctgcgccccatccccgagctgctgcgggcccccccagagcgggtgtgggtgaccatgcccagaaggccaccccccagtggggggctctcatcctcctcggattctgaagaggaagagctggaagagctgccctcagtgccccgcccactgcagcccgagttctctggctcccgggtgtccctcacagacattcccactgaggatgaggccctggggaccccagagactggggctgccacccccatggactggcaggagcagggaagggctccctctcaggaccaggaggctcccagcccagaggccctcccctccccaggccaggagcccgcagctggggctagccccaggcggggagagctccgcaggggcagctcggctgagagcgccctgccccgggccgggccgcgggagctgggccggggcctgcacaaggcggcgtctgtggagctgccgcagcgccggagccccngcccgggagccacccgcctggcccggggaggcctgggtgagggcgagtatgcccagaggctgcaggccctgcgccagcggctgctgcggggaggccccgaggatggcaaggtcagcggcctcaggggtcccctgctggagagcctggggggccgtgctcgggacccccggatggcacgagctgcctccagcgaggcagcgccccaccaccagcccccactcgagaaccggggcctgcaaaagagcagcagcttctcccagggtgaggcggagccccggggccggcaccgccgagcgggggcgcccctcgagatccccgtggccaggcttggggcccgtaggctacaggagtctccttccctgtctgccctcagcgaggcccagccatccagccctgcacggcccagcgcccccaaacccagtacccctaagtctgcagaaccttctgccaccacacctagtgatgctccgcagccccccgcaccccagcctgcccaagacaaggctccagagcccaggccagaaccagtccgagcctccaagcctgcaccacccccccaggccctgcaaaccctagcgctgcccctcacaccctatgctcagatcattcagtccctccagctgtcaggccacgcccagggcccctcgcagggccctgccgcgccgccttcagagcccaagccccacgctgctgtctttgccagggtggcctccccacctccgggagcccccgagaagcgcgtgccctcagccgggggtcccccggtgctagccgagaaagcccgagttcccacggtgccccccaggccaggcagcagtctcagtagcagcatcgaaaacttggagtcggaggccgtgttcgaggccaagttcaagcgcagccgcgagtcgcccctgtcgctggggctgcggctgctgagccgttcgcgctcggaggagcgcggccccttccgtggggccgaggaggaggatggcatataccggcccagcccggcggggaccccgctggagctggtgcgacggcctgagcgctcacgctcggtgcaggacctcagggctgtcggagagcctggcctcgtccgccgcctctcgctgtcactgtcccagcggctgcggcggacccctcccgcgcagcgccacccggcctgggaggcccgcggcggggacggagagagctcggagggcgggagctcggcgcggggctccccggtgctggcgatgcgcaggcggctgagcttcaccctggagcggctgtccagccgattgcagcgcagtggcagcagcgaggactcggggggcgcgtcgggccgcagcacgccgctgttcggacggcttcgcagggccacgtccgagggcgagagtctgcggcgccttggccttccgcacaaccagttggccgcccaggccggcgccaccacgccttccgccgagtccctgggctccgaggccagcgccacgtcgggctcctcagccccaggggaaagccgaagccggctccgctggggcttctctcggccgcggaaggacaaggggttatcgccaccaaacctctctgccagcgtccaggaggagttgggtcaccagtacgtgcgcagtgagtcagacttccccccagtcttccacatcaaactcaaggaccaggtgctgctggagggggaggcagccaccctgctctgcctgccagcggcctgccctgcaccgcacatctcctggatgaaagacaagaagtccttgaggtcagagccctcagtgatcatcgtgtcctgcaaagatgggcggcagctgctcagcatcccccgggcgggcaagcggcacgccggtctctatgagtgctcggccaccaacgtactgggcagcatcaccagctcctgtaccgtggctgtggcccgagtcccaggaaagctagctcctccagaggtancccagacctaccaggacacggcgctggtgctgtggaagccgggagacagccgggcaccttgcacgtatacgctggagcggcgagtggatggggagtctgtgtggcaccctgtgagctcaggcatccccgactgttactacaacgtgacccacctgccagttggcgtgactgtgaggttccgtgtggcctgtgccaaccgtgctgggcaggggcccttcagcaactcttctgagaaggtctttgtcaggggtactcaagattcttcagctgtgccatctgctgcccaccaagaggcccctgtcacctcaaggccagccagggcccggcctcctgactctcctacctcactggccccacccctagctcctgctgcccccacacccccgtcagtcactgtcagcccctcatctccccccacacctcctagccaggccttgtcctcgctcaaggctgtgggtccaccaccccaaacccctccacgaagacacaggggcctgcaggctgcccggccagcggagcccaccctacccagtacccacgtcaccccaagtgagcccaagcctttcgtccttgacactgggaccccgatcccagcctccactcctcaaggggttaaaccagtgtcttcctctactcctgtgtatgtggtgacttcctttgtgtctgcaccaccagcccctgagcccccagcccctgagccccctcctgagcctaccaaggtgactgtgcagagcctcagcccggccaaggaggtggtcagctcccctgggagcagtccccgaagctctcccaggcctgagggtaccactcttcgacagggtccccctcagaaaccctacaccttcctggaggagaaagccaggggccgctttggtgttgtgcgagcgtgccgggagaatgccacggggcgaacgttcgtggccaagatcgtgccctatgctgccgagggcaagcggcgggtcctgcaggagtacgaggtgctgcggaccctgcaccacgagcggatcatgtccctgcacgaggcctacatcacccctcggtacctcgtgctcattgctgagagctgtggcaaccgggaactcctctgtgggctcagtgacaggttccggtattctgaggatgacgtggccacttacatggtgcagctgctacaaggcctggactacctccacggccaccacgtgctccacctagacatcaagccagacaacctgctgctggcccctgacaatgccctcaagattgtggactttggcagtgcccagccctacaacccccaggcccttaggccccttggccaccgcacgggcacgctggagttcatggctccggagatggtgaagggagaacccatcggctctgccacggacatctggggagcgggtgtgctcacttacattatgtgagtgtcccctaccccaccgcagccctctctgcccatacagtgagctcccggactcaccttctgccaacaccctctcccccgtgccccacctcccctgtacacacatccacactgcacactcacactcaggtgcacagtagcatggccctgagcactgtgcacctgacactaatgtccttctgggtctgggtgttggcctccggtctgcatatgtcaatcaagctatcttccccaacaggctcagtggacgctccccgttctatgagccagacccccaggaaacggaggctcggattgtggggggccgctttgatgccttccagctgtaccccaatacatcccagagcgccaccctcttcttgcgaaaggttctctctgtacatccctggtgagtgagccccacacctgctatcccccagtgttacctgcccctggcctggcctgtgccagagatctcccagctcctcccctgctcctaggaagaagtctgctgcttctactaaatggtcatactacccaccatttaaagcctgaggcagccccgtgcaaggcagactcactgtccccattccggagactggggaactgagctcttgagctgcccaagatcacacatgtaggggtgggatccaggactgggacatgggtctgcgggaggacagagccccggcagctcccagagcttccttccaggttcatcatccctggctctgcctggcaggagccggccctccctgcaggactgcctggcccacccatggttgcaggacgcctacctgatgaagctgcgccgccagacgctcaccttcaccaccaaccggctcaaggagttcctgggcgagcagcggcggcgccgggctgaggctgccacccgccacaaggtgctgctgcgctcctaccctggcggcccctagaggcacggaccacagccaggcctcgggcttcaactggggttcccaccaatgccacgggacattccagggcccacgctgagccaggcgggcctggggcttcggttaccaccagcagcaacatctggctgggctcttacctcatagaccttcaaggacagagaccccagggcctggacctgatgccaccccaggccaaagccagagtgggagacccattggtcaggctcagcagggtgggaacaggcagagggacaagaggggaatggagaagtggagaggaaaaggaatcgagggacaggaagggggaggctctaggaaggttctgggttgggggtcagtgcatctcagggagaaccaaggaaggtgggcatggctggagaggaggaaaaggaaggagccccaggtgtcagggcagtaggctgggagtcagtgtggcaaagcgggggcaggacacagatacagtggcaggggcccagggctgggacatgagagaaggcagcgaggcggcagagggagaagagaggactcaggtggaggtggggtgggtcagctgtcagcatccctcagaggagaaatgtggagagctggaggccagcagtcactcacactcgctctgtcctcctgtccagtggatacagccctgggcgctctgctggcccaaggatgtccccactgcccctccatggcctctggccttcttcccattcatatttatttatttattgacttttatgaagtttccccttccatccgatccctactgcccatgttgtcctgaccatccctcccagccatccagctgtctgtctgtctgccacaaggaaataaaaatggcaagcagcataacctgtgt

SEQ ID NO: 73985 - DNA, 2089 bp, Homo sapiens
ctctggagttctggggaccccgccattttgtgcctgggttaattcctcaggtgacccatatgtctcttggggtatgccaccacctctgtcctgcctactggccttcagggcctgccactctggacattcccatggtctggtgaccaggacattgtcctgctgctcaagcacccagggacctcccccgcccccacttccctgccaccaggaagctgggtcagcttggcctctgtctcctgtcagctccggagatggtgaagggagaacccatcggctctgccacggacatctggggagcgggtgtgctcacttacattatgtgagtgtcccctaccccaccgcagccctctctgcccatacagtgagctcccggactcaccttctgccaacaccctctcccccgtgccccacctcccctgtacacacatccacactgcacactcacactcaggtgcacagtagcatggccctgagcactgtgcacctgacactaatgtccttctgggtctgggtgttggcctccggtctgcatatgtcaatcaagctatcttccccaacaggctcagtggacgctccccgttctatgagccagacccccaggaaacggaggctcggattgtggggggccgctttgatgccttccagctgtaccccaatacatcccagagcgccaccctcttcttgcgaaaggttctctctgtacatccctggtgagtgagccccacacctgctatcccccagtgttacctgcccctggcctggcctgtgccagagatctcccagctcctcccctgctcctaggaagaagtctgctgcttctactaaatggtcatactacccaccatttaaagcctgaggcagccccgtgcaaggcagactcactgtccccattccggagactggggaactgagctcttgagctgcccaagatcacacatgtaggggtgggatccaggactgggacatgggtctgcgggaggacagagccccggcagctcccagagcttccttccaggttcatcatccctggctctgcctggcaggagccggccctccctgcaggactgcctggcccacccatggttgcaggacgcctacctgatgaagctgcgccgccagacgctcaccttcaccaccaaccggctcaaggagttcctgggcgagcagcggcggcgccgggctgaggctgccacccgccacaaggtgctgctgcgctcctaccctggcggcccctagaggcacggaccacagccaggcctcgggcttcaactggggttcccaccaatgccacgggacattccagggcccacgctgagccaggcgggcctggggcttcggttaccaccagcagcaacatctggctgggctcttacctcatagaccttcaaggacagagaccccagggcctggacctgatgccaccccaggccaaagccagagtgggagacccattggtcaggctcagcagggtgggaacaggcagagggacaagaggggaatggagaagtggagaggaaaaggaatcgagggacaggaagggggaggctctaggaaggttctgggttgggggtcagtgcatctcagggagaaccaaggaaggtgggcatggctggagaggaggaaaaggaaggagccccaggtgtcagggcagtaggctgggagtcagtgtggcaaagcgggggcaggacacagatacagtggcaggggcccagggctgggacatgagagaaggcagcgaggcggcagagggagaagagaggactcaggtggaggtggggtgggtcagctgtcagcatccctcagaggagaaatgtggagagctggaggccagcagtcactcacactcgctctgtcctcctgtccagtggatacagccctgggcgctctgctggcccaaggatgtccccactgcccctccatggcctctggccttcttcccattcatatttatttatttattgacttttatgaagtttccccttccatccgatccctactgcccatgttgtcctgaccatccctcccagccatccagctgtctgtctgtctgccacaaggaaataaaaatggcaagcagcataacctgtgt

SEQ ID NO: 73986 - DNA, 959 bp, Homo sapiens
cgctgttctccctccctccctctggcttctgctctttcttactccttctctcagctgcttaactacagctcccactggaacttgcacaatcaaaaacaactctcctctctcaagccgcctccaggagcgcatcacctggagaagagcgactcgctccccgcgccggccgcggaagagcagccaggtagctgggggcggggaggcgtacccttctcccgctcggtaagagccacagcatctccccggagattggccgtatcccaccgtccggcccccagggtcctgcagcggtgatgcatatgtttcggagcaatgatggaaggagaaaagccgctgtcggtggcaactgaaagtggggagaggttgctgcagtagctggtgctgcagaatgcgcgagtgaagaactgagccccgctagattctccatcccgctcagtcttcattaactgtctgcaggaggtaaaccggggaaacagatatgcactaaccaggcgggtgccaacctggatctataactgtgaattccccacggtggaaaatggtaaacaaagacatgaatggattcccagtcaagaaatgctcagccttccaattttttaagaagcgggtacgaaggtggatcaagagcccaatggtcagtgtggacaagcatcagagtcccagcctgaagtacaccggctcctccatggtgcacatccctccaggggagccagacttcgagtcttccttgtgtcaaacatgcctgggtgaacatgctttccaaagaggggttctccctcaggagaacgagtcatgttcatgggaaactcaatctgggtgtgaagtaagttcatgttcgctctggatctattctcctggaaaaattctgggcctttgtttttcttgtatttctgccagagtatacccaaaaaataattttttaatgcatatttataaagcttctgaggaagacctagaat

SEQ ID NO: 73987 - DNA, 884 bp, Homo sapiens
cgctgttctccctccctccctctggcttctgctctttcttactccttctctcagctgcttaactacagctcccactggaacttgcacaatcaaaaacaactctcctctctcaagccgcctccaggagcgcatcacctggagaagagcgactcgctccccgcgccggccgcggaagagcagccaggtagctgggggcggggaggcgtacccttctcccgctcggtaagagccacagcatctccccggagattggccgtatcccaccgtccggcccccagggtcctgcagcggtgatgcatatgtttcggagcaatgatggaaggagaaaagccgctgtcggtggcaactgaaagtggggagaggttgctgcagtagctggtgctgcagaatgcgcgagtgaagaactgagccccgctagattctccatcccgctcagtcttcattaactgtctgcaggaggtaaaccggggaaacagatatgcactaaccaggcgggtgccaacctggatctataactgtgaattccccacggtggaaaatggtaaacaaagacatgaatggattcccagtcaagaaatgctcagccttccaattttttaagaagcgggatcttgctctgtcccccagactggagagtagtggtgcgatgattgctcactttaaccttgaacttcaagactcaagtgatcctccctattgcccaggctggaatgcagtggtgcaatctccactcactgcaacctccgcctcccagattcaagcaattctcctgcctcagtctgccaccacacccggctaacttttatatctttagtagagacgtggtttcaccttgttggccttgctggtctcaaactcctgacctcgagtgatcctcccacctc

SEQ ID NO: 73988 - DNA, 328 bp, Homo sapiens
cttgtgaggaaggcatcttgcttcccctttgcctcctgacatgattgtgaatttcctgaggcctctccagccgtgatgaactcacccacctcaactaccagcatcagaaaacaagttctgaccgggtgcagtggctcacacctgtaagagtggctcacactttgggaggccaagattctctgcaaaacttctggacaactgacatctccctaaatgtgatattctcatacacccccatcttctgatgtttaaattgtaacctatgacaatacttctagatgtcaaaacaatagtgattaaacattcaacggttaccttctaaatatga

SEQ ID NO: 73989 - DNA, 977 bp, Homo sapiens
cgctgttctccctccctccctctggcttctgctctttcttactccttctctcagctgcttaactacagctcccactggaacttgcacaatcaaaaacaactctcctctctcaagccgcctccaggagcgcatcacctggagaagagcgactcgctccccgcgccggccgcggaagagcagccaggtagctgggggcggggaggcgtacccttctcccgctcggtaagagccacagcatctccccggagattggccgtatcccaccgtccggcccccagggtcctgcagcggtgatgcatatgtttcggagcaatgatggaaggagaaaagccgctgtcggtggcaactgaaagtggggagaggttgctgcagtagctggtgctgcagaatgcgcgagtgaagaactgagccccgctagattctccatcccgctcagtcttcattaactgtctgcaggaggtaaaccggggaaacagatatgcactaaccaggcgggtgccaacctggatctataactgtgaattccccacggtggaaaatggtaaacaaagacatgaatggattcccagtcaagaaatgctcagccttccaattttttaagaagcgggtacgaaggtggatcaagagcccaatggtcagtgtggacaagcatcagagtcccagcctgaagtacaccggctcctccatggtgcacatccctccaggggagccagacttcgagtcttccttgtgtcaaacatgcctgggtgaacatgctttccaaagaggggttctccctcaggagaacgagtcatgttcatgggaaactcaatctgggtgtgaaattctctgcaaaacttctggacaactgacatctccctaaatgtgatattctcatacacccccatcttctgatgtttaaattgtaacctatgacaatacttctagatgtcaaaacaatagtgattaaacattcaacggttaccttctaaatatga

SEQ ID NO: 73990 - DNA, 265 bp, Homo sapiens
cttgtgaggaaggcatcttgcttcccctttgcctcctgacatgattgtgaatttcctgaggcctctccagccgtgatgaactgtgagtcaattaaaactctttcctttataaattacccagtctcaggctgttctttatagcagtatgaaagctgactaacacaatggggtctgactatgttgcccagactggtctcaaactcttgggctcacgtaatcctactgcctcagcctcccaaaatgctggaattacaggtgtgaggtg

SEQ ID NO: 73991 - DNA, 4620 bp, Homo sapiens
ggacacaaccctgagatttatccctcacaatgcggaaagacagacttcttcatttatgtcttgtgctacttcttatcctgctttctgccagtgactcaaactctacagaaccgcagtatatggtgctggtcccctccctgctccacactgaggcccctaagaagggctgtgtccttctgagccacctgaatgagacagtgactgtaagtgcttccttggagtctggcagggaaaacaggagcctcttcactgacctggtggcggagaaggacttattccactgtgtctccttcactctcccaaggatctcagcctcttcagaggtggcattccttagcatccagataaaggggcctacgcaagatttcaggaagaggaacacagttctggtactgaacacccaaagtctggtctttgtccagacagacaaacccatgtataaaccaggacagacagtaagattccgtgttgtctccgtggatgaaaattttcgccctcgaaatgaactgattccactgatataccttgagaacccaagaagaaatcgaattgcacaatggcagagtctcaagctagaagctggcatcaatcagttgtcctttcccctctcatcagagcccattcagggctcctacagggtggtggtacagacagaatcaggtggaaggatacagcaccccttcaccgtggaggaatttgtgcttcccaagtttgaggtcaaagttcaggtgccaaagataatcagtatcatggatgaaaaagtgaacataacagtctgtggagaatacacttatgggaagcctgtcccaggacttgcaactgtgagcctgtgtagaaaattatctcgtgttcttaattgtgacaagcaggaggtctgtgaggaattcagtcaacagcttaacagcaatggctgcatcacccaacaagtacacaccaaaatgctccagattacaaatacgggctttgaaatgaagcttagagtggaagccaggatcagagaagaggggacagacctggaagtcactgcaaacaggatcagtgaaatcacaaacattgtatccaaactcaaattcgtgaaagtggattcacactttagacaaggaatccccttttttgcacaggtgcttctggtggatggaaaaggtgtgcccatccccaataaactcttcttcatctctgtgaatgacgccaattattactccaatgcaaccaccaatgagcagggtcttgcacagttttcaatcaatactaccagtatctcggttaataaactttttgtccgggttttcactgtgcatcccaacttgtgttttcactattcatgggtagcagaagaccaccagggcgctcagcacactgcaaatcgtgttttctccttaagtggaagttacattcacctggagcctgtggctggtaccctgccctgtggccacacggagactatcacggcacactatacactgaatagacaggccatgggagagttatcggagctcagtttccattacctgatcatggctaagggagtcatcgtcagatctggaacccacactctgcctgtggagtcaggagacatgaaaggcagttttgccttatccttccctgtggagtcagacgttgcccccattgcacgaatgttcatctttgccattttaccagatggagaagttgttggagactctgaaaaatttgagattgaaaactgtctagccaacaaggtggatttgagcttcagcccagcacaaagtcccccagcctcacatgcccacctgcaagtagcagctgctccgcagtccctctgtgcccttcgtgctgtggaccaaagtgtgctgctcatgaagcctgaggctgagctctctgtgtcctcagtatataatctgctaactgtgaaggatctcaccaattttcctgacaatgtggaccagcaggaggaagaacaaggacactgtccccgtcctttcttcattcataatggagccatctatgttcccttatcaagtaatgaagcagatatttatagcttcctcaaggggatgggattgaaggtgttcactaactcaaaaatccgaaaaccaaagtcgtgttcagtcatcccttccgtgtctgcaggagcagtaggtcaaggatactatggagcaggtctaggagtagtagagagaccatatgttcctcaattaggcacatataatgtgatacccttaaataatgaacaaagttcagggccagtccctgaaacggtgcgaagctattttcctgagacttggatctgggagttggtggcagtgaactcatcaggtgtggctgaggtaggagtaacagtccctgacaccatcaccgagtggaaggcaggggccttctgcctgtctgaagatgctggacttggtatctcttccactgcctctctccgagccttccagcccttctttgtggagctcacaatgccttactctgtgattcgtggagaggtcttcacactcaaggccacggtcctaaactaccttcccaaatgcatccgggtcagtgtgcagctgaaagcctctccagccttcctagcttcccaaaatacaaagggagaagaatcctattgtatctgtggaagtgagagacaaaccttgtcttggacagtgactcctaaaactctggggaatgtgaacttctcagtgagtgcagaggcaatgcagtccttagaactctgtggaaatgaggttgttgaggtccctgagattaaaagaaaagacacagtcatcaaaaccctgttggtggaggctgaaggtattgagcaagaaaagactttcagttccatgacctgtgcctcaggtgctaatgtgtctgagcagttgtccttgaagctcccatcaaatgtggtcaaagaatctgccagagcttctttctcagttctgggtgacatattaggttctgctatgcaaaatatacaaaatctcctccagatgccatatggctgtggagaacagaacatggtcctatttgctcctaacatctatgtcttgaactatctgaatgaaacccagcagctgacgcaggagatcaaggccaaggccgttggctatctcatcactggttaccagagacagctgaactacaaacaccaagatggctcctacagcacctttggggaacgatatggcaggaaccagggcaacacttggctcacagcttttgtactgaagactttcgcccaggctcgatcctacatcttcattgatgaagcacacattacccaatctctcacgtggctctcccagatgcagaaggacaatggctgtttcaggagctctgggtcactgctcaacaatgccataaagggaggtgtagaagatgaagcgaccctctccgcctatgttactattgcccttctggaaattcctctcccagtcactaaccctattgttcgcaatgccctgttctgcctggagtcagcctggaatgtagcaaaggaggggacccatgggagccatgtctacaccaaggcattgctggcctatgctttttccctactgggaaagcaaaatcagaatagagaaatactgaactcacttgataaggaagctgtgaaagaagacaacctcgtccattgggagcgccctcagagacccaaggcaccagtggggcatctttaccaaacccaggctccctctgctgaggtggagatgacatcctatgtgctcctcgcttatctcacggcccagccagcccccacctcaggggacctgacctctgcaactaacattgtgaagtggatcatgaagcagcagaacgcccaaggtggtttctcctccacccaggacacagtggtggctctccatgccctgtccaggtatggagcagccactttcaccagaactgagaaaactgcacaggtcaccgttcaggattcacagaccttttctacaaatttccaagtagacaacaacaacctcctattactgcagcagatctcattgccagagctccctggagaatatgtcataacagtaactggggaaagatgtgtgtatcttcagacatccatgaaatacaatattcttccagagaaagaggactccccatttgctttaaaagtgcagactgtgccccagacttgcgatggacacaaagcccacaccagctttcagatctcactgaccatcagttacacaggaaaccgtcctgcttccaatatggtgattgttgatgtaaagatggtatctggttttattcccctgaaaccaacagtaaaaatgcttgaaagatctagctctgtgagccggacagaagtgagcaacaaccatgtcctcatttatgtggaacaggtgacaaatcagacgctaagtttttccttcatggttctgcaagacatcccagtaggagacttgaagccagcaattgttaaagtctatgattactatgagacagatgagtctgtggttgctgagtatatcgccccctgcagcacagatacagagcatggaaatgtttgaggaccatacaggctgtatattttggtggattctctgtcctatacatttacttagaaggaatggagttatttgtctctataaaatagacactaaaaatatttgctgaataaatatgtacttctggtcaaactaaaaaaaaatg

SEQ ID NO: 73992 - DNA, 755 bp, Homo sapiens
agtcagtctcaatgtgagaacctgggtatttcagttgaaggtgctgcatttaataagctttttcattccactccgtatataatctgctaactgtgaaggatctcaccaattttcctgacaatgtggaccagcaggaggaagaacaaggacactgtccccgtcctttcttcattcataatggagccatctatgttcccttatcaagtaatgaagcagatatttatagcttcctcaaggggatgggattgaaggtgttcactaactcaaaaatccgaaaaccaaagtcgtgttcagtcatcccttccgtgtctgcaggagcagtaggtcaaggatactatggaggtaaaacagcaatttgcttttaattttatttcatgtccaacaatattactatgcccaaaatgctaaaatgaggtaatgtagccctatttccactttatacacacaaagaaaccaagattcaaattaattgtttcttgctgaggtgacttagctggtgatagctagaactgatcagagatttttttttagatacatccgatacttcagggcacaaaatcagataaaatacaagattctgatgtactgtaagagagggaaaatgctgacaatggaaagaaagagtaattctgattatggaaacaggaaagacattcatagggatgctgtattttaaaaaacataaagaaggacaaagggcttcactggtgacaagaaacaacgtgaacatcacagaaatatctcataatccatgg

SEQ ID NO: 73993 - DNA, 4371 bp, Homo sapiens
ggacacaaccctgagatttatccctcacaatgcggaaagacagacttcttcatttatgtcttgtgctacttcttatcctgctttctgccagtgactcaaactctacagaaccgcagtatatggtgctggtcccctccctgctccacactgaggcccctaagaagggctgtgtccttctgagccacctgaatgagacagtgactgtaagtgcttccttggagtctggcagggaaaacaggagcctcttcactgacctggtggcggagaaggacttattccactgtgtctccttcactctcccaaggatctcagcctcttcagaggtggcattccttagcatccagataaaggggcctacgcaagatttcaggaagaggaacacagttctggtactgaacacccaaagtctggtctttgtccagacagacaaacccatgtataaaccaggacagacagtaagattccgtgttgtctccgtggatgaaaattttcgccctcgaaatgaactgattccactgatataccttgagaacccaagaagaaatcgaattgcacaatggcagagtctcaagctagaagctggcatcaatcagttgtcctttcccctctcatcagagcccattcagggctcctacagggtggtggtacagacagaatcaggtggaaggatacagcaccccttcaccgtggaggaatttgtgcttcccaagtttgaggtcaaagttcaggtgccaaagataatcagtatcatggatgaaaaagtgaacataacagtctgtggagaatacacttatgggaagcctgtcccaggacttgcaactgtgagcctgtgtagaaaattatctcgtgttcttaattgtgacaagcaggaggtctgtgaggaattcagtcaacagcttaacagcaatggctgcatcacccaacaagtacacaccaaaatgctccagattacaaatacgggctttgaaatgaagcttagagtggaagccaggatcagagaagaggggacagacctggaagtcactgcaaacaggatcagtgaaatcacaaacattgtatccaaactcaaattcgtgaaagtggattcacactttagacaaggaatccccttttttgcacaggtgcttctggtggatggaaaaggtgtgcccatccccaataaactcttcttcatctctgtgaatgacgccaattattactccaatgcaaccaccaatgagcagggtcttgcacagttttcaatcaatactaccagtatctcggttaataaactttttgtccgggttttcactgtgcatcccaacttgtgttttcactattcatgggtagcagaagaccaccagggcgctcagcacactgcaaatcgtgttttctccttaagtggaagttacattcacctggagcctgtggctggtaccctgccctgtggccacacggagactatcacggcacactatacactgaatagacaggccatgggagagttatcggagctcagtttccattacctgatcatggctaagggagtcatcgtcagatctggaacccacactctgcctgtggagtcaggagacatgaaaggcagttttgccttatccttccctgtggagtcagacgttgcccccattgcacgaatgttcatctttgccattttaccagatggagaagttgttggagactctgaaaaatttgagattgaaaactgtctagccaacaaggtggatttgagcttcagcccagcacaaagtcccccagcctcacatgcccacctgcaagtagcagctgctccgcagtccctctgtgcccttcgtgctgtggaccaaagtgtgctgctcatgaagcctgaggctgagctctctgtgtcctcagtatataatctgctaactgtgaaggatctcaccaattttcctgacaatgtggaccagcaggaggaagaacaaggacactgtccccgtcctttcttcattcataatggagccatctatgttcccttatcaagtaatgaagcagatatttatagcttcctcaaggggatgggattgaaggtgttcactaactcaaaaatccgaaaaccaaagtcgtgttcagtcatcccttccgtgtctgcaggagcagtaggtcaaggatactatggagcaggtctaggagtagtagagagaccatatgttcctcaattaggcacatataatgtgatacccttaaataatgaacaaagttcagggccagtccctgaaacggtgcgaagctattttcctgagacttggatctgggagttggtggcagtgaactcatcaggtgtggctgaggtaggagtaacagtccctgacaccatcaccgagtggaaggcaggggccttctgcctgtctgaagatgctggacttggtatctcttccactgcctctctccgagccttccagcccttctttgtggagctcacaatgccttactctgtgattcgtggagaggtcttcacactcaaggccacggtcctaaactaccttcccaaatgcatccgggctgaaggtattgagcaagaaaagactttcagttccatgacctgtgcctcaggtgctaatgtgtctgagcagttgtccttgaagctcccatcaaatgtggtcaaagaatctgccagagcttctttctcagttctgggtgacatattaggttctgctatgcaaaatatacaaaatctcctccagatgccatatggctgtggagaacagaacatggtcctatttgctcctaacatctatgtcttgaactatctgaatgaaacccagcagctgacgcaggagatcaaggccaaggccgttggctatctcatcactggttaccagagacagctgaactacaaacaccaagatggctcctacagcacctttggggaacgatatggcaggaaccagggcaacacttggctcacagcttttgtactgaagactttcgcccaggctcgatcctacatcttcattgatgaagcacacattacccaatctctcacgtggctctcccagatgcagaaggacaatggctgtttcaggagctctgggtcactgctcaacaatgccataaagggaggtgtagaagatgaagcgaccctctccgcctatgttactattgcccttctggaaattcctctcccagtcactaaccctattgttcgcaatgccctgttctgcctggagtcagcctggaatgtagcaaaggaggggacccatgggagccatgtctacaccaaggcattgctggcctatgctttttccctactgggaaagcaaaatcagaatagagaaatactgaactcacttgataaggaagctgtgaaagaagacaacctcgtccattgggagcgccctcagagacccaaggcaccagtggggcatctttaccaaacccaggctccctctgctgaggtggagatgacatcctatgtgctcctcgcttatctcacggcccagccagcccccacctcaggggacctgacctctgcaactaacattgtgaagtggatcatgaagcagcagaacgcccaaggtggtttctcctccacccaggacacagtggtggctctccatgccctgtccaggtatggagcagccactttcaccagaactgagaaaactgcacaggtcaccgttcaggattcacagaccttttctacaaatttccaagtagacaacaacaacctcctattactgcagcagatctcattgccagagctccctggagaatatgtcataacagtaactggggaaagatgtgtgtatcttcagacatccatgaaatacaatattcttccagagaaagaggactccccatttgctttaaaagtgcagactgtgccccagacttgcgatggacacaaagcccacaccagctttcagatctcactgaccatcagttacacaggaaaccgtcctgcttccaatatggtgattgttgatgtaaagatggtatctggttttattcccctgaaaccaacagtaaaaatgcttgaaagatctagctctgtgagccggacagaagtgagcaacaaccatgtcctcatttatgtggaacaggtgacaaatcagacgctaagtttttccttcatggttctgcaagacatcccagtaggagacttgaagccagcaattgttaaagtctatgattactatgagacagatgagtctgtggttgctgagtatatcgccccctgcagcacagatacagagcatggaaatgtttgaggaccatacaggctgtatattttggtggattctctgtcctatacatttacttagaaggaatggagttatttgtctctataaaatagacactaaaaatatttgctgaataaatatgtacttctggtcaaactaaaaaaaaatg

SEQ ID NO: 73994 - DNA, 4421 bp, Homo sapiens
ggacacaaccctgagatttatccctcacaatgcggaaagacagacttcttcatttatgtcttgtgctacttcttatcctgctttctgccagtgactcaaactctacagaaccgcagtatatggtgctggtcccctccctgctccacactgaggcccctaagaagggctgtgtccttctgagccacctgaatgagacagtgactgtaagtgcttccttggagtctggcagggaaaacaggagcctcttcactgacctggtggcggagaaggacttattccactgtgtctccttcactctcccaaggatctcagcctcttcagaggtggcattccttagcatccagataaaggggcctacgcaagatttcaggaagaggaacacagttctggtactgaacacccaaagtctggtctttgtccagacagacaaacccatgtataaaccaggacagacagtaagattccgtgttgtctccgtggatgaaaattttcgccctcgaaatgaactgattccactgatataccttgagaacccaagaagaaatcgaattgcacaatggcagagtctcaagctagaagctggcatcaatcagttgtcctttcccctctcatcagagcccattcagggctcctacagggtggtggtacagacagaatcaggtggaaggatacagcaccccttcaccgtggaggaatttgtgcttcccaagtttgaggtcaaagttcaggtgccaaagataatcagtatcatggatgaaaaagtgaacataacagtctgtggagaatacacttatgggaagcctgtcccaggacttgcaactgtgagcctgtgtagaaaattatctcgtgttcttaattgtgacaagcaggaggtctgtgaggaattcagtcaacagcttaacagcaatggctgcatcacccaacaagtacacaccaaaatgctccagattacaaatacgggctttgaaatgaagcttagagtggaagccaggatcagagaagaggggacagacctggaagtcactgcaaacaggatcagtgaaatcacaaacattgtatccaaactcaaattcgtgaaagtggattcacactttagacaaggaatccccttttttgcacaggtgcttctggtggatggaaaaggtgtgcccatccccaataaactcttcttcatctctgtgaatgacgccaattattactccaatgcaaccaccaatgagcagggtcttgcacagttttcaatcaatactaccagtatctcggttaataaactttttgtccgggttttcactgtgcatcccaacttgtgttttcactattcatgggtagcagaagaccaccagggcgctcagcacactgcaaatcgtgttttctccttaagtggaagttacattcacctggagcctgtggctggtaccctgccctgtggccacacggagactatcacggcacactatacactgaatagacaggccatgggagagttatcggagctcagtttccattacctgatcatggctaagggagtcatcgtcagatctggaacccacactctgcctgtggagtcaggagacatgaaaggcagttttgccttatccttccctgtggagtcagacgttgcccccattgcacgaatgttcatctttgccattttaccagatggagaagttgttggagactctgaaaaatttgagattgaaaactgtctagccaacaaggtggatttgagcttcagcccagcacaaagtcccccagcctcacatgcccacctgcaagtagcagctgctccgcagtccctctgtgcccttcgtgctgtggaccaaagtgtgctgctcatgaagcctgaggctgagctctctgtgtcctcagtatataatctgctaactgtgaaggatctcaccaattttcctgacaatgtggaccagcaggaggaagaacaaggacactgtccccgtcctttcttcattcataatggagccatctatgttcccttatcaagtaatgaagcagatatttatagcttcctcaaggggatgggattgaaggtgttcactaactcaaaaatccgaaaaccaaagtcgtgttcagtcatcccttccgtgtctgcaggagcagtaggtcaaggatactatggagcaggtctaggagtagtagagagaccatatgttcctcaattaggcacatataatgtgatacccttaaataatgaacaaagttcagggccagtccctgaaacggtgcgaagctattttcctgagacttggatctgggagttggtggcagtgaactcatcaggtgtggctgaggtaggagtaacagtccctgacaccatcaccgagtggaaggcaggggccttctgcctgtctgaagatgctggacttggtatctcttccactgcctctctccgagccttccagcccttctttgtggagctcacaatgccttactctgtgattcgtggagaggtcttcacactcaaggccacggtcctaaactaccttcccaaatgcatccgggctgaaggtattgagcaagaaaagactttcagttccatgacctgtgcctcaggtgctaatgtgtctgagcagttgtccttgaagctcccatcaaatgtggtcaaagaatctgccagagcttctttctcagttctgggtgacatattaggttctgctatgcaaaatatacaaaatctcctccagatgccatatggctgtggagaacagaacatggtcctatttgctcctaacatctatgtcttgaactatctgaatgaaacccagcagctgacgcaggagatcaaggccaaggccgttggctatctcatcactggttaccagagacagctgaactacaaacaccaagatggctcctacagcacctttggggaacgatatggcaggaaccagggcaacacttggctcacagcttttgtactgaagactttcgcccaggctcgatcctacatcttcattgatgaagcacacattacccaatctctcacgtggctctcccagatgcagaaggacaatggctgtttcaggagctctgggtcactgctcaacaatgccataaagggaggtgtagaagatgaagcgaccctctccgcctatgttactattgcccttctggaaattcctctcccagtcactaaccctattgttcgcaatgccctgttctgcctggagtcagcctggaatgtagcaaaggaggggacccatgggagccatgtctacaccaaggcattgctggcctatgctttttccctactgggaaagcaaaatcagaatagagaaatactgaactcacttgataaggaagctgtgaaagaagacaacctcgtccattgggagcgccctcagagacccaaggcaccagtggggcatctttaccaaacccaggctccctctgctgaggtggagatgacatcctatgtgctcctcgcttatctcacggcccagccagcccccacctcaggggacctgacctctgcaactaacattgtgaagtggatcatgaagcagcagaacgcccaaggtggtttctcctccacccaggacacagtggtggctctccatgccctgtccaggtatggagcagccactttcaccagaactgagaaaactgcacaggtcaccgttcaggattcacagaccttttctacaaatttccaagtagacaacaacaacctcctattactgcagcagatctcattgccagagctccctggagaatatgtcataacagtaactggggaaagatgtgtgtatcttcagacatccatgaaatacaatattcttccagagaaagaggactccccatttgctttaaaagtgcagactgtgccccagacttgcgatggacacaaagcccacaccagctttcagatctcactgaccatcagttacacaggaaaccgtcctgcttccaatatggtgattgttgatgtaaagatggtatctggttttattcccctgaaaccaacagtaaaaatgcttgaaagatctagctctgtgagccggacagaagtgagcaacaaccatgtcctcatttatgtggaacaggtgagggctctgacatcctggctgagactacatatgggtcgtctttctaagtgacaaatcagacgctaagtttttccttcatggttctgcaagacatcccagtaggagacttgaagccagcaattgttaaagtctatgattactatgagacagatgagtctgtggttgctgagtatatcgccccctgcagcacagatacagagcatggaaatgtttgaggaccatacaggctgtatattttggtggattctctgtcctatacatttacttagaaggaatggagttatttgtctctataaaatagacactaaaaatatttgctgaataaatatgtacttctggtcaaactaaaaaaaaatg

SEQ ID NO: 73995 - DNA, 4938 bp, Homo sapiens
ggacacaaccctgagatttatccctcacaatgcggaaagacagacttcttcatttatgtcttgtgctacttcttatcctgctttctgccagtgactcaaactctacagaaccgcagtatatggtgctggtcccctccctgctccacactgaggcccctaagaagggctgtgtccttctgagccacctgaatgagacagtgactgtaagtgcttccttggagtctggcagggaaaacaggagcctcttcactgacctggtggcggagaaggacttattccactgtgtctccttcactctcccaaggatctcagcctcttcagaggtggcattccttagcatccagataaaggggcctacgcaagatttcaggaagaggaacacagttctggtactgaacacccaaagtctggtctttgtccagacagacaaacccatgtataaaccaggacagacagtaagattccgtgttgtctccgtggatgaaaattttcgccctcgaaatgaactgattccactgatataccttgagaacccaagaagaaatcgaattgcacaatggcagagtctcaagctagaagctggcatcaatcagttgtcctttcccctctcatcagagcccattcagggctcctacagggtggtggtacagacagaatcaggtggaaggatacagcaccccttcaccgtggaggaatttgtgcttcccaagtttgaggtcaaagttcaggtgccaaagataatcagtatcatggatgaaaaagtgaacataacagtctgtggagaatacacttatgggaagcctgtcccaggacttgcaactgtgagcctgtgtagaaaattatctcgtgttcttaattgtgacaagcaggaggtctgtgaggaattcagtcaacagcttaacagcaatggctgcatcacccaacaagtacacaccaaaatgctccagattacaaatacgggctttgaaatgaagcttagagtggaagccaggatcagagaagaggggacagacctggaagtcactgcaaacaggatcagtgaaatcacaaacattgtatccaaactcaaattcgtgaaagtggattcacactttagacaaggaatccccttttttgcacaggtgcttctggtggatggaaaaggtgtgcccatccccaataaactcttcttcatctctgtgaatgacgccaattattactccaatgcaaccaccaatgagcagggtcttgcacagttttcaatcaatactaccagtatctcggttaataaactttttgtccgggttttcactgtgcatcccaacttgtgttttcactattcatgggtagcagaagaccaccagggcgctcagcacactgcaaatcgtgttttctccttaagtggaagttacattcacctggagcctgtggctggtaccctgccctgtggccacacggagactatcacggcacactatacactgaatagacaggccatgggagagttatcggagctcagtttccattacctgatcatggctaagggagtcatcgtcagatctggaacccacactctgcctgtggagtcaggagacatgaaaggcagttttgccttatccttccctgtggagtcagacgttgcccccattgcacgaatgttcatctttgccattttaccagatggagaagttgttggagactctgaaaaatttgagattgaaaactgtctagccaacaaggtggatttgagcttcagcccagcacaaagtcccccagcctcacatgcccacctgcaagtagcagctgctccgcagtccctctgtgcccttcgtgctgtggaccaaagtgtgctgctcatgaagcctgaggctgagctctctgtgtcctcagtatataatctgctaactgtgaaggatctcaccaattttcctgacaatgtggaccagcaggaggaagaacaaggacactgtccccgtcctttcttcattcataatggagccatctatgttcccttatcaagtaatgaagcagatatttatagcttcctcaaggggatgggattgaaggtgttcactaactcaaaaatccgaaaaccaaagtcgtgttcagtcatcccttccgtgtctgcaggagcagtaggtcaaggatactatggagcaggtctaggagtagtagagagaccatatgttcctcaattaggcacatataatgtgatacccttaaataatgaacaaagttcagggccagtccctgaaacggtgcgaagctattttcctgagacttggatctgggagttggtggcagtgaactcatcaggtgtggctgaggtaggagtaacagtccctgacaccatcaccgagtggaaggcaggggccttctgcctgtctgaagatgctggacttggtatctcttccactgcctctctccgagccttccagcccttctttgtggagctcacaatgccttactctgtgattcgtggagaggtcttcacactcaaggccacggtcctaaactaccttcccaaatgcatccgggctgaaggtattgagcaagaaaagactttcagttccatgacctgtgcctcaggtgctaatgtgtctgagcagttgtccttgaagctcccatcaaatgtggtcaaagaatctgccagagcttctttctcagttctgggtgacatattaggttctgctatgcaaaatatacaaaatctcctccagatgccatatggctgtggagaacagaacatggtcctatttgctcctaacatctatgtcttgaactatctgaatgaaacccagcagctgacgcaggagatcaaggccaaggccgttggctatctcatcactggttaccagagacagctgaactacaaacaccaagatggctcctacagcacctttggggaacgatatggcaggaaccagggcaacacttggctcacagcttttgtactgaagactttcgcccaggctcgatcctacatcttcattgatgaagcacacattacccaatctctcacgtggctctcccagatgcagaaggacaatggctgtttcaggagctctgggtcactgctcaacaatgccataaagggaggtgtagaagatgaagcgaccctctccgcctatgttactattgcccttctggaaattcctctcccagtcactaaccctattgttcgcaatgccctgttctgcctggagtcagcctggaatgtagcaaaggaggggacccatgggagccatgtctacaccaaggcattgctggcctatgctttttccctactgggaaagcaaaatcagaatagagaaatactgaactcacttgataaggaagctgtgaaagaagacaacctcgtccattgggagcgccctcagagacccaaggcaccagtggggcatctttaccaaacccaggctccctctgctgaggtggagatgacatcctatgtgctcctcgcttatctcacggcccagccagcccccacctcaggggacctgacctctgcaactaacattgtgaagtggatcatgaagcagcagaacgcccaaggtggtttctcctccacccaggacacagtggtggctctccatgccctgtccaggtatggagcagccactttcaccagaactgagaaaactgcacaggtcaccgttcaggattcacagaccttttctacaaatttccaagtagacaacaacaacctcctattactgcagcagatctcattgccagagctccctggagaatatgtcataacagtaactggggaaagatgtgtgtatcttcagacatccatgaaatacaatattcttccagagaaagaggactccccatttgctttaaaagtgcagactgtgccccagacttgcgatggacacaaagcccacaccagctttcagatctcactgaccatcagttacacaggaaaccgtcctgcttccaatatggtgattgttgatgtaaagatggtatctggttttattcccctgaaaccaacagtaaaaatgcttgaaagatctagctctgtgagccggacagaagtgagcaacaaccatgtcctcatttatgtggaacaggtgagggctctgacatcctggctgagactacatatgggtcgtctttctaagtgacaaatcagacgctaagtttttccttcatggttctgcaagacatcccagtaggagacttgaagccagcaattgttaaagtctatgattactatgagacagatgagtctgtggttgctgagtatatcgccccctgcagcacaggtaagagttcaccacttatgaccagtactagatggcattaacccactctccaagggcccctgcaatttaaattctctacaaggcttttcctacatctgagacaatccacatggcatgtcctcacaccaagacaaaactgtggcgtagcatgcctattctgtagcggactctccaatttcagatattcactcccagaaaagtcaataagctttgtttatttgtaggacagctatctctaaaagcgacatttcacttcacagctaattgggcttccttcaacacaatggtcaactaatcacacacctaaaaccaaatctagccttacacttaattttgtaaatgaagctttattggcacatggccacacttattattaacattggctatggctgcctttgtgtgctgattagtcatgacagaccacatggcatataaacctaaaataattaccatctggcctttcacaaagtttcctgaccctgcataagctcactctgctgcccacactcaactgaatgctcctcaggaaatgatacaacctccttacgtttttcttttctccaggtggattctctgtcctatacatttacttagaaggaatggagttatttgtctctataaaatagacactaaaaatatttgctgaataaatatgtacttctggtcaaactaaaaaaaaatg

SEQ ID NO: 73996 - DNA, 4984 bp, Homo sapiens
ggacacaaccctgagatttatccctcacaatgcggaaagacagacttcttcatttatgtcttgtgctacttcttatcctgctttctgccagtgactcaaactctacagaaccgcagtatatggtgctggtcccctccctgctccacactgaggcccctaagaagggctgtgtccttctgagccacctgaatgagacagtgactgtaagtgcttccttggagtctggcagggaaaacaggagcctcttcactgacctggtggcggagaaggacttattccactgtgtctccttcactctcccaaggatctcagcctcttcagaggtggcattccttagcatccagataaaggggcctacgcaagatttcaggaagaggaacacagttctggtactgaacacccaaagtctggtctttgtccagacagacaaacccatgtataaaccaggacagacagtaagattccgtgttgtctccgtggatgaaaattttcgccctcgaaatgaactgattccactgatataccttgagaacccaagaagaaatcgaattgcacaatggcagagtctcaagctagaagctggcatcaatcagttgtcctttcccctctcatcagagcccattcagggctcctacagggtggtggtacagacagaatcaggtggaaggatacagcaccccttcaccgtggaggaatttgtgcttcccaagtttgaggtcaaagttcaggtgccaaagataatcagtatcatggatgaaaaagtgaacataacagtctgtggagaatacacttatgggaagcctgtcccaggacttgcaactgtgagcctgtgtagaaaattatctcgtgttcttaattgtgacaagcaggaggtctgtgaggaattcagtcaacagcttaacagcaatggctgcatcacccaacaagtacacaccaaaatgctccagattacaaatacgggctttgaaatgaagcttagagtggaagccaggatcagagaagaggggacagacctggaagtcactgcaaacaggatcagtgaaatcacaaacattgtatccaaactcaaattcgtgaaagtggattcacactttagacaaggaatccccttttttgcacaggtgcttctggtggatggaaaaggtgtgcccatccccaataaactcttcttcatctctgtgaatgacgccaattattactccaatgcaaccaccaatgagcagggtcttgcacagttttcaatcaatactaccagtatctcggttaataaactttttgtccgggttttcactgtgcatcccaacttgtgttttcactattcatgggtagcagaagaccaccagggcgctcagcacactgcaaatcgtgttttctccttaagtggaagttacattcacctggagcctgtggctggtaccctgccctgtggccacacggagactatcacggcacactatacactgaatagacaggccatgggagagttatcggagctcagtttccattacctgatcatggctaagggagtcatcgtcagatctggaacccacactctgcctgtggagtcaggagacatgaaaggcagttttgccttatccttccctgtggagtcagacgttgcccccattgcacgaatgttcatctttgccattttaccagatggagaagttgttggagactctgaaaaatttgagattgaaaactgtctagccaacaaggtggatttgagcttcagcccagcacaaagtcccccagcctcacatgcccacctgcaagtagcagctgctccgcagtccctctgtgcccttcgtgctgtggaccaaagtgtgctgctcatgaagcctgaggctgagctctctgtgtcctcagtatataatctgctaactgtgaaggatctcaccaattttcctgacaatgtggaccagcaggaggaagaacaaggacactgtccccgtcctttcttcattcataatggagccatctatgttcccttatcaagtaatgaagcagatatttatagcttcctcaaggggatgggattgaaggtgttcactaactcaaaaatccgaaaaccaaagtcgtgttcagtcatcccttccgtgtctgcaggagcagtaggtcaaggatactatggagcaggtctaggagtagtagagagaccatatgttcctcaattaggcacatataatgtgatacccttaaataatgaacaaagttcagggccagtccctgaaacggtgcgaagctattttcctgagacttggatctgggagttggtggcagtgaactcatcaggtgtggctgaggtaggagtaacagtccctgacaccatcaccgagtggaaggcaggggccttctgcctgtctgaagatgctggacttggtatctcttccactgcctctctccgagccttccagcccttctttgtggagctcacaatgccttactctgtgattcgtggagaggtcttcacactcaaggccacggtcctaaactaccttcccaaatgcatccgggctgaaggtattgagcaagaaaagactttcagttccatgacctgtgcctcaggtgctaatgtgtctgagcagttgtccttgaagctcccatcaaatgtggtcaaagaatctgccagagcttctttctcagttctgggtgacatattaggttctgctatgcaaaatatacaaaatctcctccagatgccatatggctgtggagaacagaacatggtcctatttgctcctaacatctatgtcttgaactatctgaatgaaacccagcagctgacgcaggagatcaaggccaaggccgttggctatctcatcactggttaccagagacagctgaactacaaacaccaagatggctcctacagcacctttggggaacgatatggcaggaaccagggcaacacttggctcacagcttttgtactgaagactttcgcccaggctcgatcctacatcttcattgatgaagcacacattacccaatctctcacgtggctctcccagatgcagaaggacaatggctgtttcaggagctctgggtcactgctcaacaatgccataaagggaggtgtagaagatgaagcgaccctctccgcctatgttactattgcccttctggaaattcctctcccagtcactaaccctattgttcgcaatgccctgttctgcctggagtcagcctggaatgtagcaaaggaggggacccatgggagccatgtctacaccaaggcattgctggcctatgctttttccctactgggaaagcaaaatcagaatagagaaatactgaactcacttgataaggaagctgtgaaagaagacaacctcgtccattgggagcgccctcagagacccaaggcaccagtggggcatctttaccaaacccaggctccctctgctgaggtggagatgacatcctatgtgctcctcgcttatctcacggcccagccagcccccacctcaggggacctgacctctgcaactaacattgtgaagtggatcatgaagcagcagaacgcccaaggtggtttctcctccacccaggacacagtggtggctctccatgccctgtccaggtatggagcagccactttcaccagaactgagaaaactgcacaggtcaccgttcaggattcacagaccttttctacaaatttccaagtagacaacaacaacctcctattactgcagcagatctcattgccagagctccctggagaatatgtcataacagtaactggggaaagatgtgtgtatcttcagacatccatgaaatacaatattcttccagagaaagaggactccccatttgctttaaaagtgcagactgtgccccagacttgcgatggacacaaagcccacaccagctttcagatctcactgaccatcagttacacaggaaaccgtcctgcttccaatatggtgattgttgatgtaaagatggtatctggttttattcccctgaaaccaacagtaaaaatgcttgaaagatctagctctgtgagccggacagaagtgagcaacaaccatgtcctcatttatgtggaacaggtgagggctctgacatcctggctgagactacatatgggtcgtctttctaagtgacaaatcagacgctaagtttttccttcatggttctgcaagacatcccagtaggagacttgaagccagcaattgttaaagtctatgattactatgagacagatgagtctgtggttgctgagtatatcgccccctgcagcacaggtaagagttcaccacttatgaccagtactagatggcattaacccactctccaagggcccctgcaatttaaattctctacaaggcttttcctacatctgagacaatccacatggcatgtcctcacaccaagacaaaactgtggcgtagcatgcctattctgtagcggactctccaatttcagatattcactcccagaaaagtcaataagctttgtttatttgtaggacagctatctctaaaagcgacatttcacttcacagctaattgggcttccttcaacacaatggtcaactaatcacacacctaaaaccaaatctagccttacacttaattttgtaaatgaagctttattggcacatggccacacttattattaacattggctatggctgcctttgtgtgctgattagtcatgacagaccacatggcatataaacctaaaataattaccatctggcctttcacaaagtttcctgaccctgcataagctcactctgctgcccacactcaactgaatgctcctcaggaaatgatacaacctccttacgtttttcttttctccaatacagagcatggaaatgtttgaggaccatacaggctgtatattttggtggattctctgtcctatacatttacttagaaggaatggagttatttgtctctataaaatagacactaaaaatatttgctgaataaatatgtacttctggtcaaactaaaaaaaaatg

SEQ ID NO: 73997 - DNA, 4499 bp, Homo sapiens
ggacacaaccctgagatttatccctcacaatgcggaaagacagacttcttcatttatgtcttgtgctacttcttatcctgctttctgccagtgactcaaactctacagaaccgcagtatatggtgctggtcccctccctgctccacactgaggcccctaagaagggctgtgtccttctgagccacctgaatgagacagtgactgtaagtgcttccttggagtctggcagggaaaacaggagcctcttcactgacctggtggcggagaaggacttattccactgtgtctccttcactctcccaaggatctcagcctcttcagaggtggcattccttagcatccagataaaggggcctacgcaagatttcaggaagaggaacacagttctggtactgaacacccaaagtctggtctttgtccagacagacaaacccatgtataaaccaggacagacagtaagattccgtgttgtctccgtggatgaaaattttcgccctcgaaatgaactgattccactgatataccttgagaacccaagaagaaatcgaattgcacaatggcagagtctcaagctagaagctggcatcaatcagttgtcctttcccctctcatcagagcccattcagggctcctacagggtggtggtacagacagaatcaggtggaaggatacagcaccccttcaccgtggaggaatttgtgcttcccaagtttgaggtcaaagttcaggtgccaaagataatcagtatcatggatgaaaaagtgaacataacagtctgtggagaatacacttatgggaagcctgtcccaggacttgcaactgtgagcctgtgtagaaaattatctcgtgttcttaattgtgacaagcaggaggtctgtgaggaattcagtcaacagcttaacagcaatggctgcatcacccaacaagtacacaccaaaatgctccagattacaaatacgggctttgaaatgaagcttagagtggaagccaggatcagagaagaggggacagacctggaagtcactgcaaacaggatcagtgaaatcacaaacattgtatccaaactcaaattcgtgaaagtggattcacactttagacaaggaatccccttttttgcacaggtgcttctggtggatggaaaaggtgtgcccatccccaataaactcttcttcatctctgtgaatgacgccaattattactccaatgcaaccaccaatgagcagggtcttgcacagttttcaatcaatactaccagtatctcggttaataaactttttgtccgggttttcactgtgcatcccaacttgtgttttcactattcatgggtagcagaagaccaccagggcgctcagcacactgcaaatcgtgttttctccttaagtggaagttacattcacctggagcctgtggctggtaccctgccctgtggccacacggagactatcacggcacactatacactgaatagacaggccatgggagagttatcggagctcagtttccattacctgatcatggctaagggagtcatcgtcagatctggaacccacactctgcctgtggagtcaggagacatgaaaggcagttttgccttatccttccctgtggagtcagacgttgcccccattgcacgaatgttcatctttgccattttaccagatggagaagttgttggagactctgaaaaatttgagattgaaaactgtctagccaacaaggtggatttgagcttcagcccagcacaaagtcccccagcctcacatgcccacctgcaagtagcagctgctccgcagtccctctgtgcccttcgtgctgtggaccaaagtgtgctgctcatgaagcctgaggctgagctctctgtgtcctcagtatataatctgctaactgtgaaggatctcaccaattttcctgacaatgtggaccagcaggaggaagaacaaggacactgtccccgtcctttcttcattcataatggagccatctatgttcccttatcaagtaatgaagcagatatttatagcttcctcaaggggatgggattgaaggtgttcactaactcaaaaatccgaaaaccaaagtcgtgttcagtcatcccttccgtgtctgcaggagcagtaggtcaaggatactatggagcaggtctaggagtagtagagagaccatatgttcctcaattaggcacatataatgtgatacccttaaataatgaacaaagttcagggccagtccctgaaacggtgcgaagctattttcctgagacttggatctgggagttggtggcagtgaactcatcaggtgtggctgaggtaggagtaacagtccctgacaccatcaccgagtggaaggcaggggccttctgcctgtctgaagatgctggacttggtatctcttccactgcctctctccgagccttccagcccttctttgtggagctcacaatgccttactctgtgattcgtggagaggtcttcacactcaaggccacggtcctaaactaccttcccaaatgcatccgggctgaaggtattgagcaagaaaagactttcagttccatgacctgtgcctcaggtgctaatgtgtctgagcagttgtccttgaagctcccatcaaatgtggtcaaagaatctgccagagcttctttctcagttctgggtgacatattaggttctgctatgcaaaatatacaaaatctcctccagatgccatatggctgtggagaacagaacatggtcctatttgctcctaacatctatgtcttgaactatctgaatgaaacccagcagctgacgcaggagatcaaggccaaggccgttggctatctcatcactggttaccagagacagctgaactacaaacaccaagatggctcctacagcacctttggggaacgatatggcaggaaccagggcaacacttggctcacagcttttgtactgaagactttcgcccaggctcgatcctacatcttcattgatgaagcacacattacccaatctctcacgtggctctcccagatgcagaaggacaatggctgtttcaggagctctgggtcactgctcaacaatgccataaagggaggtgtagaagatgaagcgaccctctccgcctatgttactattgcccttctggaaattcctctcccagtcactaaccctattgttcgcaatgccctgttctgcctggagtcagcctggaatgtagcaaaggaggggacccatgggagccatgtctacaccaaggcattgctggcctatgctttttccctactgggaaagcaaaatcagaatagagaaatactgaactcacttgataaggaagctgtgaaagaagacaacctcgtccattgggagcgccctcagagacccaaggcaccagtggggcatctttaccaaacccaggctccctctgctgaggtggagatgacatcctatgtgctcctcgcttatctcacggcccagccagcccccacctcaggggacctgacctctgcaactaacattgtgaagtggatcatgaagcagcagaacgcccaaggtggtttctcctccacccaggacacagtggtggctctccatgccctgtccaggtatggagcagccactttcaccagaactgagaaaactgcacaggtcaccgttcaggattcacagaccttttctacaaatttccaagtagacaacaacaacctcctattactgcagcagatctcattgccagagctccctggagaatatgtcataacagtaactggggaaagatgtgtgtatcttcagacatccatgaaatacaatattcttccagagaaagaggactccccatttgctttaaaagtgcagactgtgccccagacttgcgatggacacaaagcccacaccagctttcagatctcactgaccatcagttacacaggaaaccgtcctgcttccaatatggtgattgttgatgtaaagatggtatctggttttattcccctgaaaccaacagtaaaaatgcttgaaagatctagctctgtgagccggacagaagtgagcaacaaccatgtcctcatttatgtggaacaggtgagggctctgacatcctggctgagactacatatgggtcgtctttctaagtgacaaatcagacgctaagtttttccttcatggttctgcaagacatcccagtaggagacttgaagccagcaattgttaaagtctatgattactatgagacaggtgagtgaaagaaaaatgaaacaatcttaaccagagccaagaaatggatcctgttgtgacagttgatcctcttcttagcccacttagtcaacattaatcttttgtttctttcctccaagatgtacactataaaaacgacttactacagtctggccaacatagcaaaaccccatctctactaaaaatacaagaggcaggagaatcgtgtaagcctgggaggcagaggttgcagtgagctgagatcacgccattgcactccagcccaggtgacggtgcgagactccg

SEQ ID NO: 73998 - DNA, 873 bp, Homo sapiens
atcctgtttaattcttgtctatttacatgaagttttgacaattctgatagggcgtgcttttctccagtagtaaagtgactagacagatttagcatggtccctagttcatagatctttcgtttcttccttcacccaacgttatctttcagatgagtctgtggttgctgagtatatcgccccctgcagcacaggtaagagttcaccacttatgaccagtactagatggcattaacccactctccaagggcccctgcaatttaaattctctacaaggcttttcctacatctgagacaatccacatggcatgtcctcacaccaagacaaaactgtggcgtagcatgcctattctgtagcggactctccaatttcagatattcactcccagaaaagtcaataagctttgtttatttgtaggacagctatctctaaaagcgacatttcacttcacagctaattgggcttccttcaacacaatggtcaactaatcacacacctaaaaccaaatctagccttacacttaattttgtaaatgaagctttattggcacatggccacacttattattaacattggctatggctgcctttgtgtgctgattagtcatgacagaccacatggcatataaacctaaaataattaccatctggcctttcacaaagtttcctgaccctgcataagctcactctgctgcccacactcaactgaatgctcctcaggaaatgatacaacctccttacgtttttcttttctccaggtggattctctgtcctatacatttacttagaaggaatggagttatttgtctctataaaatagacactaaaaatatttgctgaataaatatgtacttctggtcaaactaaaaaaaaatg

SEQ ID NO: 73999 - DNA, 3655 bp, Homo sapiens
ggacacaaccctgagatttatccctcacaatgcggaaagacagacttcttcatttatgtcttgtgctacttcttatcctgctttctgccagtgactcaaactctacagaaccgcagtatatggtgctggtcccctccctgctccacactgaggcccctaagaagggctgtgtccttctgagccacctgaatgagacagtgactgtaagtgcttccttggagtctggcagggaaaacaggagcctcttcactgacctggtggcggagaaggacttattccactgtgtctccttcactctcccaaggatctcagcctcttcagaggtggcattccttagcatccagataaaggggcctacgcaagatttcaggaagaggaacacagttctggtactgaacacccaaagtctggtctttgtccagacagacaaacccatgtataaaccaggacagacagtaagattccgtgttgtctccgtggatgaaaattttcgccctcgaaatgaactgattccactgatataccttgagaacccaagaagaaatcgaattgcacaatggcagagtctcaagctagaagctggcatcaatcagttgtcctttcccctctcatcagagcccattcagggctcctacagggtggtggtacagacagaatcaggtggaaggatacagcaccccttcaccgtggaggaatttgtgcttcccaagtttgaggtcaaagttcaggtgccaaagataatcagtatcatggatgaaaaagtgaacataacagtctgtggagaatacacttatgggaagcctgtcccaggacttgcaactgtgagcctgtgtagaaaattatctcgtgttcttaattgtgacaagcaggaggtctgtgaggaattcagtcaacagcttaacagcaatggctgcatcacccaacaagtacacaccaaaatgctccagattacaaatacgggctttgaaatgaagcttagagtggaagccaggatcagagaagaggggacagacctggaagtcactgcaaacaggatcagtgaaatcacaaacattgtatccaaactcaaattcgtgaaagtggattcacactttagacaaggaatccccttttttgcacaggtgcttctggtggatggaaaaggtgtgcccatccccaataaactcttcttcatctctgtgaatgacgccaattattactccaatgcaaccaccaatgagcagggtcttgcacagttttcaatcaatactaccagtatctcggttaataaactttttgtccgggttttcactgtgcatcccaacttgtgttttcactattcatgggtagcagaagaccaccagggcgctcagcacactgcaaatcgtgttttctccttaagtggaagttacattcacctggagcctgtggctggtaccctgccctgtggccacacggagactatcacggcacactatacactgaatagacaggccatgggagagttatcggagctcagtttccattacctgatcatggctaagggagtcatcgtcagatctggaacccacactctgcctgtggagtcaggagacatgaaaggcagttttgccttatccttccctgtggagtcagacgttgcccccattgcacgaatgttcatctttgccattttaccagatggagaagttgttggagactctgaaaaatttgagattgaaaactgtctagccaacaaggtggatttgagcttcagcccagcacaaagtcccccagcctcacatgcccacctgcaagtagcagctgctccgcagtccctctgtgcccttcgtgctgtggaccaaagtgtgctgctcatgaagcctgaggctgagctctctgtgtcctcagtatataatctgctaactgtgaaggatctcaccaattttcctgacaatgtggaccagcaggaggaagaacaaggacactgtccccgtcctttcttcattcataatggagccatctatgttcccttatcaagtaatgaagcagatatttatagcttcctcaaggggatgggattgaaggtgttcactaactcaaaaatccgaaaaccaaagtcgtgttcagtcatcccttccgtgtctgcaggagcagtaggtcaaggatactatggagcaggtctaggagtagtagagagaccatatgttcctcaattaggcacatataatgtgatacccttaaataatgaacaaagttcagggccagtccctgaaacggtgcgaagctattttcctgagacttggatctgggagttggtggcagtgaactcatcaggtgtggctgaggtaggagtaacagtccctgacaccatcaccgagtggaaggcaggggccttctgcctgtctgaagatgctggacttggtatctcttccactgcctctctccgagccttccagcccttctttgtggagctcacaatgccttactctgtgattcgtggagaggtcttcacactcaaggccacggtcctaaactaccttcccaaatgcatccgggctgaaggtattgagcaagaaaagactttcagttccatgacctgtgcctcaggtgctaatgtgtctgagcagttgtccttgaagctcccatcaaatgtggtcaaagaatctgccagagcttctttctcagttctgggtgacatattaggttctgctatgcaaaatatacaaaatctcctccagatgccatatggctgtggagaacagaacatggtcctatttgctcctaacatctatgtcttgaactatctgaatgaaacccagcagctgacgcaggagatcaaggccaaggccgttggctatctcatcactggttaccagagacagctgaactacaaacaccaagatggctcctacagcacctttggggaacgatatggcaggaaccagggcaacacttggctcacagcttttgtactgaagactttcgcccaggctcgatcctacatcttcattgatgaagcacacattacccaatctctcacgtggctctcccagatgcagaaggacaatggctgtttcaggagctctgggtcactgctcaacaatgccataaagggaggtgtagaagatgaagcgaccctctccgcctatgttactattgcccttctggaaattcctctcccagtcactaaccctattgttcgcaatgccctgttctgcctggagtcagcctggaatgtagcaaaggaggggacccatgggagccatgtctacaccaaggcattgctggcctatgctttttccctactgggaaagcaaaatcagaatagagaaatactgaactcacttgataaggaagctgtgaaagaagacaacctcgtccattgggagcgccctcagagacccaaggcaccagtggggcatctttaccaaacccaggctccctctgctgaggtggagatgacatcctatgtgctcctcgcttatctcacggcccagccagcccccacctcaggggacctgacctctgcaactaacattgtgaagtggatcatgaagcagcagaacgcccaaggtggtttctcctccacccaggtcagtggttcccaaagagtcttctgctccaggttcacttggcaattgggaggcttaaaagtagaacagttaatggaaaagagaaggcaattattaaatca

SEQ ID NO: 74000 - DNA, 433 bp, Homo sapiens
agtgacgtgatctcggctcactgcaagctccgcctcctgggttcacgccattctcctgcctcagcctcccgagtagctgggactacaggcgcccgccaccacgcccggctaatttttttgtatttttagtagagacggggtttcaccgtgttcaccaggatggtctcgatatcctgacctcatgatccgcccgcctcggcctcccaaagtgctgggattacaggcgatagctgctattcttattaggattctggaagtcacactctgtgtatataacttttctcttacctaaatgatagactctgaatataaaggccatttttgttaataatgttggctatttatgaactgaaattattctgacatctaatctttcacattccccaggtgacatattaggttctgctatgcaaaatatacaaaatctcctcca

SEQ ID NO: 74001 - DNA, 345 bp, Homo sapiens
tggttgatgcattaagagagatttacacttgcccagtaatgcccatagactatgtatcaaaaccaatcctaaaaacaggttctctagtcttattctttaagactgaactataaagggaagagatcgaaatatttttctatttaaatatgatgaatatctagctgtctgcctatctgtctgaaatctattaataacatctgactgtcaatatccagctctcagcttgctctgccctctattcaccctagtttgacacaaccacattttgcctttacagaaccctattgttcgcaatgccctgttctgcctggagtcagcctggaatgtagcaaaggaggggaccca

SEQ ID NO: 74002 - DNA, 485 bp, Homo sapiens
agactttgggggaaaatcccagatgccaaaaatttactctttggggcggttgtccactcgtctcttccaggacacagtggtggctctccatgccctgtccaggtatggagcagccactttcaccagaactgagaaaactgcacaggtcaccgttcaggattcacagaccttttctacaaatttccaagtagacaacaacaacctcctattactgcagcagatctcattgccagagctccctggagaatatgtcataacagtaactggggaaagatgtgtgtatcttcaggtagggctccaagcttatatgggtgagagtcaactttaaacttgccaattgaaatggaaactctgttccttccttcctgggaaagtaaaaggcacctctggagacgttaagtaatgaggaagtgaggggtccagaaaaagagagaaactgatagtgtctttgctgtttcacagacatccatgaaatacaatattct

SEQ ID NO: 74003 - DNA, 499 bp, Homo sapiens
ggaaggccctggtaggctgtactcctctctctcttagggaaaaccagcaccaaagttctagagtctggacgtctgagatcagggtgccagcactgtcgaggtcacagactgcagacctccttgtatcttcaaatggaggaaagaggacaagagagctcctgtggtcccttttatcaagatgaatgcacaaggaaaatgttgtacatttgcacattggagtacacttcagccataaaaagaatgagatgctgtcatttgcaacaacagttgaagcctagtcaagaagagggctcagagaagcttgactaaagtttcatgaagagagtctctgtcagtggtgggtctttgattctcaaggaagctgtcagaagcttcatctaacttctcttccactctactttcttctggggaagaagtgacccaacaatttgatctaatatttgcctgataatattgaacatccttgcatccattaaagtttactgttctaagacttact

SEQ ID NO: 74004 - DNA, 725 bp, Homo sapiens
ggaagactgacttcctcctgctgccaaaggttgcagtgcttatttaagaaattatacctgcttgtctactagaggcagtcagctgaatcatcgagttcttgcagaagccttgagctttagcacctaagggccctgagacagtgtattcaacaaccttgtgcatgaaagaaggggagttctgagggacatggacatgcagactttttcaccaaccaggaaaacttttcaggcatcacccaagaggtccagctgaagatgtaacagttctagagtctggacgtctgagatcagggtgccagcactgtcgaggtcacagactgcagacctccttgtatcttcaaatggaggaaagaggacaagagagctcctgtggtcccttttatcaagatgaatgcacaaggaaaatgttgtacatttgcacattggagtacacttcagccataaaaagaatgagatgctgtcatttgcaacaacagagttgtgcagtcatcagttatcttcatgggacgagtatgtccggaggggaggaaaatctgataaaaaatattgaaattcaatgaaggcttccactgcttaacaaatgttacatagaattcttcaccgatgtgaggaacatcagtttgcaaaagaaactctgcactttcagggataaaaagactgagactccaaatggtgctcctagtattggtgaagcttagggagagagcccattgtgtttctatcta

SEQ ID NO: 74005 - DNA, 754 bp, Homo sapiens
cgaagaaatagacatgacccagaaaactcacgaggaaagaggaaatcgtgtactttgtggaaaccatatccacgtaatgttgttccaggctgtagaaagcaactattgttattccagatactgaagcacagagtctattttgtgccgctggcggtttcattaacatagtaacactctgcctttctagaattgggtgagcagccttccctgtttggaacactgcagagggagactgaaccccacaattgatatcagaaggccccgtgtggatgcctcttcagggtgccttccacagagctctgccagcatgctgaggctgcggggaaaaaccatgaagcctcataaatatatacaatgattgtgtgtacccataatcattagaaataaaaatttaaaaaaacacataaaaccacaagggctctgattgctgggtctaggacttccccactccgacagtgatggtagcagaaacaaggcctgacagccagaccccagggcaggcagcagggaggaaaacagatttaaaaatcgcaccagacactcattttctacagaagtctgcgtgtcgttaatacatgggcaaacagccctttgttccttagtaggccttaaagacaccaccccatgggagctttctaaaaaagatagtattaaaagactatgattcaggctgggcacattagcacacacctgtaatctcagcactttggaaggtcgaggagggcagatcacttgagtctaggagtttgagacc

SEQ ID NO: 74006 - DNA, 628 bp, Homo sapiens
aaattggcctcacaacaaagggactcccttcacttgcctcaagtcaggatcatgggaaggggcagatgtctgctgagactgatgtgaggtcttttacctcagaaaattttacctgagtcattaaaataaaacccctttcaaaaaatttctttaagaaaaactagtgtaataaaaagtaggtcctattagagaacttaccaaacaccaagaacattctaacggcggaggctgtcaactagcatattgaggctatggtccttgttgaacaggttttgtcatctgatactgataatatttagaaatctaagatgcctttggagtataatatgttcaaaaaatgtggttatcttggtctgtgattacagcatatgtccatgctaaggagtttgtttcaggacaggaataagtcctcttctgttaagcagtttctcctaaatcagtttggagacatttcaggagcttttctaacacccaagctgaaattattggcttcttctctgattaaaaccatcccagcagttagcaaacaataaccagaaggttttcaatgtagcccctgtgcacccttcagaaaacatcttgaaacagtactgtaaatagattcaagaaaggaatgtggtttggaaaa

SEQ ID NO: 74007 - DNA, 371 bp, Homo sapiens
gaagccagagtgtggatagcttattcttggtcaagtcaccaaggatgatgacagcaaaaggaaaggagacaaaactgatgattcattcaactcatatttcttgtactcttactgtgtgccaggactgttctaggcactagagttacaacaggcaaaaattcctgccatcatggaccttacattttagtggagggaaggagaagattcagtaaataagttatatttatatgagaagacggtgaggcctgtggagaaaatacttgctctttcattatgagattgcctactcagtttcaaagcaggggaggttataacttaaaaaaatttacactggcacctatgcttaatttctaactctgttggagttttgg

SEQ ID NO: 74008 - DNA, 439 bp, Homo sapiens
agaggtccccaacccttaggagctgggccacacagcaggaggtgtgcagtggaccggtgaacatcaccacctgagctctgcctcctgtcagatcagcggtggcattagattctcataggattgcaaaccttactgtgaactgcgcatgcaagggatctgggttgcgtgcttcttatgagaatctaatgcctgatgatctgaggtagaacagtttcatcccataaccatcctcctcaccgcctgcaccatctggggaaaaattattttccaccaaacaggtccctggtgccaaaaaggttggggactgctgctcttaggacagaaagaaagaagttccataactagagtaaaatatcaccttacagtatgaggtagcttaactgtggatttactttgttaccttgcccctcagtggggagagaagctctggaatttaaaa

SEQ ID NO: 74009 - DNA, 8565 bp, Homo sapiens
cttgagtgttagagctgagtagttttcccagaatctctaagtcctttttatgctcttttatgaatgaatagaattagtaaaagataaataaattttttcttttggatttcttaaccagtggaaaaaatgttgactttaaaagttcataaaatcaaattttgcttaagaatatgttatttccacttgtgaggccagcctggtagacctctgggatccttttctgttcactcacacaccactgagataaggagtgaagtgtgggctaaatagggctgaggcttgggcaagggcatttctgccagagcaccagagacgtcagcatctcaagggcactgtggtatggaaaaggacgccacatgagtaaattttaaaaatataaatattttaaagggtaaaaatgagggtccctgtatttgaggatataaaagatgaaactgaagaagaaaagataggggaagaagaaaatgaagaagaccaggtcttctataagcctgttattgaagacttaagcatggaattggccagaaaatgcacggaactcattagcgatatccgttataaagaagagtttaaaaagtccaaggataagtgtacatttgtgactgacagtcctatgctaaaccatgtaaaaaatatcggtgcttttatttctgaggcaaaatacaaaggcaccattaaagctgacctttctaattctctttataagcggatgccagccacaattgacagtgtttttgcaggagaagttacacagctccagagtgaggtggcctacaagcagaaacatgatgctgccaaaggattctcagattatgcccacatgaaggagccccctgaggttaaacatgccatggaggtcaataaacaccagagtaatatttcttataggaaagacgtgcaggacacccacacgtacagtgcagaacttgaccgaccagacatcaagatggcaacccagatctctaagatcataagcaatgcagaatacaagaaaggacaaggaataatgaataaagagcccgctgtaattggaagaccagattttgaacatgccgtggaagcttctaaactttctagtcaaattaaatacaaagaaaaatttgataatgaaatgaaggataagaaacatcattacaatcctcttgaaagtgcttcttttaggcagaatcagcttgctgctacactggcgagcaatgtgaagtacaagaaagacattcaaaatatgcatgatccagtttcagatctcccaaatttgttgtttttagaccatgttttgaaagccagcaaaatgctcagcggccgagaatataaaaagctctttgaggaaaacaaaggaatgtatcattttgatgcagatgctgtggaacatctgcaccataaaggcaatgccgtcctccaaagtcaggtgaaatataaagaagaatatgagaaaaataagggaaagccaatgcttgaatttgttgagacaccatcatatcaagcttcaaaggaggctcaaaagatgcaaagtgaaaaagtttacaaagaggattttgagaaggagattaaaggaaggtcatcactggatttagacaagactccagaatttttacatgtaaagtacatcaccaaccttctgagggagaaagaatataaaaaagatttggaaaatgagataaaagggaaaggaatggaacttaattcagaagttcttgatatccaaagagcaaagcgagcctctgaaatggcaagtgagaaagaatacaagaaagacctggagtcaataattaaagggaaaggaatgcaagctggcactgacacccttgaaatgcagcatgccaagaaggctgcagagatagcgagtgagaaagactataaaagagatctggagactgaaattaaagggaaagggatgcaggtgagcacagacactcttgatgtccagagagctaagaaagcatccgagatggccagccagaaacaatacaagaaggacttagaaaatgaaattaaagggaaaggaatgcaagtgagcatggatatcccagatatccttcgagccaagaggacatctgaaatctatagccagagaaagtataaagatgaagcagagaagatgctttctaactattctaccatagcagatactcctgaaattcagagaattaagacaactcaacaaaacattagtgcggtattttataagaaagaagtgggagctggcactgcagtgaaagatagcccagagatcgaacgagtgaagaaaaatcagcagaatattagttcagtgaaatacaaagaagagattaaacatgcaacagccatttctgatcctccagaactaaagagagttaaagaaaaccagaagaacatcagcaatctccagtataaagagcaaaactacaaggccactccggtaagcatgaccccggagatagagagagtgaggcgaaaccaggagcagctgagtgcggtaaaatataagggagaacttcaacggggaactgcaatttctgatccaccagagctgaagagggcaaaagaaaaccagaaaaacatcagcaatgtttattacagaggtcagctgggaagagctaccactttaagtgtaactcctgaaatggaaagagtgaagaagaatcaagaaaatattagctcggtaaaatatacccaggaccataaacagatgaaaggtagaccaagtctgattttagatacacctgctatgagacatgttaaagaagcacaaaatcatatttcaatggtaaaataccatgaagattttgaaaaaacaaaggggagaggctttactcccgtcgtggacgatcctgtgacagagagagtgaggaagaacacccaggtggtcagcgatgctgcctataaaggggtccaccctcacatcgtggagatggacaggagacctggaatcattgttgacctcaaagtttggcgcacagatcctggctccatcttcgaccttgatcccctggaagacaatattcagtctagaagtctccatatgctctctgaaaaggcgagtcactataggcgacactggtctcgatcccattccagcagtactttcggtacaggtctcggagacgacaggtcagaaatctccgagatttaccctagcttttcatgctgcagtgaggtaacaagaccgtctgatgaaggagcacctgttcttcccggagcctatcagcaaagccattcccaaggctatggctacatgcaccagaccagtgtgtcatccatgagatcaatgcagcattcaccaaatctaaggacctaccgagccatgtacgattacagtgcccaggatgaagacgaggtctcctttagagacggcgactacatcgtcaacgtgcagcctattgacgatggctggatgtacggcacagtgcagagaacagggagaacaggaatgctcccagcgaattacattgagtttgttaattaattatttctccctgccctttgagctttattctaatgtatcccaaacctaatctttttaaaagatagaagatacttttaagacaacttggccattattttacaatgatgtatccttcctttgacaattagacacacaggtaccaggaagaaggaatgacctctgggctgaaaacagcagcattttcagtaattcctacaaacaaaaatctttgtgtctggacgcctggtgctgctaattgtgttcatggtttcctttgattggctattgaacccttctgggaaatgtatttttgtagactttaatagagaagttgattgtcccttaaatgtagcgtgtgtttgaaacttcttagctgtcactttggaatcaccccaagccaattctcttaactctgtaatgcagccaataatacaaacccgttttgcttttgagtcatgaggcaatttccaatattagtgaaaattgcccaatataataagtgtaaacagtggcagaaggacagtctggttaaaattatattgactggtggccttagggatctagaaacttctactaaacagagaaatttccttgttccctaggctgactggtatctatttatttctcatttgtaccaaggcatctcctactctccatttatattctatggacccaagtctatgctcagttccacagaatgtcaggaccaaataacttcacagctactctgcaaagggcaaattataatgtcattgatataatttccctagtagcatttaccctgttgcatgtcatgtagattcaagcttctgtaacataggcagctgcactgcgcgttcctattattgaagcaaaaagggtgactgatacctaaaagccctttcttcctctagtcgccagctcatcagaaaaacatactttgaaaagatgcttgagattttcctgctgcatcgcactctagtttggaaggatttacatcttaggaaataacatgtatactctagtaaataagcgatttaggtgttccattgaacagctttgattaacttaatgccaccattgatttcaaagtgaagaaaatgtaacagaagccagtgaagcaatggaagctggagtgtgactggaaaaatactcagcaaacaaagttaccaattccatacagagatgatctggtgtcttcttttggaaaatggtattcaaattctggaatggaaatctagccaccaaaacgggttaatcaaaagacgtccttttccgttttttttgcttttattttctaaatcatttttaagggaatgaaacaggaatgtcatcagagattttttagtacaggcccaagagcctgtactctaagaaagaaatttttgccatgtatgaattttcgaataagtgactttgcaggcttttgctagcccttgctggtgggtctggaaattacatccagagtctgcagtccaggtcaccaagccagcggcacccgtcggcaaccctgtgtttaacggattgtgccgtttactgtgacctgcaacggggtggcattcacttagggtctgacttcacagctatgacaaaaccgaaaaagcaaaactgcgaggaagtgctaagatgtacgggtcttggggatatctgccttatatgttatattcaaggaaattaacgaaacatcctgtgaaacatcgtttaaggaaacgtttactagtccaaaggccaaagctaatttatttccactttagaaaagttagcacatgcttttgaaaatctgtgatttcattttattaggctaaaagggtaaataggctttattacactgaagctgcatctatatgtcactgacataaagttgaaaaaataaatgcaggcaaataactagagacttcttttaagggggtttggctggttttctctcactgaaatggccagtcgtgattaaagtgataaaaccccatatctgttttggtatattgtacacaaacctacaaaaataaactgaacttgcaatatttttgcaaaaaaatctgtcgttaaaactgaggataaaatacctgctcaattttattttactaagtatatatttacatttcacccaggcaggccattttcttttgtgattataagaaagagtagttgttgattaaattttcagactaaatataggacaggtacaattttggataaatagcacatttataagaaccgcaatgaaaactgacttgaaataatgcttgtaatcaggaaagtaatttcatccaccgatttcaaaaccagattcactgagcataaaagtcaatacatatttgaggaataagtctcctaaaattttaagcttcacgtaataatgtttgcatagcaaaatatttctgcttcaagcctttaggaattaagatctgatcagaatttaactaaagggtagttgttttacaatgaagactaaaactgaacaagatgttgcatgctcttgaggccataatttggtagtgttggcagttgttaataaagcttgtcaggatgttaagcatctcaggagaaatattggaaaattatatgtataaaaccaaagtgctatttttaaaagcatcatttaaaaaaaaatgacatgcctgaacaacttttccactttccacgtgcttccctcccacctttggtttggcaacaggtatctcgtgcatgaagctgacagctaaagaagattttaaaaattgagttaaagatgactgtgtaaatgtccaagcacagagagcatgcacctgactttctaaagtttgatgtgttctcaagcctgacagaagcacaaggaacagtttgatacacttttaaaaggttctgaaaacaaagctgtatagggatcctctctctcttgagcaaagtatagcaacagaatatattgcttttgttgtaagcttttgtagtacatgtttttactaataattcttgttctctagaaagctttctatttctaacctatggcaaaatgaatccttcatgtcttcttgttattgtttacacacttgcagtgtagcccagtttgaaatatttatttggttatcaactgcccatggaggaggctcttgatgatcccaggtctcctcgacctccatacaccacacaggcatttgtaagcacagtttccacaagcaccttgtaggaatatggataagattagaccagcccctctctgtccactgggtttatttcttgaagaagatgcagatctggtttttccaatgtgccacagtctttccttatcctctccatgctgagcttgacaacactctgggaatgaggaacaagactttttctaaaaagatagtggaagttcaagggatgtacctcgttttcaggttcatccatctccagtggaatgttttcaataaaagatgaagaaaatgtgtgtgatctttaataacacatccctatagaaagtggataaaagatataccaaaactgtaatacagatatatacaaatataggtgcctttttgattactcttgtttgtctagtatgctcttggaaagaaaaccaagcaagcaagttgctgcctattctatagtaatattttattacacatgattgatatttttgtggtagggaagtgggatgctcctcagatattaaaggtgttagctgattgtattttatctctaaagatttagaactttagaaaatgccgacttcttccatctatttctgaaaggttctttgtggatttatatagagttgagctatataaacattaactttagatttgggatttaaaatgcctattgtaagatagaataattgtgaggctggattcactacacaagatgaacttcacttcataaattaattataccttagcgatttgcttctgataatctaaaagtggctagattgtggttgttttggttaaggtgatatggaggtgggagagcttttagttaagtaagaagctatgtaaactgacaaggatgctaaaataaaagtctctgaagtattccatgccttttggaccctttcctcgcaactaactgtcaactgttgatcaaaaaagtcaaggcattgtatgttgcttctgtggttattattctgtgatgcttagactacttgaacccataaacttggaagaatctttgagcaaattttctcagttgtctgtatgacttcagtatattcctgggaatgccataggattttttgtgcttgatacatggtatccagtttgcatagtatcacttctttgtaatccagttgctgttaagaatgatgtactttaaaggaaaagagaaaactgcatcacagtcccattctccagtgtccatgcaatgaattgctgagcatttaggaagcagcaccaagtctattacaggcatggtgtgaaacttgatgtttgacctgtgatcaaaattgaaccattgtacagtttggcttctgtttgcttcaaaatatgtagaattgtggttgatgattaatttgcgagactaactttgagagtgtaacagttttgaagaaaacattgaatgttttgcaaatgaaggggcttcacggaatgttacaatgttactaatataatttggcttttgttatgcaaattgttaacaccagctattaaaatatattttagtagaaatgctttaattcatatttttttcctctacactgtgaatctttaagccttggtggactagagcaacatcgtgctgcccaaaggactaacctatgcaaactagttcacattttagtggatgtcgcagttaatgtgtaataagacattatttcccctgcataatgtacaacagcattgaaatgacacattaagcctagcatcacattgtatagtacagtcactcacaaacccttcaaggctaccctaatcattaacattaatatttgtttaaaagcaaatcaccgatttatctattgaaactacttaaatgacggcaaaccaggaatgacagatggctgtgtcagcaatggctttaatgtgttccctgcaagtggtctcctatgatagaactgcgttctcaaatgcactctcttcagggtcttaatattctgtgttttctctctgtatttgtaaaacattataacacattaatttcctatctctacacatttggtttgcttaaataaatgcaggatataaaaaaaatggttcaaaaaaaaa

SEQ ID NO: 74010 - DNA, 3759 bp, Homo sapiens
gcctgatggaaacaagggtgaacctggtgtggttggtgctgtgggcactgctggtccatctggtcctagtggactcccaggagagaggggtgctgctggcataccaggagcaccacgagcaccatttctgccagagcaccagagacgtcagcatctcaagggcactgtggtatggaaaaggacgccacatgagtaaattttaaaaatataaatattttaaagggtaaaaatgagggtccctgtatttgaggatataaaagatgaaactgaagaagaaaagataggggaagaagaaaatgaagaagaccaggtcttctataagcctgttattgaagacttaagcatggaattggccagaaaatgcacggaactcattagcgatatccgttataaagaagagtttaaaaagtccaaggataagtgtacatttgtgactgacagtcctatgctaaaccatgtaaaaaatatcggtgcttttatttctgaggcaaaatacaaaggcaccattaaagctgacctttctaattctctttataagcggatgccagccacaattgacagtgtttttgcaggagaagttacacagctccagagtgaggtggcctacaagcagaaacatgatgctgccaaaggattctcagattatgcccacatgaaggagccccctgaggttaaacatgccatggaggtcaataaacaccagagtaatatttcttataggaaagacgtgcaggacacccacacgtacagtgcagaacttgaccgaccagacatcaagatggcaacccagatctctaagatcataagcaatgcagaatacaagaaaggacaaggaataatgaataaagagcccgctgtaattggaagaccagattttgaacatgccgtggaagcttctaaactttctagtcaaattaaatacaaagaaaaatttgataatgaaatgaaggataagaaacatcattacaatcctcttgaaagtgcttcttttaggcagaatcagcttgctgctacactggcgagcaatgtgaagtacaagaaagacattcaaaatatgcatgatccagtttcagatctcccaaatttgttgtttttagaccatgttttgaaagccagcaaaatgctcagcggccgagaatataaaaagctctttgaggaaaacaaaggaatgtatcattttgatgcagatgctgtggaacatctgcaccataaaggcaatgccgtcctccaaagtcaggtgaaatataaagaagaatatgagaaaaataagggaaagccaatgcttgaatttgttgagacaccatcatatcaagcttcaaaggaggctcaaaagatgcaaagtgaaaaagtttacaaagaggattttgagaaggagattaaaggaaggtcatcactggatttagacaagactccagaatttttacatgtaaagtacatcaccaaccttctgagggagaaagaatataaaaaagatttggaaaatgagataaaagggaaaggaatggaacttaattcagaagttcttgatatccaaagagcaaagcgagcctctgaaatggcaagtgagaaagaatacaagaaagacctggagtcaataattaaagggaaaggaatgcaagctggcactgacacccttgaaatgcagcatgccaagaaggctgcagagatagcgagtgagaaagactataaaagagatctggagactgaaattaaagggaaagggatgcaggtgagcacagacactcttgatgtccagagagctaagaaagcatccgagatggccagccagaaacaatacaagaaggacttagaaaatgaaattaaagggaaaggaatgcaagtgagcatggatatcccagatatccttcgagccaagaggacatctgaaatctatagccagagaaagtataaagatgaagcagagaagatgctttctaactattctaccatagcagatactcctgaaattcagagaattaagacaactcaacaaaacattagtgcggtattttataagaaagaagtgggagctggcactgcagtgaaagatagcccagagatcgaacgagtgaagaaaaatcagcagaatattagttcagtgaaatacaaagaagagattaaacatgcaacagccatttctgatcctccagaactaaagagagttaaagaaaaccagaagaacatcagcaatctccagtataaagagcaaaactacaaggccactccggtaagcatgaccccggagatagagagagtgaggcgaaaccaggagcagctgagtgcggtaaaatataagggagaacttcaacggggaactgcaatttctgatccaccagagctgaagagggcaaaagaaaaccagaaaaacatcagcaatgtttattacagaggtcagctgggaagagctaccactttaagtgtaactcctgaaatggaaagagtgaagaagaatcaagaaaatattagctcggtaaaatatacccaggaccataaacagatgaaaggtagaccaagtctgattttagatacacctgctatgagacatgttaaagaagcacaaaatcatatttcaatggtaaaataccatgaagattttgaaaaaacaaaggggagaggctttactcccgtcgtggacgatcctgtgacagagagagtgaggaagaacacccaggtggtcagcgatgctgcctataaaggggtccaccctcacatcgtggagatggacaggagacctggaatcattgttgacctcaaagtttggcgcacagatcctggctccatcttcgaccttgatcccctggaagacaatattcagtctagaagtctccatatgctctctgaaaaggcgagtcactataggcgacactggtctcgatcccattccagcagtactttcggtacaggtctcggagacgacaggtcagaaatctccgagatttaccctagcttttcatgctgcagtgaggtaacaagaccgtctgatgaaggagcacctgttcttcccggagcctatcagcaaagccattcccaaggctatggctacatgcaccagaccagtgtgtcatccatgagatcaatgcagcattcaccaaatctaaggacctaccgagccatgtacgattacagtgcccaggatgaagacgaggtctcctttagagacggcgactacatcgtcaacgtgcagcctattgacgatggctggatgtacggcacagtgcagagaacagggagaacaggaatgctcccagcgaattacattgagtttgttaattaattatttctccctgccctttgagctttattctaatgtatcccaaacctaatctttttaaaagatagaagatacttttaagacaacttggccattattttacaatgatgtatccttcctttgacaattagacacacaggtaccaggaagaaggaatgacctctgggctgaaaacagcagcattttcagtaattcctacaaacaaaaatctttgtgtctggacgcctggtgctgctaattgtgttcatggtttcctttgattggctattgaacccttctgggaaatgtatttttgtagactttaatagagaagttgattgtcccttaaatgtagcgtgtgtttgaaacttcttagctgtcactttggaatcaccccaagccaattctcttaactattcatgtagtaaggtgggaaccttcgcctgcggtagggccggcgttgttgggcctggccttcgggagcactctccgatccctcgttcttttcc

SEQ ID NO: 74011 - DNA, 510 bp, Homo sapiens
ctgcacttcagcctgggtgacagagcaagaccctgtcttaaataaataaataagtctcttagttgaattgattcatagtattctattttttgttctctgaaatgataggtttattacagaggtcagctgggaagagctaccactttaagtgtaactcctgaaatggaaagagtgaagaagaatcaagaaaatattagctcggtaaaatatacccaggaccataaacagatgaaaggtagaccaagtctgattttagatacacctgctatgagacatgttaaagaagcacaaaatcatatttcaatggtagggtccaaccagatcattcttaaaacatgctaaggaatgggcggatccagtgcacggatggcattacttcactattaatccgataactaacaaagcatggaaatgtggttggcttgtcttttgagggaggggcatttctaatcacactgaaatgcagtggaaacatttagtctaataaaatgatttttctcagtgaaaatt

SEQ ID NO: 74012 - DNA, 9111 bp, Homo sapiens
  misc_feature (2357)..(2357): n is a, c, g, or t
gcctgatggaaacaagggtgaacctggtgtggttggtgctgtgggcactgctggtccatctggtcctagtggactcccaggagagaggggtgctgctggcataccaggagcaccacgagcaccatttctgccagagcaccagagacgtcagcatctcaagggcactgtggtatggaaaaggacgccacatgagtaaattttaaaaatataaatattttaaagggtaaaaatgagggtccctgtatttgaggatataaaagatgaaactgaagaagaaaagataggggaagaagaaaatgaagaagaccaggtcttctataagcctgttattgaagacttaagcatggaattggccagaaaatgcacggaactcattagcgatatccgttataaagaagagtttaaaaagtccaaggataagtgtacatttgtgactgacagtcctatgctaaaccatgtaaaaaatatcggtgcttttatttctgaggcaaaatacaaaggcaccattaaagctgacctttctaattctctttataagcggatgccagccacaattgacagtgtttttgcaggagaagttacacagctccagagtgaggtggcctacaagcagaaacatgatgctgccaaaggattctcagattatgcccacatgaaggagccccctgaggttaaacatgccatggaggtcaataaacaccagagtaatatttcttataggaaagacgtgcaggacacccacacgtacagtgcagaacttgaccgaccagacatcaagatggcaacccagatctctaagatcataagcaatgcagaatacaagaaaggacaaggaataatgaataaagagcccgctgtaattggaagaccagattttgaacatgccgtggaagcttctaaactttctagtcaaattaaatacaaagaaaaatttgataatgaaatgaaggataagaaacatcattacaatcctcttgaaagtgcttcttttaggcagaatcagcttgctgctacactggcgagcaatgtgaagtacaagaaagacattcaaaatatgcatgatccagtttcagatctcccaaatttgttgtttttagaccatgttttgaaagccagcaaaatgctcagcggccgagaatataaaaagctctttgaggaaaacaaaggaatgtatcattttgatgcagatgctgtggaacatctgcaccataaaggcaatgccgtcctccaaagtcaggtgaaatataaagaagaatatgagaaaaataagggaaagccaatgcttgaatttgttgagacaccatcatatcaagcttcaaaggaggctcaaaagatgcaaagtgaaaaagtttacaaagaggattttgagaaggagattaaaggaaggtcatcactggatttagacaagactccagaatttttacatgtaaagtacatcaccaaccttctgagggagaaagaatataaaaaagatttggaaaatgagataaaagggaaaggaatggaacttaattcagaagttcttgatatccaaagagcaaagcgagcctctgaaatggcaagtgagaaagaatacaagaaagacctggagtcaataattaaagggaaaggaatgcaagctggcactgacacccttgaaatgcagcatgccaagaaggctgcagagatagcgagtgagaaagactataaaagagatctggagactgaaattaaagggaaagggatgcaggtgagcacagacactcttgatgtccagagagctaagaaagcatccgagatggccagccagaaacaatacaagaaggacttagaaaatgaaattaaagggaaaggaatgcaagtgagcatggatatcccagatatccttcgagccaagaggacatctgaaatctatagccagagaaagtataaagatgaagcagagaagatgctttctaactattctaccatagcagatactcctgaaattcagagaattaagacaactcaacaaaacattagtgcggtattttataagaaagaagtgggagctggcactgcagtgaaagatagcccagagatcgaacgagtgaagaaaaatcagcagaatattagttcagtgaaatacaaagaagagattaaacatgcaacagccatttctgatcctccagaactaaagagagttaaagaaaaccagaagaacatcagcaatctccagtataaagagcaaaactacaaggccactccggtaagcatgaccccggagatagagagagtgaggcgaaaccaggagcagctgagtgcggcaagtcgtttctgtttccttttatattttctcaaacataacatatttttatttaaaaatatgccctttgganggccattatccttagcaaactaacacaggaacgtaaaaccaaatactgcataataatgagagctaaatgatgagaatacatggacacatagaggggaataacagacaccggagcctgttggacgggagaggatgggaggagggagaggatccggaaaagtaactgttgagtactgggcttaatgccggggtgatgaagtcatctgtacaacaaactcccataacacaagttcacctgtgtaacaaacctgcacatgtaccgctgaacttaaaagttttaaaagaaaatgaatttgagcaacatgcaattatatggatgaatcatatcattataacatgaaaaagtgatatgtacatgcagcattaattctttgtaaatttaacaactgcaataataacgatgatgataaacggatatctccagatttaataaactatctaaaaatttaaaaaggaaaagtttacaccctctgcatttttggatgttccttttcacatttccttgttgaagggcatgaactgcgtgtccaggaaatttgggactgtgttgctgtaccttagctgtgtttgcttattcaagagatcttcattaagtacccaaatgtactgggcattgtcctggtcacccagacacaaagatgggtaaaatataagggagaacttcaacggggaactgcaatttctgatccaccagagctgaagagggcaaaagaaaaccagaaaaacatcagcaatgtttattacagaggtcagctgggaagagctaccactttaagtgtaactcctgaaatggaaagagtgaagaagaatcaagaaaatattagctcggtaaaatatacccaggaccataaacagatgaaaggtagaccaagtctgattttagatacacctgctatgagacatgttaaagaagcacaaaatcatatttcaatggtaaaataccatgaagattttgaaaaaacaaaggggagaggctttactcccgtcgtggacgatcctgtgacagagagagtgaggaagaacacccaggtggtcagcgatgctgcctataaaggggtccaccctcacatcgtggagatggacaggagacctggaatcattgttgacctcaaagtttggcgcacagatcctggctccatcttcgaccttgatcccctggaagacaatattcagtctagaagtctccatatgctctctgaaaaggcgagtcactataggcgacactggtctcgatcccattccagcagtactttcggtacaggtctcggagacgacaggtcagaaatctccgagatttaccctagcttttcatgctgcagtgaggtaacaagaccgtctgatgaaggagcacctgttcttcccggagcctatcagcaaagccattcccaaggctatggctacatgcaccagaccagtgtgtcatccatgagatcaatgcagcattcaccaaatctaaggacctaccgagccatgtacgattacagtgcccaggatgaagacgaggtctcctttagagacggcgactacatcgtcaacgtgcagcctattgacgatggctggatgtacggcacagtgcagagaacagggagaacaggaatgctcccagcgaattacattgagtttgttaattaattatttctccctgccctttgagctttattctaatgtatcccaaacctaatctttttaaaagatagaagatacttttaagacaacttggccattattttacaatgatgtatccttcctttgacaattagacacacaggtaccaggaagaaggaatgacctctgggctgaaaacagcagcattttcagtaattcctacaaacaaaaatctttgtgtctggacgcctggtgctgctaattgtgttcatggtttcctttgattggctattgaacccttctgggaaatgtatttttgtagactttaatagagaagttgattgtcccttaaatgtagcgtgtgtttgaaacttcttagctgtcactttggaatcaccccaagccaattctcttaactctgtaatgcagccaataatacaaacccgttttgcttttgagtcatgaggcaatttccaatattagtgaaaattgcccaatataataagtgtaaacagtggcagaaggacagtctggttaaaattatattgactggtggccttagggatctagaaacttctactaaacagagaaatttccttgttccctaggctgactggtatctatttatttctcatttgtaccaaggcatctcctactctccatttatattctatggacccaagtctatgctcagttccacagaatgtcaggaccaaataacttcacagctactctgcaaagggcaaattataatgtcattgatataatttccctagtagcatttaccctgttgcatgtcatgtagattcaagcttctgtaacataggcagctgcactgcgcgttcctattattgaagcaaaaagggtgactgatacctaaaagccctttcttcctctagtcgccagctcatcagaaaaacatactttgaaaagatgcttgagattttcctgctgcatcgcactctagtttggaaggatttacatcttaggaaataacatgtatactctagtaaataagcgatttaggtgttccattgaacagctttgattaacttaatgccaccattgatttcaaagtgaagaaaatgtaacagaagccagtgaagcaatggaagctggagtgtgactggaaaaatactcagcaaacaaagttaccaattccatacagagatgatctggtgtcttcttttggaaaatggtattcaaattctggaatggaaatctagccaccaaaacgggttaatcaaaagacgtccttttccgttttttttgcttttattttctaaatcatttttaagggaatgaaacaggaatgtcatcagagattttttagtacaggcccaagagcctgtactctaagaaagaaatttttgccatgtatgaattttcgaataagtgactttgcaggcttttgctagcccttgctggtgggtctggaaattacatccagagtctgcagtccaggtcaccaagccagcggcacccgtcggcaaccctgtgtttaacggattgtgccgtttactgtgacctgcaacggggtggcattcacttagggtctgacttcacagctatgacaaaaccgaaaaagcaaaactgcgaggaagtgctaagatgtacgggtcttggggatatctgccttatatgttatattcaaggaaattaacgaaacatcctgtgaaacatcgtttaaggaaacgtttactagtccaaaggccaaagctaatttatttccactttagaaaagttagcacatgcttttgaaaatctgtgatttcattttattaggctaaaagggtaaataggctttattacactgaagctgcatctatatgtcactgacataaagttgaaaaaataaatgcaggcaaataactagagacttcttttaagggggtttggctggttttctctcactgaaatggccagtcgtgattaaagtgataaaaccccatatctgttttggtatattgtacacaaacctacaaaaataaactgaacttgcaatatttttgcaaaaaaatctgtcgttaaaactgaggataaaatacctgctcaattttattttactaagtatatatttacatttcacccaggcaggccattttcttttgtgattataagaaagagtagttgttgattaaattttcagactaaatataggacaggtacaattttggataaatagcacatttataagaaccgcaatgaaaactgacttgaaataatgcttgtaatcaggaaagtaatttcatccaccgatttcaaaaccagattcactgagcataaaagtcaatacatatttgaggaataagtctcctaaaattttaagcttcacgtaataatgtttgcatagcaaaatatttctgcttcaagcctttaggaattaagatctgatcagaatttaactaaagggtagttgttttacaatgaagactaaaactgaacaagatgttgcatgctcttgaggccataatttggtagtgttggcagttgttaataaagcttgtcaggatgttaagcatctcaggagaaatattggaaaattatatgtataaaaccaaagtgctatttttaaaagcatcatttaaaaaaaaatgacatgcctgaacaacttttccactttccacgtgcttccctcccacctttggtttggcaacaggtatctcgtgcatgaagctgacagctaaagaagattttaaaaattgagttaaagatgactgtgtaaatgtccaagcacagagagcatgcacctgactttctaaagtttgatgtgttctcaagcctgacagaagcacaaggaacagtttgatacacttttaaaaggttctgaaaacaaagctgtatagggatcctctctctcttgagcaaagtatagcaacagaatatattgcttttgttgtaagcttttgtagtacatgtttttactaataattcttgttctctagaaagctttctatttctaacctatggcaaaatgaatccttcatgtcttcttgttattgtttacacacttgcagtgtagcccagtttgaaatatttatttggttatcaactgcccatggaggaggctcttgatgatcccaggtctcctcgacctccatacaccacacaggcatttgtaagcacagtttccacaagcaccttgtaggaatatggataagattagaccagcccctctctgtccactgggtttatttcttgaagaagatgcagatctggtttttccaatgtgccacagtctttccttatcctctccatgctgagcttgacaacactctgggaatgaggaacaagactttttctaaaaagatagtggaagttcaagggatgtacctcgttttcaggttcatccatctccagtggaatgttttcaataaaagatgaagaaaatgtgtgtgatctttaataacacatccctatagaaagtggataaaagatataccaaaactgtaatacagatatatacaaatataggtgcctttttgattactcttgtttgtctagtatgctcttggaaagaaaaccaagcaagcaagttgctgcctattctatagtaatattttattacacatgattgatatttttgtggtagggaagtgggatgctcctcagatattaaaggtgttagctgattgtattttatctctaaagatttagaactttagaaaatgccgacttcttccatctatttctgaaaggttctttgtggatttatatagagttgagctatataaacattaactttagatttgggatttaaaatgcctattgtaagatagaataattgtgaggctggattcactacacaagatgaacttcacttcataaattaattataccttagcgatttgcttctgataatctaaaagtggctagattgtggttgttttggttaaggtgatatggaggtgggagagcttttagttaagtaagaagctatgtaaactgacaaggatgctaaaataaaagtctctgaagtattccatgccttttggaccctttcctcgcaactaactgtcaactgttgatcaaaaaagtcaaggcattgtatgttgcttctgtggttattattctgtgatgcttagactacttgaacccataaacttggaagaatctttgagcaaattttctcagttgtctgtatgacttcagtatattcctgggaatgccataggattttttgtgcttgatacatggtatccagtttgcatagtatcacttctttgtaatccagttgctgttaagaatgatgtactttaaaggaaaagagaaaactgcatcacagtcccattctccagtgtccatgcaatgaattgctgagcatttaggaagcagcaccaagtctattacaggcatggtgtgaaacttgatgtttgacctgtgatcaaaattgaaccattgtacagtttggcttctgtttgcttcaaaatatgtagaattgtggttgatgattaatttgcgagactaactttgagagtgtaacagttttgaagaaaacattgaatgttttgcaaatgaaggggcttcacggaatgttacaatgttactaatataatttggcttttgttatgcaaattgttaacaccagctattaaaatatattttagtagaaatgctttaattcatatttttttcctctacactgtgaatctttaagccttggtggactagagcaacatcgtgctgcccaaaggactaacctatgcaaactagttcacattttagtggatgtcgcagttaatgtgtaataagacattatttcccctgcataatgtacaacagcattgaaatgacacattaagcctagcatcacattgtatagtacagtcactcacaaacccttcaaggctaccctaatcattaacattaatatttgtttaaaagcaaatcaccgatttatctattgaaactacttaaatgacggcaaaccaggaatgacagatggctgtgtcagcaatggctttaatgtgttccctgcaagtggtctcctatgatagaactgcgttctcaaatgcactctcttcagggtcttaatattctgtgttttctctctgtatttgtaaaacattataacacattaatttcctatctctacacatttggtttgcttaaataaatgcaggatataaaaaaaatggttcaaaaaaaaa

SEQ ID NO: 74013 - DNA, 7893 bp, Homo sapiens
  misc_feature (1139)..(1139): n is a, c, g, or t
ggatgaccctcaggtggtagaactacctaagaaaacatcatttttgttctgggaactcttgttcaaatctcttttcaatggtcactgatatttgctaactttaaaattatgtggtcttatttaacagaaagtttacaaagaggattttgagaaggagattaaaggaaggtcatcactggatttagacaagactccagaatttttacatgtaaagtacatcaccaaccttctgagggagaaagaatataaaaaagatttggaaaatgagataaaagggaaaggaatggaacttaattcagaagttcttgatatccaaagagcaaagcgagcctctgaaatggcaagtgagaaagaatacaagaaagacctggagtcaataattaaagggaaaggaatgcaagctggcactgacacccttgaaatgcagcatgccaagaaggctgcagagatagcgagtgagaaagactataaaagagatctggagactgaaattaaagggaaagggatgcaggtgagcacagacactcttgatgtccagagagctaagaaagcatccgagatggccagccagaaacaatacaagaaggacttagaaaatgaaattaaagggaaaggaatgcaagtgagcatggatatcccagatatccttcgagccaagaggacatctgaaatctatagccagagaaagtataaagatgaagcagagaagatgctttctaactattctaccatagcagatactcctgaaattcagagaattaagacaactcaacaaaacattagtgcggtattttataagaaagaagtgggagctggcactgcagtgaaagatagcccagagatcgaacgagtgaagaaaaatcagcagaatattagttcagtgaaatacaaagaagagattaaacatgcaacagccatttctgatcctccagaactaaagagagttaaagaaaaccagaagaacatcagcaatctccagtataaagagcaaaactacaaggccactccggtaagcatgaccccggagatagagagagtgaggcgaaaccaggagcagctgagtgcggcaagtcgtttctgtttccttttatattttctcaaacataacatatttttatttaaaaatatgccctttgganggccattatccttagcaaactaacacaggaacgtaaaaccaaatactgcataataatgagagctaaatgatgagaatacatggacacatagaggggaataacagacaccggagcctgttggacgggagaggatgggaggagggagaggatccggaaaagtaactgttgagtactgggcttaatgccggggtgatgaagtcatctgtacaacaaactcccataacacaagttcacctgtgtaacaaacctgcacatgtaccgctgaacttaaaagttttaaaagaaaatgaatttgagcaacatgcaattatatggatgaatcatatcattataacatgaaaaagtgatatgtacatgcagcattaattctttgtaaatttaacaactgcaataataacgatgatgataaacggatatctccagatttaataaactatctaaaaatttaaaaaggaaaagtttacaccctctgcatttttggatgttccttttcacatttccttgttgaagggcatgaactgcgtgtccaggaaatttgggactgtgttgctgtaccttagctgtgtttgcttattcaagagatcttcattaagtacccaaatgtactgggcattgtcctggtcacccagacacaaagatgggtaaaatataagggagaacttcaacggggaactgcaatttctgatccaccagagctgaagagggcaaaagaaaaccagaaaaacatcagcaatgtttattacagaggtcagctgggaagagctaccactttaagtgtaactcctgaaatggaaagagtgaagaagaatcaagaaaatattagctcggtaaaatatacccaggaccataaacagatgaaaggtagaccaagtctgattttagatacacctgctatgagacatgttaaagaagcacaaaatcatatttcaatggtaaaataccatgaagattttgaaaaaacaaaggggagaggctttactcccgtcgtggacgatcctgtgacagagagagtgaggaagaacacccaggtggtcagcgatgctgcctataaaggggtccaccctcacatcgtggagatggacaggagacctggaatcattgttgacctcaaagtttggcgcacagatcctggctccatcttcgaccttgatcccctggaagacaatattcagtctagaagtctccatatgctctctgaaaaggcgagtcactataggcgacactggtctcgatcccattccagcagtactttcggtacaggtctcggagacgacaggtcagaaatctccgagatttaccctagcttttcatgctgcagtgaggtaacaagaccgtctgatgaaggagcacctgttcttcccggagcctatcagcaaagccattcccaaggctatggctacatgcaccagaccagtgtgtcatccatgagatcaatgcagcattcaccaaatctaaggacctaccgagccatgtacgattacagtgcccaggatgaagacgaggtctcctttagagacggcgactacatcgtcaacgtgcagcctattgacgatggctggatgtacggcacagtgcagagaacagggagaacaggaatgctcccagcgaattacattgagtttgttaattaattatttctccctgccctttgagctttattctaatgtatcccaaacctaatctttttaaaagatagaagatacttttaagacaacttggccattattttacaatgatgtatccttcctttgacaattagacacacaggtaccaggaagaaggaatgacctctgggctgaaaacagcagcattttcagtaattcctacaaacaaaaatctttgtgtctggacgcctggtgctgctaattgtgttcatggtttcctttgattggctattgaacccttctgggaaatgtatttttgtagactttaatagagaagttgattgtcccttaaatgtagcgtgtgtttgaaacttcttagctgtcactttggaatcaccccaagccaattctcttaactctgtaatgcagccaataatacaaacccgttttgcttttgagtcatgaggcaatttccaatattagtgaaaattgcccaatataataagtgtaaacagtggcagaaggacagtctggttaaaattatattgactggtggccttagggatctagaaacttctactaaacagagaaatttccttgttccctaggctgactggtatctatttatttctcatttgtaccaaggcatctcctactctccatttatattctatggacccaagtctatgctcagttccacagaatgtcaggaccaaataacttcacagctactctgcaaagggcaaattataatgtcattgatataatttccctagtagcatttaccctgttgcatgtcatgtagattcaagcttctgtaacataggcagctgcactgcgcgttcctattattgaagcaaaaagggtgactgatacctaaaagccctttcttcctctagtcgccagctcatcagaaaaacatactttgaaaagatgcttgagattttcctgctgcatcgcactctagtttggaaggatttacatcttaggaaataacatgtatactctagtaaataagcgatttaggtgttccattgaacagctttgattaacttaatgccaccattgatttcaaagtgaagaaaatgtaacagaagccagtgaagcaatggaagctggagtgtgactggaaaaatactcagcaaacaaagttaccaattccatacagagatgatctggtgtcttcttttggaaaatggtattcaaattctggaatggaaatctagccaccaaaacgggttaatcaaaagacgtccttttccgttttttttgcttttattttctaaatcatttttaagggaatgaaacaggaatgtcatcagagattttttagtacaggcccaagagcctgtactctaagaaagaaatttttgccatgtatgaattttcgaataagtgactttgcaggcttttgctagcccttgctggtgggtctggaaattacatccagagtctgcagtccaggtcaccaagccagcggcacccgtcggcaaccctgtgtttaacggattgtgccgtttactgtgacctgcaacggggtggcattcacttagggtctgacttcacagctatgacaaaaccgaaaaagcaaaactgcgaggaagtgctaagatgtacgggtcttggggatatctgccttatatgttatattcaaggaaattaacgaaacatcctgtgaaacatcgtttaaggaaacgtttactagtccaaaggccaaagctaatttatttccactttagaaaagttagcacatgcttttgaaaatctgtgatttcattttattaggctaaaagggtaaataggctttattacactgaagctgcatctatatgtcactgacataaagttgaaaaaataaatgcaggcaaataactagagacttcttttaagggggtttggctggttttctctcactgaaatggccagtcgtgattaaagtgataaaaccccatatctgttttggtatattgtacacaaacctacaaaaataaactgaacttgcaatatttttgcaaaaaaatctgtcgttaaaactgaggataaaatacctgctcaattttattttactaagtatatatttacatttcacccaggcaggccattttcttttgtgattataagaaagagtagttgttgattaaattttcagactaaatataggacaggtacaattttggataaatagcacatttataagaaccgcaatgaaaactgacttgaaataatgcttgtaatcaggaaagtaatttcatccaccgatttcaaaaccagattcactgagcataaaagtcaatacatatttgaggaataagtctcctaaaattttaagcttcacgtaataatgtttgcatagcaaaatatttctgcttcaagcctttaggaattaagatctgatcagaatttaactaaagggtagttgttttacaatgaagactaaaactgaacaagatgttgcatgctcttgaggccataatttggtagtgttggcagttgttaataaagcttgtcaggatgttaagcatctcaggagaaatattggaaaattatatgtataaaaccaaagtgctatttttaaaagcatcatttaaaaaaaaatgacatgcctgaacaacttttccactttccacgtgcttccctcccacctttggtttggcaacaggtatctcgtgcatgaagctgacagctaaagaagattttaaaaattgagttaaagatgactgtgtaaatgtccaagcacagagagcatgcacctgactttctaaagtttgatgtgttctcaagcctgacagaagcacaaggaacagtttgatacacttttaaaaggttctgaaaacaaagctgtatagggatcctctctctcttgagcaaagtatagcaacagaatatattgcttttgttgtaagcttttgtagtacatgtttttactaataattcttgttctctagaaagctttctatttctaacctatggcaaaatgaatccttcatgtcttcttgttattgtttacacacttgcagtgtagcccagtttgaaatatttatttggttatcaactgcccatggaggaggctcttgatgatcccaggtctcctcgacctccatacaccacacaggcatttgtaagcacagtttccacaagcaccttgtaggaatatggataagattagaccagcccctctctgtccactgggtttatttcttgaagaagatgcagatctggtttttccaatgtgccacagtctttccttatcctctccatgctgagcttgacaacactctgggaatgaggaacaagactttttctaaaaagatagtggaagttcaagggatgtacctcgttttcaggttcatccatctccagtggaatgttttcaataaaagatgaagaaaatgtgtgtgatctttaataacacatccctatagaaagtggataaaagatataccaaaactgtaatacagatatatacaaatataggtgcctttttgattactcttgtttgtctagtatgctcttggaaagaaaaccaagcaagcaagttgctgcctattctatagtaatattttattacacatgattgatatttttgtggtagggaagtgggatgctcctcagatattaaaggtgttagctgattgtattttatctctaaagatttagaactttagaaaatgccgacttcttccatctatttctgaaaggttctttgtggatttatatagagttgagctatataaacattaactttagatttgggatttaaaatgcctattgtaagatagaataattgtgaggctggattcactacacaagatgaacttcacttcataaattaattataccttagcgatttgcttctgataatctaaaagtggctagattgtggttgttttggttaaggtgatatggaggtgggagagcttttagttaagtaagaagctatgtaaactgacaaggatgctaaaataaaagtctctgaagtattccatgccttttggaccctttcctcgcaactaactgtcaactgttgatcaaaaaagtcaaggcattgtatgttgcttctgtggttattattctgtgatgcttagactacttgaacccataaacttggaagaatctttgagcaaattttctcagttgtctgtatgacttcagtatattcctgggaatgccataggattttttgtgcttgatacatggtatccagtttgcatagtatcacttctttgtaatccagttgctgttaagaatgatgtactttaaaggaaaagagaaaactgcatcacagtcccattctccagtgtccatgcaatgaattgctgagcatttaggaagcagcaccaagtctattacaggcatggtgtgaaacttgatgtttgacctgtgatcaaaattgaaccattgtacagtttggcttctgtttgcttcaaaatatgtagaattgtggttgatgattaatttgcgagactaactttgagagtgtaacagttttgaagaaaacattgaatgttttgcaaatgaaggggcttcacggaatgttacaatgttactaatataatttggcttttgttatgcaaattgttaacaccagctattaaaatatattttagtagaaatgctttaattcatatttttttcctctacactgtgaatctttaagccttggtggactagagcaacatcgtgctgcccaaaggactaacctatgcaaactagttcacattttagtggatgtcgcagttaatgtgtaataagacattatttcccctgcataatgtacaacagcattgaaatgacacattaagcctagcatcacattgtatagtacagtcactcacaaacccttcaaggctaccctaatcattaacattaatatttgtttaaaagcaaatcaccgatttatctattgaaactacttaaatgacggcaaaccaggaatgacagatggctgtgtcagcaatggctttaatgtgttccctgcaagtggtctcctatgatagaactgcgttctcaaatgcactctcttcagggtcttaatattctgtgttttctctctgtatttgtaaaacattataacacattaatttcctatctctacacatttggtttgcttaaataaatgcaggatataaaaaaaatggttcaaaaaaaaa

SEQ ID NO: 74014 - DNA, 5966 bp, Homo sapiens
gccaccgccggcccccgggaagccgcgatcatgaacccccagtgcgcccgttgcggaaaagtcgtgtatcccaccgagaaagtcaactgcctggataagtattggcataaaggatgtttccattgtgaggtctgcaagatggcactcaacatgaacaactacaaaggctatgaaaagaagccctattgtaatgcacactacccgaagcagtccttcaccacggtggcagatacacctgaaaatcttcgcctgaagcagcaaagtgaattgcagagtcaggtcaagtacaaaagagattttgaagaaagcaaagggaggggcttcagcatcgtcacggacactcctgagctacagagactgaagaggactcaggagcaaatcagtaatgtaaaataccatgaagattttgaaaaaacaaaggggagaggctttactcccgtcgtggacgatcctgtgacagagagagtgaggaagaacacccaggtggtcagcgatgctgcctataaaggggtccaccctcacatcgtggagatggacaggagacctggaatcattgttgcacctgttcttcccggagcctatcagcaaagccattcccaaggctatggctacatgcaccagaccagtgtgtcatccatgagatcaatgcagcattcaccaaatctaaggacctaccgagccatgtacgattacagtgcccaggatgaagacgaggtctcctttagagacggcgactacatcgtcaacgtgcagcctattgacgatggctggatgtacggcacagtgcagagaacagggagaacaggaatgctcccagcgaattacattgagtttgttaattaattatttctccctgccctttgagctttattctaatgtatcccaaacctaatctttttaaaagatagaagatacttttaagacaacttggccattattttacaatgatgtatccttcctttgacaattagacacacaggtaccaggaagaaggaatgacctctgggctgaaaacagcagcattttcagtaattcctacaaacaaaaatctttgtgtctggacgcctggtgctgctaattgtgttcatggtttcctttgattggctattgaacccttctgggaaatgtatttttgtagactttaatagagaagttgattgtcccttaaatgtagcgtgtgtttgaaacttcttagctgtcactttggaatcaccccaagccaattctcttaactctgtaatgcagccaataatacaaacccgttttgcttttgagtcatgaggcaatttccaatattagtgaaaattgcccaatataataagtgtaaacagtggcagaaggacagtctggttaaaattatattgactggtggccttagggatctagaaacttctactaaacagagaaatttccttgttccctaggctgactggtatctatttatttctcatttgtaccaaggcatctcctactctccatttatattctatggacccaagtctatgctcagttccacagaatgtcaggaccaaataacttcacagctactctgcaaagggcaaattataatgtcattgatataatttccctagtagcatttaccctgttgcatgtcatgtagattcaagcttctgtaacataggcagctgcactgcgcgttcctattattgaagcaaaaagggtgactgatacctaaaagccctttcttcctctagtcgccagctcatcagaaaaacatactttgaaaagatgcttgagattttcctgctgcatcgcactctagtttggaaggatttacatcttaggaaataacatgtatactctagtaaataagcgatttaggtgttccattgaacagctttgattaacttaatgccaccattgatttcaaagtgaagaaaatgtaacagaagccagtgaagcaatggaagctggagtgtgactggaaaaatactcagcaaacaaagttaccaattccatacagagatgatctggtgtcttcttttggaaaatggtattcaaattctggaatggaaatctagccaccaaaacgggttaatcaaaagacgtccttttccgttttttttgcttttattttctaaatcatttttaagggaatgaaacaggaatgtcatcagagattttttagtacaggcccaagagcctgtactctaagaaagaaatttttgccatgtatgaattttcgaataagtgactttgcaggcttttgctagcccttgctggtgggtctggaaattacatccagagtctgcagtccaggtcaccaagccagcggcacccgtcggcaaccctgtgtttaacggattgtgccgtttactgtgacctgcaacggggtggcattcacttagggtctgacttcacagctatgacaaaaccgaaaaagcaaaactgcgaggaagtgctaagatgtacgggtcttggggatatctgccttatatgttatattcaaggaaattaacgaaacatcctgtgaaacatcgtttaaggaaacgtttactagtccaaaggccaaagctaatttatttccactttagaaaagttagcacatgcttttgaaaatctgtgatttcattttattaggctaaaagggtaaataggctttattacactgaagctgcatctatatgtcactgacataaagttgaaaaaataaatgcaggcaaataactagagacttcttttaagggggtttggctggttttctctcactgaaatggccagtcgtgattaaagtgataaaaccccatatctgttttggtatattgtacacaaacctacaaaaataaactgaacttgcaatatttttgcaaaaaaatctgtcgttaaaactgaggataaaatacctgctcaattttattttactaagtatatatttacatttcacccaggcaggccattttcttttgtgattataagaaagagtagttgttgattaaattttcagactaaatataggacaggtacaattttggataaatagcacatttataagaaccgcaatgaaaactgacttgaaataatgcttgtaatcaggaaagtaatttcatccaccgatttcaaaaccagattcactgagcataaaagtcaatacatatttgaggaataagtctcctaaaattttaagcttcacgtaataatgtttgcatagcaaaatatttctgcttcaagcctttaggaattaagatctgatcagaatttaactaaagggtagttgttttacaatgaagactaaaactgaacaagatgttgcatgctcttgaggccataatttggtagtgttggcagttgttaataaagcttgtcaggatgttaagcatctcaggagaaatattggaaaattatatgtataaaaccaaagtgctatttttaaaagcatcatttaaaaaaaaatgacatgcctgaacaacttttccactttccacgtgcttccctcccacctttggtttggcaacaggtatctcgtgcatgaagctgacagctaaagaagattttaaaaattgagttaaagatgactgtgtaaatgtccaagcacagagagcatgcacctgactttctaaagtttgatgtgttctcaagcctgacagaagcacaaggaacagtttgatacacttttaaaaggttctgaaaacaaagctgtatagggatcctctctctcttgagcaaagtatagcaacagaatatattgcttttgttgtaagcttttgtagtacatgtttttactaataattcttgttctctagaaagctttctatttctaacctatggcaaaatgaatccttcatgtcttcttgttattgtttacacacttgcagtgtagcccagtttgaaatatttatttggttatcaactgcccatggaggaggctcttgatgatcccaggtctcctcgacctccatacaccacacaggcatttgtaagcacagtttccacaagcaccttgtaggaatatggataagattagaccagcccctctctgtccactgggtttatttcttgaagaagatgcagatctggtttttccaatgtgccacagtctttccttatcctctccatgctgagcttgacaacactctgggaatgaggaacaagactttttctaaaaagatagtggaagttcaagggatgtacctcgttttcaggttcatccatctccagtggaatgttttcaataaaagatgaagaaaatgtgtgtgatctttaataacacatccctatagaaagtggataaaagatataccaaaactgtaatacagatatatacaaatataggtgcctttttgattactcttgtttgtctagtatgctcttggaaagaaaaccaagcaagcaagttgctgcctattctatagtaatattttattacacatgattgatatttttgtggtagggaagtgggatgctcctcagatattaaaggtgttagctgattgtattttatctctaaagatttagaactttagaaaatgccgacttcttccatctatttctgaaaggttctttgtggatttatatagagttgagctatataaacattaactttagatttgggatttaaaatgcctattgtaagatagaataattgtgaggctggattcactacacaagatgaacttcacttcataaattaattataccttagcgatttgcttctgataatctaaaagtggctagattgtggttgttttggttaaggtgatatggaggtgggagagcttttagttaagtaagaagctatgtaaactgacaaggatgctaaaataaaagtctctgaagtattccatgccttttggaccctttcctcgcaactaactgtcaactgttgatcaaaaaagtcaaggcattgtatgttgcttctgtggttattattctgtgatgcttagactacttgaacccataaacttggaagaatctttgagcaaattttctcagttgtctgtatgacttcagtatattcctgggaatgccataggattttttgtgcttgatacatggtatccagtttgcatagtatcacttctttgtaatccagttgctgttaagaatgatgtactttaaaggaaaagagaaaactgcatcacagtcccattctccagtgtccatgcaatgaattgctgagcatttaggaagcagcaccaagtctattacaggcatggtgtgaaacttgatgtttgacctgtgatcaaaattgaaccattgtacagtttggcttctgtttgcttcaaaatatgtagaattgtggttgatgattaatttgcgagactaactttgagagtgtaacagttttgaagaaaacattgaatgttttgcaaatgaaggggcttcacggaatgttacaatgttactaatataatttggcttttgttatgcaaattgttaacaccagctattaaaatatattttagtagaaatgctttaattcatatttttttcctctacactgtgaatctttaagccttggtggactagagcaacatcgtgctgcccaaaggactaacctatgcaaactagttcacattttagtggatgtcgcagttaatgtgtaataagacattatttcccctgcataatgtacaacagcattgaaatgacacattaagcctagcatcacattgtatagtacagtcactcacaaacccttcaaggctaccctaatcattaacattaatatttgtttaaaagcaaatcaccgatttatctattgaaactacttaaatgacggcaaaccaggaatgacagatggctgtgtcagcaatggctttaatgtgttccctgcaagtggtctcctatgatagaactgcgttctcaaatgcactctcttcagggtcttaatattctgtgttttctctctgtatttgtaaaacattataacacattaatttcctatctctacacatttggtttgcttaaataaatgcaggatataaaaaaaatggttcaaaaaaaaa

SEQ ID NO: 74015 - DNA, 8570 bp, Homo sapiens
  misc_feature (2357)..(2357): n is a, c, g, or t
gcctgatggaaacaagggtgaacctggtgtggttggtgctgtgggcactgctggtccatctggtcctagtggactcccaggagagaggggtgctgctggcataccaggagcaccacgagcaccatttctgccagagcaccagagacgtcagcatctcaagggcactgtggtatggaaaaggacgccacatgagtaaattttaaaaatataaatattttaaagggtaaaaatgagggtccctgtatttgaggatataaaagatgaaactgaagaagaaaagataggggaagaagaaaatgaagaagaccaggtcttctataagcctgttattgaagacttaagcatggaattggccagaaaatgcacggaactcattagcgatatccgttataaagaagagtttaaaaagtccaaggataagtgtacatttgtgactgacagtcctatgctaaaccatgtaaaaaatatcggtgcttttatttctgaggcaaaatacaaaggcaccattaaagctgacctttctaattctctttataagcggatgccagccacaattgacagtgtttttgcaggagaagttacacagctccagagtgaggtggcctacaagcagaaacatgatgctgccaaaggattctcagattatgcccacatgaaggagccccctgaggttaaacatgccatggaggtcaataaacaccagagtaatatttcttataggaaagacgtgcaggacacccacacgtacagtgcagaacttgaccgaccagacatcaagatggcaacccagatctctaagatcataagcaatgcagaatacaagaaaggacaaggaataatgaataaagagcccgctgtaattggaagaccagattttgaacatgccgtggaagcttctaaactttctagtcaaattaaatacaaagaaaaatttgataatgaaatgaaggataagaaacatcattacaatcctcttgaaagtgcttcttttaggcagaatcagcttgctgctacactggcgagcaatgtgaagtacaagaaagacattcaaaatatgcatgatccagtttcagatctcccaaatttgttgtttttagaccatgttttgaaagccagcaaaatgctcagcggccgagaatataaaaagctctttgaggaaaacaaaggaatgtatcattttgatgcagatgctgtggaacatctgcaccataaaggcaatgccgtcctccaaagtcaggtgaaatataaagaagaatatgagaaaaataagggaaagccaatgcttgaatttgttgagacaccatcatatcaagcttcaaaggaggctcaaaagatgcaaagtgaaaaagtttacaaagaggattttgagaaggagattaaaggaaggtcatcactggatttagacaagactccagaatttttacatgtaaagtacatcaccaaccttctgagggagaaagaatataaaaaagatttggaaaatgagataaaagggaaaggaatggaacttaattcagaagttcttgatatccaaagagcaaagcgagcctctgaaatggcaagtgagaaagaatacaagaaagacctggagtcaataattaaagggaaaggaatgcaagctggcactgacacccttgaaatgcagcatgccaagaaggctgcagagatagcgagtgagaaagactataaaagagatctggagactgaaattaaagggaaagggatgcaggtgagcacagacactcttgatgtccagagagctaagaaagcatccgagatggccagccagaaacaatacaagaaggacttagaaaatgaaattaaagggaaaggaatgcaagtgagcatggatatcccagatatccttcgagccaagaggacatctgaaatctatagccagagaaagtataaagatgaagcagagaagatgctttctaactattctaccatagcagatactcctgaaattcagagaattaagacaactcaacaaaacattagtgcggtattttataagaaagaagtgggagctggcactgcagtgaaagatagcccagagatcgaacgagtgaagaaaaatcagcagaatattagttcagtgaaatacaaagaagagattaaacatgcaacagccatttctgatcctccagaactaaagagagttaaagaaaaccagaagaacatcagcaatctccagtataaagagcaaaactacaaggccactccggtaagcatgaccccggagatagagagagtgaggcgaaaccaggagcagctgagtgcggcaagtcgtttctgtttccttttatattttctcaaacataacatatttttatttaaaaatatgccctttgganggccattatccttagcaaactaacacaggaacgtaaaaccaaatactgcataataatgagagctaaatgatgagaatacatggacacatagaggggaataacagacaccggagcctgttggacgggagaggatgggaggagggagaggatccggaaaagtaactgttgagtactgggcttaatgccggggtgatgaagtcatctgtacaacaaactcccataacacaagttcacctgtgtaacaaacctgcacatgtaccgctgaacttaaaagttttaaaagaaaatgaatttgagcaacatgcaattatatggatgaatcatatcattataacatgaaaaagtgatatgtacatgcagcattaattctttgtaaatttaacaactgcaataataacgatgatgataaacggatatctccagatttaataaactatctaaaaatttaaaaaggaaaagtttacaccctctgcatttttggatgttccttttcacatttccttgttgaagggcatgaactgcgtgtccaggaaatttgggactgtgttgctgtaccttagctgtgtttgcttattcaagagatcttcattaagtacccaaatgtactgggcattgtcctggtcacccagacacaaagatgggtaaaatataagggagaacttcaacggggaactgcaatttctgatccaccagagctgaagagggcaaaagaaaaccagaaaaacatcagcaatgtttattacagaggtcagctgggaagagctaccactttaagtgtaactcctgaaatggaaagagtgaagaagaatcaagaaaatattagctcggtaaaatatacccaggaccataaacagatgaaaggtagaccaagtctgattttagatacacctgctatgagacatgttaaagaagcacaaaatcatatttcaatggtaaaataccatgaagattttgaaaaaacaaaggggagaggctttactcccgtcgtggacgatcctgtgacagagagagtgaggaagaacacccaggtggtcagcgatgctgcctataaaggggtccaccctcacatcgtggagatggacaggagacctggaatcattgttgacctcaaagtttggcgcacagatcctggctccatcttcgaccttgatcccctggaagacaatattcagtctagaagtctccatatgctctctgaaaaggcgagtcactataggcgacactggtctcgatcccattccagcagtactttcggtacaggtctcggagacgacaggtcagaaatctccgagatttaccctagcttttcatgctgcagtgaggtaacaagaccgtctgatgaaggagcacctgttcttcccggagcctatcagcaaagccattcccaaggctatggctacatgcaccagaccagtgtgtcatccatgagatcaatgcagcattcaccaaatctaaggacctaccgagccatgtacgattacagtgcccaggatgaagacgaggtctcctttagagacggcgactacatcgtcaacgtgcagcctattgacgatggctggatgtacggcacagtgcagagaacagggagaacaggaatgctcccagcgaattacattgagtttgttaattaattatttctccctgccctttgagctttattctaatgtatcccaaacctaatctttttaaaagatagaagatacttttaagacaacttggccattattttacaatgatgtatccttcctttgacaattagacacacaggtaccaggaagaaggaatgacctctgggctgaaaacagcagcattttcagtaattcctacaaacaaaaatctttgtgtctggacgcctggtgctgctaattgtgttcatggtttcctttgattggctattgaacccttctgggaaatgtatttttgtagactttaatagagaagttgattgtcccttaaatgtagcgtgtgtttgaaacttcttagctgtcactttggaatcaccccaagccaattctcttaactctgtaatgcagccaataatacaaacccgttttgcttttgagtcatgaggcaatttccaatattagtgaaaattgcccaatataataagtgtaaacagtggcagaaggacagtctggttaaaattatattgactggtggccttagggatctagaaacttctactaaacagagaaatttccttgttccctaggctgactggtatctatttatttctcatttgtaccaaggcatctcctactctccatttatattctatggacccaagtctatgctcagttccacagaatgtcaggaccaaataacttcacagctactctgcaaagggcaaattataatgtcattgatataatttccctagtagcatttaccctgttgcatgtcatgtagattcaagcttctgtaacataggcagctgcactgcgcgttcctattattgaagcaaaaagggtgactgatacctaaaagccctttcttcctctagtcgccagctcatcagaaaaacatactttgaaaagatgcttgagattttcctgctgcatcgcactctagtttggaaggatttacatcttaggaaataacatgtatactctagtaaataagcgatttaggtgttccattgaacagctttgattaacttaatgccaccattgatttcaaagtgaagaaaatgtaacagaagccagtgaagcaatggaagctggagtgtgactggaaaaatactcagcaaacaaagttaccaattccatacagagatgatctggtgtcttcttttggaaaatggtattcaaattctggaatggaaatctagccaccaaaacgggttaatcaaaagacgtccttttccgttttttttgcttttattttctaaatcatttttaagggaatgaaacaggaatgtcatcagagattttttagtacaggcccaagagcctgtactctaagaaagaaatttttgccatgtatgaattttcgaataagtgactttgcaggcttttgctagcccttgctggtgggtctggaaattacatccagagtctgcagtccaggtcaccaagccagcggcacccgtcggcaaccctgtgtttaacggattgtgccgtttactgtgacctgcaacggggtggcattcacttagggtctgacttcacagctatgacaaaaccgaaaaagcaaaactgcgaggaagtgctaagatgtacgggtcttggggatatctgccttatatgttatattcaaggaaattaacgaaacatcctgtgaaacatcgtttaaggaaacgtttactagtccaaaggccaaagctaatttatttccactttagaaaagttagcacatgcttttgaaaatctgtgatttcattttattaggctaaaagggtaaataggctttattacactgaagctgcatctatatgtcactgacataaagttgaaaaaataaatgcaggcaaataactagagacttcttttaagggggtttggctggttttctctcactgaaatggccagtcgtgattaaagtgataaaaccccatatctgttttggtatattgtacacaaacctacaaaaataaactgaacttgcaatatttttgcaaaaaaatctgtcgttaaaactgaggataaaatacctgctcaattttattttactaagtatatatttacatttcacccaggcaggccattttcttttgtgattataagaaagagtagttgttgattaaattttcagactaaatataggacaggtacaattttggataaatagcacatttataagaaccgcaatgaaaactgacttgaaataatgcttgtaatcaggaaagtaatttcatccaccgatttcaaaaccagattcactgagcataaaagtcaatacatatttgaggaataagtctcctaaaattttaagcttcacgtaataatgtttgcatagcaaaatatttctgcttcaagcctttaggaattaagatctgatcagaatttaactaaagggtagttgttttacaatgaagactaaaactgaacaagatgttgcatgctcttgaggccataatttggtagtgttggcagttgttaataaagcttgtcaggatgttaagcatctcaggagaaatattggaaaattatatgtataaaaccaaagtgctatttttaaaagcatcatttaaaaaaaaatgacatgcctgaacaacttttccactttccacgtgcttccctcccacctttggtttggcaacaggtatctcgtgcatgaagctgacagctaaagaagattttaaaaattgagttaaagatgactgtgtaaatgtccaagcacagagagcatgcacctgactttctaaagtttgatgtgttctcaagcctgacagaagcacaaggaacagtttgatacacttttaaaaggttctgaaaacaaagctgtatagggatcctctctctcttgagcaaagtatagcaacagaatatattgcttttgttgtaagcttttgtagtacatgtttttactaataattcttgttctctagaaagctttctatttctaacctatggcaaaatgaatccttcatgtcttcttgttattgtttacacacttgcagtgtagcccagtttgaaatatttatttggttatcaactgcccatggaggaggctcttgatgatcccaggtctcctcgacctccatacaccacacaggcatttgtaagcacagtttccacaagcaccttgtaggaatatggataagattagaccagcccctctctgtccactgggtttatttcttgaagaagatgcagatctggtttttccaatgtgccacagtctttccttatcctctccatgctgagcttgacaacactctgggaatgaggaacaagactttttctaaaaagatagtggaagttcaagggatgtacctcgttttcaggttcatccatctccagtggaatgttttcaataaaagatgaagaaaatgtgtgtgatctttaataacacatccctatagaaagtggataaaagatataccaaaactgtaatacagatatatacaaatataggtgcctttttgattactcttgtttgtctagtatgctcttggaaagaaaaccaagcaagcaagttgctgcctattctatagtaatattttattacacatgattgatatttttgtggtagggaagtgggatgctcctcagatattaaaggtgttagctgattgtattttatctctaaagatttagaactttagaaaatgccgacttcttccatctatttctgaaaggttctttgtggatttatatagagttgagctatataaacattaactttagatttgggatttaaaatgcctattgtaagatagaataattgtgaggctggattcactacacaagatgaacttcacttcataaattaattataccttagcgatttgcttctgataatctaaaagtggctagattgtggttgttttggttaaggtgatatggaggtgggagagcttttagttaagtaagaagctatgtaaactgacaaggatgctaaaataaaagtctctgaagtattccatgccttttggaccctttcctcgcaactaactgtcaactgttgatcaaaaaagtcaaggcattgtatgttgcttctgtggttattattctgtgatgcttagactacttgaacccataaacttggaagaatctttgagcaaattttctcagttgtctgtatgacttcagtatattcctgggaatgccataggattttttgtgcttgatacatggtatccagtttgcatagtatcacttctttgtaatccagttgctgttaagaatgatgtactttaaaggaaaagagaaaactgcatcacagtcccattctccagtgtccatgcaatgaattgctgagcatttaggaagcagcaccaagtctattacaggcatggtgtgaaacttgatgtttgacctgtgatcaaaattgaaccattgtacagtttggcttctgtttgcttcaaaatatgtagaattgtggttgatgattaatttgcgagactaactttgagagtgtaacagttttgaagaaaacattgaatgttttgcaaatgaaggggcttcacggaatgttacaatgttactaatataatttggcttttgttatgcaaattgttaacaccagctattaaaatatattttagta

SEQ ID NO: 74016 - DNA, 4038 bp, Homo sapiens
  misc_feature (2357)..(2357): n is a, c, g, or t
gcctgatggaaacaagggtgaacctggtgtggttggtgctgtgggcactgctggtccatctggtcctagtggactcccaggagagaggggtgctgctggcataccaggagcaccacgagcaccatttctgccagagcaccagagacgtcagcatctcaagggcactgtggtatggaaaaggacgccacatgagtaaattttaaaaatataaatattttaaagggtaaaaatgagggtccctgtatttgaggatataaaagatgaaactgaagaagaaaagataggggaagaagaaaatgaagaagaccaggtcttctataagcctgttattgaagacttaagcatggaattggccagaaaatgcacggaactcattagcgatatccgttataaagaagagtttaaaaagtccaaggataagtgtacatttgtgactgacagtcctatgctaaaccatgtaaaaaatatcggtgcttttatttctgaggcaaaatacaaaggcaccattaaagctgacctttctaattctctttataagcggatgccagccacaattgacagtgtttttgcaggagaagttacacagctccagagtgaggtggcctacaagcagaaacatgatgctgccaaaggattctcagattatgcccacatgaaggagccccctgaggttaaacatgccatggaggtcaataaacaccagagtaatatttcttataggaaagacgtgcaggacacccacacgtacagtgcagaacttgaccgaccagacatcaagatggcaacccagatctctaagatcataagcaatgcagaatacaagaaaggacaaggaataatgaataaagagcccgctgtaattggaagaccagattttgaacatgccgtggaagcttctaaactttctagtcaaattaaatacaaagaaaaatttgataatgaaatgaaggataagaaacatcattacaatcctcttgaaagtgcttcttttaggcagaatcagcttgctgctacactggcgagcaatgtgaagtacaagaaagacattcaaaatatgcatgatccagtttcagatctcccaaatttgttgtttttagaccatgttttgaaagccagcaaaatgctcagcggccgagaatataaaaagctctttgaggaaaacaaaggaatgtatcattttgatgcagatgctgtggaacatctgcaccataaaggcaatgccgtcctccaaagtcaggtgaaatataaagaagaatatgagaaaaataagggaaagccaatgcttgaatttgttgagacaccatcatatcaagcttcaaaggaggctcaaaagatgcaaagtgaaaaagtttacaaagaggattttgagaaggagattaaaggaaggtcatcactggatttagacaagactccagaatttttacatgtaaagtacatcaccaaccttctgagggagaaagaatataaaaaagatttggaaaatgagataaaagggaaaggaatggaacttaattcagaagttcttgatatccaaagagcaaagcgagcctctgaaatggcaagtgagaaagaatacaagaaagacctggagtcaataattaaagggaaaggaatgcaagctggcactgacacccttgaaatgcagcatgccaagaaggctgcagagatagcgagtgagaaagactataaaagagatctggagactgaaattaaagggaaagggatgcaggtgagcacagacactcttgatgtccagagagctaagaaagcatccgagatggccagccagaaacaatacaagaaggacttagaaaatgaaattaaagggaaaggaatgcaagtgagcatggatatcccagatatccttcgagccaagaggacatctgaaatctatagccagagaaagtataaagatgaagcagagaagatgctttctaactattctaccatagcagatactcctgaaattcagagaattaagacaactcaacaaaacattagtgcggtattttataagaaagaagtgggagctggcactgcagtgaaagatagcccagagatcgaacgagtgaagaaaaatcagcagaatattagttcagtgaaatacaaagaagagattaaacatgcaacagccatttctgatcctccagaactaaagagagttaaagaaaaccagaagaacatcagcaatctccagtataaagagcaaaactacaaggccactccggtaagcatgaccccggagatagagagagtgaggcgaaaccaggagcagctgagtgcggcaagtcgtttctgtttccttttatattttctcaaacataacatatttttatttaaaaatatgccctttgganggccattatccttagcaaactaacacaggaacgtaaaaccaaatactgcataataatgagagctaaatgatgagaatacatggacacatagaggggaataacagacaccggagcctgttggacgggagaggatgggaggagggagaggatccggaaaagtaactgttgagtactgggcttaatgccggggtgatgaagtcatctgtacaacaaactcccataacacaagttcacctgtgtaacaaacctgcacatgtaccgctgaacttaaaagttttaaaagaaaatgaatttgagcaacatgcaattatatggatgaatcatatcattataacatgaaaaagtgatatgtacatgcagcattaattctttgtaaatttaacaactgcaataataacgatgatgataaacggatatctccagatttaataaactatctaaaaatttaaaaaggaaaagtttacaccctctgcatttttggatgttccttttcacatttccttgttgaagggcatgaactgcgtgtccaggaaatttgggactgtgttgctgtaccttagctgtgtttgcttattcaagagatcttcattaagtacccaaatgtactgggcattgtcctggtcacccagacacaaagatgggtaaaatataagggagaacttcaacggggaactgcaatttctgatccaccagagctgaagagggcaaaagaaaaccagaaaaacatcagcaatgtttattacagaggtcagctgggaagagctaccactttaagtgtaactcctgaaatggaaagagtgaagaagaatcaagaaaatattagctcggcaagtggttttcttcattttagactatcacaaaggatgtgtcttttattatttacttgcggtcctcctttgcttgtgaaaataaaacttattttcaagaaacatttgtgatgtgtccaataagtacatgtgttatttcagatgacttccaaaagctgccactgcaaacatttacattattttgcaactctttgttatttccagatgtgaccaacagttacattcaaagcttaggttaaaattatattcatttaaacaacgattcatgatatgttagccgtgtctttgaaggtggtaaagcctttgatgtgtgcgttaaataattgtcattttcctgaaatatttcattgaacatggattgttaaatgctgtctgcaaaacaaaataggagatggatcattacccccactaaagacttacagaaaagaatccttaaatacagttaacgtagaattcagttgctcaccaaagtccagtggtgtacatgagtatcttatctgaatattgtgcttcctcttagtgaatatcagggcttcaattctgaattgtacataatgccctcaggtccacagtaagtggtatccatatcttacacctaatcagtttcataaatggcggtgttctgatgggcagttgtgaagaacacaggcccttttcttagcataccctgaatagctgtttgcctgagaatcagcatttaggctttgcaatttacagcttcctagtgacatttctgtccagagatgctgtgtgtatttaacataaattacctttaagttgtggctgcttagaagaacaactaaatttgttcctcattgtttcttattccctaagcagagaaaaaataaaaagaa

SEQ ID NO: 74017 - DNA, 3493 bp, Homo sapiens
  misc_feature (2357)..(2357): n is a, c, g, or t
gcctgatggaaacaagggtgaacctggtgtggttggtgctgtgggcactgctggtccatctggtcctagtggactcccaggagagaggggtgctgctggcataccaggagcaccacgagcaccatttctgccagagcaccagagacgtcagcatctcaagggcactgtggtatggaaaaggacgccacatgagtaaattttaaaaatataaatattttaaagggtaaaaatgagggtccctgtatttgaggatataaaagatgaaactgaagaagaaaagataggggaagaagaaaatgaagaagaccaggtcttctataagcctgttattgaagacttaagcatggaattggccagaaaatgcacggaactcattagcgatatccgttataaagaagagtttaaaaagtccaaggataagtgtacatttgtgactgacagtcctatgctaaaccatgtaaaaaatatcggtgcttttatttctgaggcaaaatacaaaggcaccattaaagctgacctttctaattctctttataagcggatgccagccacaattgacagtgtttttgcaggagaagttacacagctccagagtgaggtggcctacaagcagaaacatgatgctgccaaaggattctcagattatgcccacatgaaggagccccctgaggttaaacatgccatggaggtcaataaacaccagagtaatatttcttataggaaagacgtgcaggacacccacacgtacagtgcagaacttgaccgaccagacatcaagatggcaacccagatctctaagatcataagcaatgcagaatacaagaaaggacaaggaataatgaataaagagcccgctgtaattggaagaccagattttgaacatgccgtggaagcttctaaactttctagtcaaattaaatacaaagaaaaatttgataatgaaatgaaggataagaaacatcattacaatcctcttgaaagtgcttcttttaggcagaatcagcttgctgctacactggcgagcaatgtgaagtacaagaaagacattcaaaatatgcatgatccagtttcagatctcccaaatttgttgtttttagaccatgttttgaaagccagcaaaatgctcagcggccgagaatataaaaagctctttgaggaaaacaaaggaatgtatcattttgatgcagatgctgtggaacatctgcaccataaaggcaatgccgtcctccaaagtcaggtgaaatataaagaagaatatgagaaaaataagggaaagccaatgcttgaatttgttgagacaccatcatatcaagcttcaaaggaggctcaaaagatgcaaagtgaaaaagtttacaaagaggattttgagaaggagattaaaggaaggtcatcactggatttagacaagactccagaatttttacatgtaaagtacatcaccaaccttctgagggagaaagaatataaaaaagatttggaaaatgagataaaagggaaaggaatggaacttaattcagaagttcttgatatccaaagagcaaagcgagcctctgaaatggcaagtgagaaagaatacaagaaagacctggagtcaataattaaagggaaaggaatgcaagctggcactgacacccttgaaatgcagcatgccaagaaggctgcagagatagcgagtgagaaagactataaaagagatctggagactgaaattaaagggaaagggatgcaggtgagcacagacactcttgatgtccagagagctaagaaagcatccgagatggccagccagaaacaatacaagaaggacttagaaaatgaaattaaagggaaaggaatgcaagtgagcatggatatcccagatatccttcgagccaagaggacatctgaaatctatagccagagaaagtataaagatgaagcagagaagatgctttctaactattctaccatagcagatactcctgaaattcagagaattaagacaactcaacaaaacattagtgcggtattttataagaaagaagtgggagctggcactgcagtgaaagatagcccagagatcgaacgagtgaagaaaaatcagcagaatattagttcagtgaaatacaaagaagagattaaacatgcaacagccatttctgatcctccagaactaaagagagttaaagaaaaccagaagaacatcagcaatctccagtataaagagcaaaactacaaggccactccggtaagcatgaccccggagatagagagagtgaggcgaaaccaggagcagctgagtgcggcaagtcgtttctgtttccttttatattttctcaaacataacatatttttatttaaaaatatgccctttgganggccattatccttagcaaactaacacaggaacgtaaaaccaaatactgcataataatgagagctaaatgatgagaatacatggacacatagaggggaataacagacaccggagcctgttggacgggagaggatgggaggagggagaggatccggaaaagtaactgttgagtactgggcttaatgccggggtgatgaagtcatctgtacaacaaactcccataacacaagttcacctgtgtaacaaacctgcacatgtaccgctgaacttaaaagttttaaaagaaaatgaatttgagcaacatgcaattatatggatgaatcatatcattataacatgaaaaagtgatatgtacatgcagcattaattctttgtaaatttaacaactgcaataataacgatgatgataaacggatatctccagatttaataaactatctaaaaatttaaaaaggaaaagtttacaccctctgcatttttggatgttccttttcacatttccttgttgaagggcatgaactgcgtgtccaggaaatttgggactgtgttgctgtaccttagctgtgtttgcttattcaagagatcttcattaagtacccaaatgtactgggcattgtcctggtcacccagacacaaagatgggtaaaatataagggagaacttcaacggggaactgcaatttctgatccaccagagctgaagagggcaaaagaaaaccagaaaaacatcagcaatgtttattacagaggtcagctgggaagagctaccactttaagtgtaactcctgaaatggaaagagtgaagaagaatcaagaaaatattagctcggtaaaatatacccaggaccataaacagatgaaaggtagaccaagtctgattttagatacacctgctatgagacatgttaaagaagcacaaaatcatatttcaatggtagggtccaaccagatcattcttaaaacatgctaaggaatgggcggatccagtgcacggatggcattacttcactattaatccgataactaacaaagcatggaaatgtggttggcttgtcttttgagggaggggcatttctaatcacactgaaatgcagtggaaacatttagtctaataaaatgatttttctcagtgaaaatt

SEQ ID NO: 74018 - DNA, 1958 bp, Homo sapiens
gcctgatggaaacaagggtgaacctggtgtggttggtgctgtgggcactgctggtccatctggtcctagtggactcccaggagagaggggtgctgctggcataccaggagcaccacgagcaccatttctgccagagcaccagagacgtcagcatctcaagggcactgtggtatggaaaaggacgccacatgagtaaattttaaaaatataaatattttaaagggtaaaaatgagggtccctgtatttgaggatataaaagatgaaactgaagaagaaaagataggggaagaagaaaatgaagaagaccaggtcttctataagcctgttattgaagacttaagcatggaattggccagaaaatgcacggaactcattagcgatatccgttataaagaagagtttaaaaagtccaaggataagtgtacatttgtgactgacagtcctatgctaaaccatgtaaaaaatatcggtgcttttatttctgaggcaaaatacaaaggcaccattaaagctgacctttctaattctctttataagcggatgccagccacaattgacagtgtttttgcaggagaagttacacagctccagagtgaggtggcctacaagcagaaacatgatgctgccaaaggattctcagattatgcccacatgaaggagccccctgaggttaaacatgccatggaggtcaataaacaccagagtaatatttcttataggaaagacgtgcaggacacccacacgtacagtgcagaacttgaccgaccagacatcaagatggcaacccagatctctaagatcataagcaatgcagaatacaagaaaggacaaggaataatgaataaagagcccgctgtaattggaagaccagattttgaacatgccgtggaagcttctaaactttctagtcaaattaaatacaaagaaaaatttgataatgaaatgaaggataagaaacatcattacaatcctcttgaaagtgcttcttttaggcagaatcagcttgctgctacactggcgagcaatgtgaagtacaagaaagacattcaaaatatgcatgatccagtttcagatctcccaaatttgttgtttttagaccatgttttgaaagccagcaaaatgctcagcggccgagaatataaaaagctctttgaggaaaacaaaggaatgtatcattttgatgcagatgctgtggaacatctgcaccataaaggcaatgccgtcctccaaagtcaggtgaaatataaagaagaatatgagaaaaataagggaaagccaatgcttgaatttgttgagacaccatcatatcaagcttcaaaggaggctcaaaagatgcaaagtgaaaaagtttacaaagaggattttgagaaggagattaaaggaaggtcatcactggatttagacaagactccagaatttttacatgtaaagtacatcaccaaccttctgagggagaaagaatataaaaaagatttggaaaatgagataaaagggaaaggaatggaacttaattcagaagttcttgatatccaaagagcaaagcgagcctctgaaatggcaagtgagaaagaatacaagaaagacctggagtcaataattaaagggaaaggaatgcaagctggcactgacacccttgaaatgcagcatgccaagaaggctgcagagatagcgagtgagaaagactataaaagagatctggagactgaaattaaagggaaagggatgcaggtgagcacagacactcttgatgtccagagagctaagaaagcatccgagatggccagccagaaacaatacaagaaggacttagaaaatgaaattaaagggaaaggaatgcaagtgagcatggatatcccagatatccttcgagccaagaggacatctgaaatctatagccaggttggtcatgaatgaagatgctcagaatcgtgtattccaatgtcatgttgccatgtgc

SEQ ID NO: 74019 - DNA, 453 bp, Homo sapiens
agttcttacatttggggaaatgcagtgaattcccacatcatgttttaaattactcagccactaaaaatgaatgtgcatggcgtcattaacataatcattgcctgaaccgtatttttcacactatgtactctaggttcctggaggtgaaaggaatctggacttagagttcttggctacctctggctgcccccgaattagaacagcccatgggggtatgtgtattgggagtggaggagtggacgggtagattgactttttctcaggcatcaatctgttacaaggttcatggtttctatggggccagatgcatgagaggtcaaagcatgggcaataggggttaactgaacgagttgaatgctaggaagtcctcaggggagccaacgttccttgtaaagtgtgtagattttttgttttttaactaaataaaatcttggcactgacaaagttattcct

SEQ ID NO: 74020 - DNA, 407 bp, Homo sapiens
agttcttacatttggggaaatgcagtgaattcccacatcatgttttaaattactcagccactaaaaatgaatgtgcatggcgtcattaacataatcattgcctgaaccgtatttttcacactatgtactctaggttcctggaggtgaaaggaatctggacttagagttcttggctacctctggctgcccccgaattagaacagcccatgggggtatgtgtattgggagtggaggagccctcgtatatgtagacctctgatcgttggcgtaacctatttatatactaccccttgggaagaatttttccattatgatacatattaggttccaccattttcttgtctattcaacgacatttctcgtgtttactctatgttccgttatattgttttctgccatttacatgc

SEQ ID NO: 74021 - DNA, 526 bp, Homo sapiens
acgcatcgagctcgccccacgctcttgataggaacctggtctccctgggaatctgtcttcctgacctgagtgttacctccatgttagagcaaaagagagatccctggactctgcagagtgaagagaaaatagcaaacgatccagacggcagggagtgcatcaaaggtgtgaacacaggctgatctcggctcactacagcctctgcctctctggtccaagtgattctcctgcctcggcctcctgagtagctgggattacaggcgcccatccccacccctggctgatttttgtatttttagtagaggcaggtttttgccatatttgccaggctgctctccaactcctgacctcaagtgatccacctgcctcggcctcccaaagtgctgggattacaggtgtgccactgtacctggcctgattgtgtcttttaaattgtaggaaagaattaaaagtcaagttacaaatgaaaagtgcaataatacttgtttctgtatttgatcatttgttgaccttttatgatgagctt

SEQ ID NO: 74022 - DNA, 539 bp, Homo sapiens
ttaacagcttatctttgattaggtacacaaagctctgcttaacaactctgctctttctgttattactggcagaaattaatcctatatattttatgttcccattaacatatgtttataatgtttataatgctttttaaatgagagtgtctttttttttttttctgagatggagtctccttctatctcccaggctgatctcggctcactacagcctctgcctctctggtccaagtgattctcctgcctcggcctcctgagtagctgggattacaggcgcccatccccacccctggctgatttttgtatttttagtagaggcaggtttttgccatatttgccaggctgctctccaactcctgacctcaagtgatccacctgcctcggcctcccaaagtgctgggattacaggtgtgccactgtacctggcctgattgtgtcttttaaattgtaggaaagaattaaaagtcaagttacaaatgaaaagtgcaataatacttgtttctgtatttgatcatttgttgaccttttatgatgagctt

SEQ ID NO: 74023 - DNA, 4174 bp, Homo sapiens
cgattgcagggagaaactgttttcgcagcagtgcgcctcccttttccagccaccggttctcctgaccccgagtgtggggggtgacttcagtctcctgacatccagtgttctctcgagccagtttccagcccacagaaaatgagctcttccggaagtgggcatcttattccaatcccctccctgtgaatgtgtggagaaaaagagatgggaacgaggcagaggaaatagagaaattttgaaagagaaatgaagaatgagagacccattaacagaaggcaaagtagaaggttcacaaattttaagaaagggagaataaagtgaaaaaaatctcagaaggaatccactcaacagacgaggattcacttccaaagagacatattatgcaaggaagcaacttggaagaggaaagaaaagaagtcaggaatggcccttactcagggacccttgaaattcatggatgtggccatagagttctctcaggaagagtggaaatgcctggaccctgcgcagaggactttatacagggacgtgatgttggagaattataggaacctggtctccctgggaatctgtcttcctgacctgagtgttacctccatgttagagcaaaagagagatccctggactctgcagagtgaagagaaaatagcaaacgatccagacggcagggagtgcatcaaaggtgtgaacacagagaggagctctaaattgggaagtaatgcaggaaacaagccttgtaaaaatcaacttggattcacttttcagttacatctgagtgatctacagctatttcaagctgaaaggaaaatttctgggtgtaagcattttgaaaaacccgtcagtgacaattcctcagtttcaccgcttgaaaaaatttcttccagtgtcaaatcccaccttttaaataaatatagaaataattttgatcatgctccattacttccacaagaacagaaagcacacattagggaaaaagcttataaatgtaatgagcacggccaagtctttagagcatctgcaagccttactaaccaagtaatccataacgcagataatccttacaaatgcagtgaatgtggcaaggtctttagttgcagttcaaagcttgtgatacatcgaagaatgcatactggagagaagccttacaaatgtcatgaatgtggcaagctcttcagtagcaattcaaacctttcacaacatcaaagaattcatactggagagaagccttacaaatgtcatgaatgtgacaaggtctttcgaagcagttcaaagcttgcacaacatcaaagaattcatactggagagaagccttacaaatgtcatgaatgtgacaaggtcttcaatcaaattgcacaccttgtacgacatcaaaaaattcatactggagagaaaccttacagttgtaataaatgtggcaaggtctttagtcgccattcatatctagcagaacatcaaacggttcatactggtgagaaaccttacaaatgtgaagaatgtggcaaagcattttcagtgcgttccagcctcataacccatcagttaattcacactggaaggaaaccttacaaatgtaaagaatgtgacaaggtctttgggcgcaagtgtttcctgacctctcatcagagaattcatactagagagagaccttatggatgcagtcagtgtggcaagatctttagtcagaaatcagaccttatacgacatcgaaaaactcatactgatgagaagccttacaaatgtaataaatgtggcacagcgtttagagagttttcagaccttactgcccattttctaatccatagtggagagaaaccttatgaatgtaaagaatgtggcaaagtcttcaggtacaagtcttctctaaccagtcatcatagaattcatactggagagaagccttacaaatgtaacagatgtggcaaggtcttcagtcgcagttcaaacctggtatgccatcagaaaattcatacaggagaaaagccttacaaatgtaatcaatgtggcaaggtctttaatcaagcatcataccttacaagacatcaaataattcatactggagagaggccttacagatgtagtaaatgtggcaaagcatttcgagggtgttcaggccttactgcccatcttgcaatccatactgaaaagaaatctcatgagtgtaaagaatgtggcaagatcttcactcagaagtcttccctcaccaatcaccatagaattcacattggagagaaaccttacaaatgcaccctgtgcagtaaggtcttcagtcacaattctgaccttgcacagcatcagagagttcattcatgagagtccctacaaactgtgtatggcaaaaccatcatcatgagttctagcattaatcaacatcagtgagtccatactaagtggaaatcatataaatgaaatgtatgtgacacaggctttatcaaggcctgccaaatcactggacatcaccacatcactgtggaggatgaaagcacacagatgaattgtgtgtacttgggctattattcaaggaccattgctatagaacacgataggatttacacaagaagtaactctgtctctggttctctgatactaatctatgatattgcatgatgcagaataatgctaagtcaaaatatgttgaatctcatgacctgatgtatatcaaaggtgcaacggcttgtaaatgaccagttttattcaggctataaagcattcaattatttggggcttatagaaaaggctactttactctttgtgacttcgaaatcttttcatgtgccttccatacaggccattcactgtggtccctgggaaagaatcagtaggatgacagggctgacttcattagctgaggattatttctatccaatttcctgatgaaggacattgccttttgagattaaatattgtctgatttagagagcatggaggtgggcagagtaacataaaactgatgaccgtcatcatactgttgcagttagcacactttctcctgacataagtgcacagagcttcagtgtccaccaactgaccatgaaatagagtatgctgtaatcttaaggcataggttattagtgggaagagagtaataggttgctagtgtctgattatatggtagaaataatgcaaggaaaaaggtagccaccttctccattgaacagcagtacctgctgtttagcaaagactgatgagaagtagacttttttttttttggagatagagtctcactctgttgcccaggctggagtgtagtggtgtgttcttggctcactgcaccctccgcctcctgggctcaagcagtccttctgccttagcctcctaagtagctgagactacagacgtgcgccaccacacccagttcatttttgtatttttagtagaggcagtgtttaccatgttggccaggcaggtctccaactcctgacctcaagtgatatgttcacctcagcctcccaaagtgctgggattacaggcatgaaccatggtgcccagcctcatttttgaaatggaatagagaacagttatatcacagttgagagtttaatcaaaatgaccggatcagcatattctttttttagatgagacagagtttcgcccttgtcacccaggctgtagtgcggtggcgcgatctcggctcactgcaacctccgcctcccgggttcaagcaatgctcctgcctcagcctcccaagtagctgggattacaggcgtgtaccaccatacccagctaatttttgtatttttagtagagatggggtttcaccacgttggccacactggtctcaaactcctgacctcaggcgatccatctgcctcagcctgaaagtgctaggattacaggcgtgagccaccacacctggccagctcagcatattcttaagtaggattcacatttaattcttggtattataagttgcaaccatttgatttagaatgtatgcagctctcatgtttgtagtaataaagtttcatttttcctaagtaaaaaaaaaaacaacaaaaaaaaaaaaaaaaaactgagtaatcctagcgttaccttgtgccaatccttctcattagcgactactcggcttacatactgttcgtaaggttcctcgtcactcctggcaataccggtgcttaacccatcgtaatcgcctttctgaacttcctaatattttcagttgacgtttctgcgtggt

SEQ ID NO: 74024 - DNA, 4339 bp, Homo sapiens
cgattgcagggagaaactgttttcgcagcagtgcgcctcccttttccagccaccggttctcctgaccccgagtgtggggggtgacttcagtctcctgacatccagtgttctctcgagccagtttccagcccacagaaaatgagctcttccggaagtgggcatcttattccaatcccctccctgtgaatgtgtggagaaaaagagatgggaacgaggcagaggaaatagagaaattttgaaagagaaatgaagaatgagagacccattaacagaaggcaaagtagaaggttcacaaattttaagaaagggagaataaagtgaaaaaaatctcagaaggaatccactcaacagacgaggattcacttccaaagagacatattatgcaaggaagcaacttggaagaggaaagaaaagaagtcaggaatggcccttactcagggacccttgaaattcatggatgtggccatagagttctctcaggaagagtggaaatgcctggaccctgcgcagaggactttatacagggacgtgatgttggagaattataggaacctggtctccctgggaatctgtcttcctgacctgagtgttacctccatgttagagcaaaagagagatccctggactctgcagagtgaagagaaaatagcaaacgatccagacggcagggagtgcatcaaaggtgtgaacacagttcctctactccagcagaaccttctttgttcacgtcctcaaagtcctatgttcggaggccacttgtccgacatcctcggagtccctcttctgggtcaccagttgccacctgcacagaccttgggggactgaacgaagggggcgaacattggaataaaagacaaagagaggagctctaaattgggaagtaatgcaggaaacaagccttgtaaaaatcaacttggattcacttttcagttacatctgagtgatctacagctatttcaagctgaaaggaaaatttctgggtgtaagcattttgaaaaacccgtcagtgacaattcctcagtttcaccgcttgaaaaaatttcttccagtgtcaaatcccaccttttaaataaatatagaaataattttgatcatgctccattacttccacaagaacagaaagcacacattagggaaaaagcttataaatgtaatgagcacggccaagtctttagagcatctgcaagccttactaaccaagtaatccataacgcagataatccttacaaatgcagtgaatgtggcaaggtctttagttgcagttcaaagcttgtgatacatcgaagaatgcatactggagagaagccttacaaatgtcatgaatgtggcaagctcttcagtagcaattcaaacctttcacaacatcaaagaattcatactggagagaagccttacaaatgtcatgaatgtgacaaggtctttcgaagcagttcaaagcttgcacaacatcaaagaattcatactggagagaagccttacaaatgtcatgaatgtgacaaggtcttcaatcaaattgcacaccttgtacgacatcaaaaaattcatactggagagaaaccttacagttgtaataaatgtggcaaggtctttagtcgccattcatatctagcagaacatcaaacggttcatactggtgagaaaccttacaaatgtgaagaatgtggcaaagcattttcagtgcgttccagcctcataacccatcagttaattcacactggaaggaaaccttacaaatgtaaagaatgtgacaaggtctttgggcgcaagtgtttcctgacctctcatcagagaattcatactagagagagaccttatggatgcagtcagtgtggcaagatctttagtcagaaatcagaccttatacgacatcgaaaaactcatactgatgagaagccttacaaatgtaataaatgtggcacagcgtttagagagttttcagaccttactgcccattttctaatccatagtggagagaaaccttatgaatgtaaagaatgtggcaaagtcttcaggtacaagtcttctctaaccagtcatcatagaattcatactggagagaagccttacaaatgtaacagatgtggcaaggtcttcagtcgcagttcaaacctggtatgccatcagaaaattcatacaggagaaaagccttacaaatgtaatcaatgtggcaaggtctttaatcaagcatcataccttacaagacatcaaataattcatactggagagaggccttacagatgtagtaaatgtggcaaagcatttcgagggtgttcaggccttactgcccatcttgcaatccatactgaaaagaaatctcatgagtgtaaagaatgtggcaagatcttcactcagaagtcttccctcaccaatcaccatagaattcacattggagagaaaccttacaaatgcaccctgtgcagtaaggtcttcagtcacaattctgaccttgcacagcatcagagagttcattcatgagagtccctacaaactgtgtatggcaaaaccatcatcatgagttctagcattaatcaacatcagtgagtccatactaagtggaaatcatataaatgaaatgtatgtgacacaggctttatcaaggcctgccaaatcactggacatcaccacatcactgtggaggatgaaagcacacagatgaattgtgtgtacttgggctattattcaaggaccattgctatagaacacgataggatttacacaagaagtaactctgtctctggttctctgatactaatctatgatattgcatgatgcagaataatgctaagtcaaaatatgttgaatctcatgacctgatgtatatcaaaggtgcaacggcttgtaaatgaccagttttattcaggctataaagcattcaattatttggggcttatagaaaaggctactttactctttgtgacttcgaaatcttttcatgtgccttccatacaggccattcactgtggtccctgggaaagaatcagtaggatgacagggctgacttcattagctgaggattatttctatccaatttcctgatgaaggacattgccttttgagattaaatattgtctgatttagagagcatggaggtgggcagagtaacataaaactgatgaccgtcatcatactgttgcagttagcacactttctcctgacataagtgcacagagcttcagtgtccaccaactgaccatgaaatagagtatgctgtaatcttaaggcataggttattagtgggaagagagtaataggttgctagtgtctgattatatggtagaaataatgcaaggaaaaaggtagccaccttctccattgaacagcagtacctgctgtttagcaaagactgatgagaagtagacttttttttttttggagatagagtctcactctgttgcccaggctggagtgtagtggtgtgttcttggctcactgcaccctccgcctcctgggctcaagcagtccttctgccttagcctcctaagtagctgagactacagacgtgcgccaccacacccagttcatttttgtatttttagtagaggcagtgtttaccatgttggccaggcaggtctccaactcctgacctcaagtgatatgttcacctcagcctcccaaagtgctgggattacaggcatgaaccatggtgcccagcctcatttttgaaatggaatagagaacagttatatcacagttgagagtttaatcaaaatgaccggatcagcatattctttttttagatgagacagagtttcgcccttgtcacccaggctgtagtgcggtggcgcgatctcggctcactgcaacctccgcctcccgggttcaagcaatgctcctgcctcagcctcccaagtagctgggattacaggcgtgtaccaccatacccagctaatttttgtatttttagtagagatggggtttcaccacgttggccacactggtctcaaactcctgacctcaggcgatccatctgcctcagcctgaaagtgctaggattacaggcgtgagccaccacacctggccagctcagcatattcttaagtaggattcacatttaattcttggtattataagttgcaaccatttgatttagaatgtatgcagctctcatgtttgtagtaataaagtttcatttttcctaagtaaaaaaaaaaacaacaaaaaaaaaaaaaaaaaactgagtaatcctagcgttaccttgtgccaatccttctcattagcgactactcggcttacatactgttcgtaaggttcctcgtcactcctggcaataccggtgcttaacccatcgtaatcgcctttctgaacttcctaatattttcagttgacgtttctgcgtggt

SEQ ID NO: 74025 - DNA, 948 bp, Homo sapiens
cgattgcagggagaaactgttttcgcagcagtgcgcctcccttttccagccaccggttctcctgaccccgagtgtggggggtgacttcagtctcctgacatccagtgttctctcgagccagtttccagcccacagaaaatgagctcttccggaagtgggcatcttattccaatcccctccctgtgaatgtgtggagaaaaagagatgggaacgaggcagaggaaatagagaaattttgaaagagaaatgaagaatgagagacccattaacagaaggcaaagtagaaggttcacaaattttaagaaagggagaataaagtgaaaaaaatctcagaaggaatccactcaacagacgaggattcacttccaaagagacatattatgcaaggaagcaacttggaagaggaaagaaaagaagtcaggaatggcccttactcagggacccttgaaattcatggatgtggccatagagttctctcaggaagagtggaaatgcctggaccctgcgcagaggactttatacagggacgtgatgttggagaattataggaacctggtctccctgggaatctgtcttcctgacctgagtgttacctccatgttagagcaaaagagagatccctggactctgcagagtgaagagaaaatagcaaacgatccagacggcagggagtgcatcaaaggtgtgaacacaggtgagagctcgggtgggcagagtggaggccccataatttttgttttttgagacagggtctaacgctgtcatccaggctagagtgcggtggcaatcatagctcactgcagccttgaattcctggacttaagggatctccctggctcgctcttccaaagtgttgggattacagccatgagccactgtaccctgcaaagccacactattacatagcgtttgggaaactctctgcaaatgggagaattctgtgggaaa

SEQ ID NO: 74026 - DNA, 1043 bp, Homo sapiens
cgattgcagggagaaactgttttcgcagcagtgcgcctcccttttccagccaccggttctcctgaccccgagtgtggggggtgacttcagtctcctgacatccagtgttctctcgagccagtttccagcccacagaaaatgagctcttccggaagtgggcatcttattccaatcccctccctgtgaatgtgtggagaaaaagagatgggaacgaggcagaggaaatagagaaattttgaaagagaaatgaagaatgagagacccattaacagaaggcaaagtagaaggttcacaaattttaagaaagggagaataaagtgaaaaaaatctcagaaggaatccactcaacagacgaggattcacttccaaagagacatattatgcaaggaagcaacttggaagaggaaagaaaagaagtcaggaatggcccttactcagggacccttgaaattcatggatgtggccatagagttctctcaggaagagtggaaatgcctggaccctgcgcagaggactttatacagggacgtgatgttggagaattataggaacctggtctccctgggaatctgtcttcctgacctgagtgttacctccatgttagagcaaaagagagatccctggactctgcagagtgaagagaaaatagcaaacgatccagacggcagggagtgcatcaaaggtgtgaacacaggctgatctcggctcactacagcctctgcctctctggtccaagtgattctcctgcctcggcctcctgagtagctgggattacaggcgcccatccccacccctggctgatttttgtatttttagtagaggcaggtttttgccatatttgccaggctgctctccaactcctgacctcaagtgatccacctgcctcggcctcccaaagtgctgggattacaggtgtgccactgtacctggcctgattgtgtcttttaaattgtaggaaagaattaaaagtcaagttacaaatgaaaagtgcaataatacttgtttctgtatttgatcatttgttgaccttttatgatgagctt

SEQ ID NO: 74027 - DNA, 1317 bp, Homo sapiens
caaatgtagacagaagggagaaaggaagaagagaaaatgaggcaaaactgagaggggaggggacagagaggtgacctgggcagagcttcacccatgaccctggaaagtgctcctgccctgggaggaggctcagcatggaaagaggaaggacagcagagcctaagtcacagtagccctgactacagcattcctggagcccaggctcttttccacagaggaggaaagagcaggcagcagagaccatggggcccccctcagcctctccccacagagaatgcatcccctggcaggggcttctgctcacagcctcacttctaaacttctggaacccgcccaccactgccaagctcactattgaatccatgccgctcagtgtcgcagaggggaaggaggtgcttctacttgtccacaatctgccccagcatctttttggctacagctggtacaaaggggaaagagtggatggcaacagtctaattgtaggatatgtaataggaactcaacaagctaccccaggggccgcatacagcggtcgagagacaatatacaccaatgcatccctgctgatccagaatgtcacccagaatgacataggattctacaccctacaagtcataaagtcagatcttgtgaatgaagaagcaactggacagttccatgtataccaagaaaatgccccaggccttcctgtgggggccgtcgccggcatcgtgaccggggtcctggtcggagtggcgctggtggccgcgctggtgtgtttcctgctccttgccaaaactggaagaaccagcatccagcgtgacctcaaggagcagcagccccaagcccttgcccctggccgtggtccctcccacagctctgccttctcgatgtcccctctctccactgcccaggcccccctacccaaccccaggacagcagcttccatctatgaggaattgctaaaacatgacacaaacatttactgccggatggaccacaaagcagaagtggcttcttagcttcctccaggagctgctcctgtgggttgatggagagtccccaaggcccccagccctggggatggggaaggacatgaagcctgagccagagaaccagctataagtcctgagaagacactggtgtctggggacagggagggatgggggtccctgatgaatatctggagacctcgacagcctgccctaggccctgggtgggtcaggacaaaggcctctcatcaccgcagaaagcgggggcttgcagggaaagtgaatgggcctgtggcccacctggggtcacttggaaaggatctgaataaaggggacccttcctctc

SEQ ID NO: 74028 - DNA, 1212 bp, Homo sapiens
caaatgtagacagaagggagaaaggaagaagagaaaatgaggcaaaactgagaggggaggggacagagaggtgacctgggcagagcttcacccatgaccctggaaagtgctcctgccctgggaggaggctcagcatggaaagaggaaggacagcagagcctaagtcacagtagccctgactacagcattcctggagcccaggctcttttccacagaggaggaaagagcaggcagcagagaccatggggcccccctcagcctctccccacagagaatgcatcccctggcaggggcttctgctcacagcctcacttctaaacttctggaacccgcccaccactgccaagctcactattgaatccatgccgctcagtgtcgcagaggggaaggaggtgcttctacttgtccacaatctgccccagcatctttttggctacagctggtacaaaggggaaagagtggatggcaacagtctaattgtaggatatgtaataggaactcaacaagctaccccaggggccgcatacagcggtcgagagacaatatacaccaatgcatccctgctgatccagaatgtcacccagaatgacataggattctacaccctacaagtcataaagtcagatcttgtgaatgaagaagcaactggacagttccatgtataccaagaaaatgccccaggccttcctgtgggggccgtcgccggcatcgtgaccggggtcctggtcggagtggcgctggtggccgcgctggtgtgtttcctgctccttgccaaaactggaaggccgtggtccctcccacagctctgccttctcgatgtcccctctctccactgcccaggcccccctacccaaccccaggacagcagcttccatctatgagaagtggcttcttagcttcctccaggagctgctcctgtgggttgatggagagtccccaaggcccccagccctggggatggggaaggacatgaagcctgagccagagaaccagctataagtcctgagaagacactggtgtctggggacagggagggatgggggtccctgatgaatatctggagacctcgacagcctgccctaggccctgggtgggtcaggacaaaggcctctcatcaccgcagaaagcgggggcttgcagggaaagtgaatgggcctgtggcccacctggggtcacttggaaaggatctgaataaaggggacccttcctctc

SEQ ID NO: 74029 - DNA, 1824 bp, Homo sapiens
caaatgtagacagaagggagaaaggaagaagagaaaatgaggcaaaactgagaggggaggggacagagaggtgacctgggcagagcttcacccatgaccctggaaagtgctcctgccctgggaggaggctcagcatggaaagaggaaggacagcagagcctaagtcacagtagccctgactacagcattcctggagcccaggctcttttccacagaggaggaaagagcaggcagcagagaccatggggcccccctcagcctctccccacagagaatgcatcccctggcaggggcttctgctcacagcctcacttctaaacttctggaacccgcccaccactgccaagctcactattgaatccatgccgctcagtgtcgcagaggggaaggaggtgcttctacttgtccacaatctgccccagcatctttttggctacagctggtacaaaggggaaagagtggatggcaacagtctaattgtaggatatgtaataggaactcaacaagctaccccaggggccgcatacagcggtcgagagacaatatacaccaatgcatccctgctgatccagaatgtcacccagaatgacataggattctacaccctacaagtcataaagtcagatcttgtgaatgaagaagcaactggacagttccatgtatacccggagctgcccaagccctccatctccagcaacaactccaaccccaaggaggacaaggatgctgtggccttcacctgtgaacctgagattcacagcacaacctgcctgtagtgggtaaatggtcagagcctcccggtcagttccaggctgcagctgtccaatgacaagaggaccctcactctactcagtgtcacaaggaatgacacaggaccctatgagtgtgaaataccgaacccagtgggtgccagctacagtgacccagtcacgctgaatgtcctctgtatcttctgttcctctgtggcccaggcttccagcccaaatccacacagccagaggccaggcctctcagtccctctcaagtccagggactcagactctcacccaggctggccatcacttcctgtcccaagcaaacctgggcagacccagccttgaccaagaataggaggggagaggctgctcctgtcctgggaggctcagggtccacagcctgtgatgggagaaacagaagaaaatgccccaggccttcctgtgggggccgtcgccggcatcgtgaccggggtcctggtcggagtggcgctggtggccgcgctggtgtgtttcctgctccttgccaaaactggaagaaccagcatccagcgtgacctcaaggagcagcagccccaagcccttgcccctggccgtggtccctcccacagctctgccttctcgatgtcccctctctccactgcccaggcccccctacccaaccccaggacagcagcttccatctatgaggaattgctaaaacatgacacaaacatttactgccggatggaccacaaagcagaagtggcttcttagcttcctccaggagctgctcctgtgggttgatggagagtccccaaggcccccagccctggggatggggaaggacatgaagcctgagccagagaaccagctataagtcctgagaagacactggtgtctggggacagggagggatgggggtccctgatgaatatctggagacctcgacagcctgccctaggccctgggtgggtcaggacaaaggcctctcatcaccgcagaaagcgggggcttgcagggaaagtgaatgggcctgtggcccacctggggtcacttggaaaggatctgaataaaggggacccttcctctc

SEQ ID NO: 74030 - DNA, 1413 bp, Homo sapiens
caaatgtagacagaagggagaaaggaagaagagaaaatgaggcaaaactgagaggggaggggacagagaggtgacctgggcagagcttcacccatgaccctggaaagtgctcctgccctgggaggaggctcagcatggaaagaggaaggacagcagagcctaagtcacagtagccctgactacagcattcctggagcccaggctcttttccacagaggaggaaagagcaggcagcagagaccatggggcccccctcagcctctccccacagagaatgcatcccctggcaggggcttctgctcacagcctcacttctaaacttctggaacccgcccaccactgccaagctcactattgaatccatgccgctcagtgtcgcagaggggaaggaggtgcttctacttgtccacaatctgccccagcatctttttggctacagctggtacaaaggggaaagagtggatggcaacagtctaattgtaggatatgtaataggaactcaacaagctaccccaggggccgcatacagcggtcgagagacaatatacaccaatgcatccctgctgatccagaatgtcacccagaatgacataggattctacaccctacaagtcataaagtcagatcttgtgaatgaagaagcaactggacagttccatgtatacccggagctgcccaagccctccatctccagcaacaactccaaccccaaggaggacaaggatgctgtggccttcacctgtgaacctgagattcacagcacaacctgcctgtagtgggtaaatggtcagagcctcccggtcagttccaggctgcagctgtccaatgacaagaggaccctcactctactcagtgtcacaaggaatgacacaggaccctatgagtgtgaaataccgaacccagtgggtgccagctacagtgacccagtcacgctgaatgtcctctgtatcttctgttcctctgtggcccaggcttccagcccaaatccacacagccagaggccaggcctctcagtccctctcaagtccagggactcagactctcacccaggctggccatcacttcctgtcccaagcaaacctgggcagacccagccttgaccaagaataggaggggagaggctgctcctgtcctgggaggctcagggtccacagcctgtgatgggagaaacaggtgaatatctcagacccagactcagtggacagattgggtttcgttaggacttcaaggttgtgacttggctcacagggacactgtggctcttccacagaccaggagcttccccttccctttgatgatatcatctatgactttattctcgctactccagatggaccgggcattcccaccatttcccccccatctactcttccaccaggacttagctcagtcttgatttttttcagggactcc

SEQ ID NO: 74031 - DNA, 1229 bp, Homo sapiens
cagacaagtctctgtgttcaaagagcttacactcttgcagagatgaagatagacacccaaagagatctagaatgtgagttcaggtgttgacaagagccctggagggaacagagcagaaaaagcctcacttctaaacttctggaacccgcccaccactgccaagctcactattgaatccatgccgctcagtgtcgcagaggggaaggaggtgcttctacttgtccacaatctgccccagcatctttttggctacagctggtacaaaggggaaagagtggatggcaacagtctaattgtaggatatgtaataggaactcaacaagctaccccaggggccgcatacagcggtcgagagacaatatacaccaatgcatccctgctgatccagaatgtcacccagaatgacataggattctacaccctacaagtcataaagtcagatcttgtgaatgaagaagcaactggacagttccatgtatacccggagctgcccaagccctccatctccagcaacaactccaaccccaaggaggacaaggatgctgtggccttcacctgtgaacctgagattcacagcacaacctgcctgtagtgggtaaatggtcagagcctcccggtcagttccaggctgcagctgtccaatgacaagaggaccctcactctactcagtgtcacaaggaatgacacaggaccctatgagtgtgaaataccgaacccagtgggtgccagctacagtgacccagtcacgctgaatgtcctctgtatcttctgttcctctgtggcccaggcttccagcccaaatccacacagccagaggccaggcctctcagtccctctcaagtccagggactcagactctcacccaggctggccatcacttcctgtcccaagcaaacctgggcagacccagccttgaccaagaataggaggggagaggctgctcctgtcctgggaggctcagggtccacagcctgtgatgggagaaacaggtgaatatctcagacccagactcagtggacagattgggtttcgttaggacttcaaggttgtgacttggctcacagggacactgtggctcttccacagaccaggagcttccccttccctttgatgatatcatctatgactttattctcgctactccagatggaccgggcattcccaccatttcccccccatctactcttccaccaggacttagctcagtcttgatttttttcagggactcc

SEQ ID NO: 74032 - DNA, 235 bp, Homo sapiens
cagccctggatgggcccagagcctgggagacgccacaccctgttctgaggagactagaggggtccaggcctcttctctgttttaacaggaattgctaaaacatgacacaaacatttactgccggatggaccacaaagcagaagtggcttcttagcttcctccaggagctgctcctgtgggttgatggagagtccccaaggcccccagccctggggatggggaaggacatgaagcc

SEQ ID NO: 74033 - DNA, 314 bp, Homo sapiens
aacctgggcagacccagccttgaccaagaataggaggggagaggctgctcctgtcctgggaggctcagggtccacagcctgtgatgggagaaacaggtgaatatctcagacccagactcagtggacagattgggtttcgttaggacttcaaggttgtgacttggctcacagggacactgtggctcttccacagaccaggagcttccccttccctttgatgatatcatctatgactttattctcgctactccagatggaccgggcattcccaccatttcccccccagactcctattaccatccaggggcaaatct

SEQ ID NO: 74034 - DNA, 514 bp, Homo sapiens
gctcctcacacctttccactcagcattggttcaccctccatgcactgctggggttggagccaccgtcgctgatgggttaacagtcaccagcatgccatttgtttcatcacttcatggtaatttccttgcccacccggtgtggtcacccacgtgttgtctggcatgcatctctgtgtagtgcaccatcaatggctcaagtgaaccttttcttttgctgctcaaagctaccaagcaagactgtgaaggcaaaaggaaaacagtctcaaaattaagtaacaatgtggagagtactatttggttttcctcagacacatatatatctgtacctataaagtgtggctttttaaaccgattctatgacagaattatcaaaagatcagaatggttgaggccgtcaagtcagttggccatatttgcaagccaacatcgacatcctgggcagcattcagcgctttgagggtacggggtgcctgtggacagcaggtccgtctgtgttgcctttttcaagccaccg

SEQ ID NO: 74035 - DNA, 923 bp, Homo sapiens
gcagaccaggacccacagaggcacttgagctgggccacaggcatgaactaagagtgctgaagacctaggagaaccactggtcaggtcagctcccagctccacagggagtaagaaggagctgcaggcacagcaggctgaaagtccaccaagggctgaggccacaaggctctggggcagccacagttttcatgatcacatcatacaggactgagaagcagataacaagagtgacgctcacagggctgggctgacgctaacaggaggcagtgtgtggctcgaagattcttgaacccacagcagcagctgcggccaccccatcctgcccacagctccagccctgagacgacgaggaggagagtcgactttgcctcttgcccaagggaccatgcccaggtgccggtggctctccctgatcctcctcaccattcccctggccctggtggccaggaaagacccaaaaaagaatgagacgggggtgctgaggaaattaaaacccgtcaatgcctcaaatgccaacgtgaagcagtgtctgtggtttgccatgcaagaatacaacaaagagagcgaggacaagtatgtcttcctggtggtcaagacactgcaagcccagcttcaggtcacaaatcttctggaataccttattgatgtagaaattgcccgcagcgattgcagaaagcctttaagcactaatgaaatctgcgccattcaagaaaactccaagctgaaaaggaaattaagctgcagctttttggtaggagcacttccctggaatggtgaattcactgtgatggagaaaaagtgtgaagatgcttaatggtgttttgaggcatccctccaacctctgtgactactttatccatgaaaatgaagcaatggcaggtgggaggctcttcccaatgtgctttcttcatgcatgcctctct

SEQ ID NO: 74036 - DNA, 765 bp, Homo sapiens
gcagaccaggacccacagaggcacttgagctgggccacaggcatgaactaagagtgctgaagacctaggagaaccactggtcagctgggctgacgctaacaggaggcagtgtgtggctcgaagattcttgaacccacagcagcagctgcggccaccccatcctgcccacagctccagccctgagacgacgaggaggagagtcgactttgcctcttgcccaagggaccatgcccaggtgccggtggctctccctgatcctcctcaccattcccctggccctggtggccaggaaagacccaaaaaagaatgagacgggggtgctgaggaaattaaaacccgtcaatgcctcaaatgccaacgtgaagcagtgtctgtggtttgccatgcaagaatacaacaaagagagcgaggacaagtatgtcttcctggtggtcaagacactgcaagcccagcttcaggtcacaaatcttctggaataccttattgatgtagaaattgcccgcagcgattgcagaaagcctttaagcactaatgaaatctgcgccattcaagaaaactccaagctgaaaaggaaattaagctgcagctttttggtaggagcacttccctggaatggtgaattcactgtgatggagaaaaagtgtgaagatgcttaatggtgttttgaggcatccctccaacctctgtgactactttatccatgaaaatgaagcaatggcaggtgggaggctcttcccaatgtgctttcttcatgcatgcctctct

SEQ ID NO: 74037 - DNA, 381 bp, Homo sapiens
tggtggggacaaaccatatccaaaccatagcaaagttgtctcttttctcatgctatgactgccatgcctccatagctttcttgcaatcctcttccccctccattctcggcagatgtgtcaggcacatttacatgttcacatctcctttcctacaaccctttttctttttcagaaaagtgaaacttttttctaattcatatttcaacagtcctccttccagtgctgtttctctatagagtgactgtcatttgcccctcctttcctgtgctctagagcttatgatacatggctttagtataaacatccctcatacatcactggctggtgctccacatatctttattcctccttgccaaaagcagcaggcgatgacaaggatca

SEQ ID NO: 74038 - DNA, 427 bp, Homo sapiens
aaataaataaacatcatagtttatggtgaaaaattaaaagcatttcctttaagattaagaagaagataagggggccagttactgttacaataggtagacaggcatgagcagggcagagggctcttcccttgcccactaggaatgtcgggtgatggtctggcagttttcatattgcctaagtgataaattggcagccggcttcagggaaaggccatttcctaatggtccacacctgttgtgctaaagtgttaattgaaggcagggaccagggagaagtaatttcttgagcatgtgcattaagagacaaaatggcggaatatgaccttctgggggcacaccaccagaaaagggaagaaaacctcagatgggcatgtctacaacttcctaaacacactgcgcctgctcacctcccaagggtaaggagggc

SEQ ID NO: 74039 - DNA, 264 bp, Homo sapiens
tgtgaacattgactttggctggcagtcgtggcttaggagagtgatttgtattatatgatgagaccaggaccactttcccagattgaattagaatctgtacccaatttttcttcctctctctgggtagagggtacctgagaccgattatagagctgctcttttcagtaggatagctgttacccaatgtgactgtctaaatgaaaatcaactaaaataaaaaaaaaattcagttcctcggttgtactagcaacacttcaagtactc

SEQ ID NO: 74040 - DNA, 514 bp, Homo sapiens
tttaaatatttggaattggttttataatgccttgaatttgtggctctttaaagtttatttgagaattacatactcttaaaaatttgttgaaagctatagacccttgctggcctccgaaaaatttgtatctatacataagacaattttgcatgcagttttcaggagattcacaaaccctctgaaatccacatacctcagaattagaactagtcttacacattatattggtttttgctgcagagcattgttgaagcattctattatctctggctgaagatggtatataccttccttggtagttgaatgttaactcagatggacgtgttcctctttcttctacacttacttttcttacctatgtacatttttttattaaaaatgcccatgtttatagagaggtctatttctgtatgtcttgtgtctgttgcattagtgtgtccaacttaaatattaagctcccagatgcagtgccagcatcttattatatgtaatgttcagaacagtgcaatgtcta

SEQ ID NO: 74041 - DNA, 483 bp, Homo sapiens
ggccttttttttgttgttattttggagaccttggagcagtgacccttcagatcactgtaggcagagaaatggcttctctcttatgctttcagttcagcatattaacaatgaggagccaggtacttctttactaccactttgtaccaagatttgataataatatatcccaggaggcattacttttataaatttgtattcatgtaaattttcaaatgagaacagcttctaaagccccttccctgtattggagagttatgtatatttctaataagtattagaaagaagctgtttctcatgccacagtgatgctgaaggattcacatttggtacaatcgagtaacttgaacgccagattgttaacagtttattctctttccctggatttttaagctcatcttgacacaggtgagtctatccaaatctttgatgttgctagtgtgccctgagataacgagggcacatctttcaatgttgattccaaaa

SEQ ID NO: 74042 - DNA, 1439 bp, Homo sapiens
  misc_feature (1)..(1): n is a, c, g, or t
  misc_feature (5)..(5): n is a, c, g, or t
  misc_feature (7)..(7): n is a, c, g, or t
  misc_feature (413)..(413): n is a, c, g, or t
ntttntntgttgggtaaatttgaaagccttgtcttcaagctgtgaagttctttcttctgcttgttctagtctattgttgcaactttccagtacattttgtatttctctaagtgtatctttgatttctagaagttgtgattggttttttctttatgatatctgtttctctggagaatttttatctatatcctgtatttaaaaaaaattttctctaagttggttttcaccttctctggtatttccttgagtagcttaataatcaacctgctgaattctttatttggcaattcagagatttcttcttggttttgatctcttgctggggagctagtgtgatcttttgggggtgttataaaaccatgatttgtcatactaccagaattacttttctgattccttctcatttggttacnctatttcctaaaatttttcttggatttatttttgaatggattgtggttttcgttttttgttttgtggttgttggtgagaatttgattcttggtgcttgtaggggtgaagactctgtatgagatccttagttagagagagtttttgtgtgctgaatttccccaatgctggttgtagtaattatatttttggtgtgtgggcaagttcactgtctcctatggagttggaatgggagggatctcctgaaacttatcttgttctcttgtgttgtacactttatttatttatttatttaattttttcctggtgttttatttactgaattgatgattcaggcttaaggccatcagggaggtaaccctggctatgcaacagttatgactaaggtgggtaggtagatgtaatatccaatgaagggccaaggtcccagccttgatgagggtggctgagggagctctgaattagatgtactggggttttatcaagatgaagagtgggagttacttcagttccttgccaggtcatcaagaaaactgttcacctcacagcctcactcctgtcttggtgtttcagctattcagattggacaggtacctcttttcatctgtaggtaggtaggaattgtgactcatgtaggcctgaatctggagtgtggtcctcctgtggggctgcactcactctggattgttccagaaatgctgtctataggtgcctccatgttgcattcctgttggggaagcctcagctgtgtctgcagtggagtgccagaggggaacaaggacctcttctcaaggcccttcatgatcacagagccacctgcctgttggggtataggttcagacttggggtataggtactgtacccagcactgcaattgtgtctctgctgtgaggaaatatccaccagtggaaaaaacaaaaactcaaggcctgctgattcttttgtcccatggggtagtccccttgatgtggtgctttctcctttcccctagggaagggccttcctgcgaactggactgcagtgattgt

SEQ ID NO: 74043 - DNA, 809 bp, Homo sapiens
tccaagactgggctccacgttcccagctttgcaggcgtctccttgggacactggtggtcgaatctaggagtaatgaccaggagatactgagtagtgacgacaacaacgatgttaatgataataaacgggtctcagtctttataattttggtggtccgtgtttgttggccgtttactttttatcagtcaccgagtgttgtagtgttgttttaccgctctgcaaaacgggcttgtcattggggacctctgatcattttacagatgtggaaacctagggattgaggaactttgccacagtcacacacaagtaatggcagagctgggattcaaattcggttctgcctcgtgtgagcgtccacgatataaatattatgctgcctttttagtcaaaagtagaattaggacctaattcaaacatactgaatgtctattgggtacttggcgctttttgcatagtgagggagacattgaagtccactttttgtagaaaaggaaacacacattttttgatccgctcaagtgtttggctttgggcaagttaacctgcctacctgtctgtgcctccgttttctcaaatatcaaatgaaccggtcgcctgctggcttccgcctgtaatcccagcacttagggaggcagagggaagaggagcccttgagcctaggaattcgagatcatcctggcaacacagtgagaccccgttctctacaaaaaaaagaaacaaaaatcaataaataaaatgagaccaattaaacgtatttcataggaaacttaaaaggtatgacacatatacatttacagtagcactattgg

SEQ ID NO: 74044 - DNA, 398 bp, Homo sapiens
atgcatcgcgtgtcgactgctaagtgatccccgaaacttaatagtgagggagacattgaagtccactttttgtagaaaaggaaacacacattttttgatccgctcaagtgtttggctttgggcaagttaacctgcctacctgtctgtgcctccgttttctcaaatatcaaatgaaccggtcgcctgctggcttccgcctgtaatcccagcacttagggaggcagagggaagaggagcccttgagcctaggaattcgagatcatcctggcaacacagtgagaccccgttctctacaaaaaaaagaaacaaaaatcaataaataaaatgagaccaattaaacgtatttcataggaaacttaaaaggtatgacacatatacatttacagtagcactattgg

SEQ ID NO: 74045 - DNA, 457 bp, Homo sapiens
actccagactcctccagctgtcatggatcctgggccaggggatcccgcactcacccaaagtggggctttgggcggtggtgggccggttcagtggtggagcgtctttttgtccagctcagaacctgctgccggtccggtcccagaaaagtttctagcgggtgtagttgccaaaattagggtctgtcactgctgggctggcggtgggcgcctcatcccagccttggaaatccttgcctagtagcgggaagttctaaacagcaaaggatacaaggccccttgagcgcaagtgaatttcccctcttgcagcaacaggtgtcctccaaaccaagcagcgtccacgtgtgtgcggtggctggagttctgcagtggggtgtggggattgggaaggtgcacaggcagccgcttgagacccagaggcagttggggagaggcctggggctcagagcctttcttgttt

SEQ ID NO: 74046 - DNA, 424 bp, Homo sapiens
aagaatcaaatcatcttgacaaaacttcaatgggcaaaatttgccttggggaattttatgcaggggaatccttgggtctgatgtgtggtgggctttggatgtgttgtgtagctcagtgtcccttcctgctactcctagtcatctccagaaactcagaccacccatctactaaaggcaggtggatgagcaagggggcctcggaggcattccggatcacactgaacctgagccccaccgcctgacccactcagtgtcactgttaacagaaactcgctgccatctggcctcaggcctgcctccttcctatagaacttgacactggaagcaccaggcgagctggaccttctgctgctactgcactcccatgatgcagcctgagaatgaagcccaccagagtgacagagagcagacctgagtggtgagc

SEQ ID NO: 74047 - DNA, 387 bp, Homo sapiens
tgagtttgcaaagcattccctttgccaggttaggttgcgtggactgacaccttagagattttcacagcctatccggtctgagtcccacggagagcagaactcacgtgctgtccttgtgcaaaccccatccagaaatcaagcgttatgctttccgtcctggactggagccagatccgttgtcttttactttctggagagagtgccccctccaaccaagatttaaaacaaacgaaaccccagcagtgtgaggctcggggtaggaggagatgcctttgagaacaaaaccataaagtctgtacataaacaatgcatacagactagcaaaaatcaaatgacttcccccaggcagcagggcttcaagagagcctggttaaatgttttcaccct

SEQ ID NO: 74048 - DNA, 350 bp, Homo sapiens
tttgcaatgccagaataacagtggatactcaataaattgaatagttaatccagattatgtttcctccaatttaagcttttctggttttttaaattcccccttcctagaatcagttttatcattttacctatgtacaataatatatttctggaaaatgctagaattttcaccatgtagtagaatttgagcacgacaataatgtaaaaaaattcagaagtctcaaactaggtagctttctttgagttttcaaagtaaatcaagatagagctgttttcattttactatattgtggaaatctatggatgttagtgtaaaatgcatgtgcattacactgacttaaaatgttttga

SEQ ID NO: 74049 - DNA, 150 bp, Homo sapiens
ggtttatccactgcagttctgttcacaccagaaaaagattggaaataatccaatgtttctcaagaaatagtttgtggtacaaagaatggaatactatgtcattttttaaaagcagtaagaaaaaatgtggtgttttctatgtatacgggg

SEQ ID NO: 74050 - DNA, 4911 bp, Homo sapiens
acctgcgtgcagtcggtcctccaggccacgcagcgcccgagagtaccagggagactccggcccctgtcggccgccaagcccctccgcccctcacagcgcccaggtccgcggccgggccttgattttttggcggggaccgtcatggcgtcgcagccaaattcgtctgcgaagaagaaagaggagaaggggaagaacatccaggtggtggtgagatgcagaccatttaatttggcagagcggaaagctagcgcccattcaatagtagaatgtgatcctgtacgaaaagaagttagtgtacgaactggaggattggctgacaagagctcaaggaaaacatacacttttgatatggtgtttggagcatctactaaacagattgatgtttaccgaagtgttgtttgtccaattctggatgaagttattatgggctataattgcactatctttgcgtatggccaaactggcactggaaaaacttttacaatggaaggtgaaaggtcacctaatgaagagtatacctgggaagaggatcccttggctggtataattccacgtacccttcatcaaatttttgagaaacttactgataatggtactgaattttcagtcaaagtgtctctgttggagatctataatgaagagctttttgatcttcttaatccatcatctgatgtttctgagagactacagatgtttgatgatccccgtaacaagagaggagtgataattaaaggtttagaagaaattacagtacacaacaaggatgaagtctatcaaattttagaaaagggggcagcaaaaaggacaactgcagctactctgatgaatgcatactctagtcgttcccactcagttttctctgttacaatacatatgaaagaaactacgattgatggagaagagcttgttaaaatcggaaagttgaacttggttgatcttgcaggaagtgaaaacattggccgttctggagctgttgataagagagctcgggaagctggaaatataaatcaatccctgttgactttgggaagggtcattactgcccttgtagaaagaacacctcatgttccttatcgagaatctaaactaactagaatcctccaggattctcttggagggcgtacaagaacatctataattgcaacaatttctcctgcatctctcaatcttgaggaaactctgagtacattggaatatgctcatagagcaaagaacatattgaataagcctgaagtgaatcagaaactcaccaaaaaagctcttattaaggagtatacggaggagatagaacgtttaaaacgagatcttgctgcagcccgtgagaaaaatggagtgtatatttctgaagaaaattttagagtcatgagtggaaaattaactgttcaagaagagcagattgtagaattgattgaaaaaattggtgctgttgaggaggagctgaatagggttacagagttgtttatggataataaaaatgaacttgaccagtgtaaatctgacctgcaaaataaaacacaagaacttgaaaccactcaaaaacatttgcaagaaactaaattacaacttgttaaagaagaatatatcacatcagctttggaaagtactgaggagaaacttcatgatgctgccagcaagctgcttaacacagttgaagaaactacaaaagatgtatctggtctccattccaaactggatcgtaagaaggcagttgaccaacacaatgcagaagctcaggatatttttggcaaaaacctgaatagtctgtttaataatatggaagaattaattaaggatggcagctcaaagcaaaaggccatgctagaagtacataagaccttatttggtaatctgctgtcttccagtgtctctgcattagataccattactacagtagcacttggatctctcacatctattccagaaaatgtgtctactcatgtttctcagatttttaatatgatactaaaagaacaatcattagcagcagaaagtaaaactgtactacaggaattgattaatgtactcaagactgatcttctaagttcactggaaatgattttatccccaactgtggtgtctatactgaaaatcaatagtcaactaaagcatattttcaagacttcattgacagtggccgataagatagaagatcaaaaaaaggaactagatggctttctcagtatactgtgtaacaatctacatgaactacaagaaaataccatttgttccttggttgagtcacaaaagcaatgtggaaacctaactgaagacctgaagacaataaagcagacccattcccaggaactttgcaagttaatgaatctttggacagagagattctgtgctttggaggaaaagtgtgaaaatatacagaaaccacttagtagtgtccaggaaaatatacagcagaaatctaaggatatagtcaacaaaatgacttttcacagtcaaaaattttgtgctgattctgatggcttctcacaggaactcagaaattttaaccaagaaggtacaaaattggttgaagaatctgtgaaacactctgataaactcaatggcaacctggaaaaaatatctcaagagactgaacagagatgtgaatctctgaacacaagaacagtttatttttctgaacagtgggtatcttccttaaatgaaagggaacaggaacttcacaacttattggaggttgtaagccaatgttgtgaggcttcaagttcagacatcactgagaaatcagatggacgtaaggcagctcatgagaaacagcataacatttttcttgatcagatgactattgatgaagataaattgatagcacaaaatctagaacttaatgaaaccataaaaattggtttgactaagcttaattgctttctggaacaggatctgaaactggatatcccaacaggtacgacaccacagaggaaaagttatttatacccatcaacactggtaagaactgaaccacgtgaacatctccttgatcagctgaaaaggaaacagcctgagctgttaatgatgctaaactgttcagaaaacaacaaagaagagacaattccggatgtggatgtagaagaggcagttctggggcagtatactgaagaacctctaagtcaagagccatctgtagatgctggtgtggattgttcatcaattggcggggttccatttttccagcataaaaaatcacatggaaaagacaaagaaaacagaggcattaacacactggagaggtctaaagtggaagaaactacagagcacttggttacaaagagcagattacctctgcgagcccagatcaacctttaattcacttgggggttggcaattttatttttaaagaaaacttaaaaataaaacctgaaaccccagaacttgagccttgtgtatagattttaaaagaatatatatatcagccgggcgcggtggctcatgcctgtaatcccagcactttgggaggctgaggcgggtggattgcttgagcccaggagtttgagaccagcctggccaacgtggcaaaacctcgtctctgttaaaaattagccgggcgtggtggcacactcctgtaatcccagctactggggaggctgaggcacgagaatcacttgaacccaggaagcggggttgcagtgagccaaaggtacaccactacactccagcctgggcaacagagcaagactcggtctcaaaaacaaaatttaaaaaagatataaggcagtactgtaaattcagttgaattttgatatctacccatttttctgtcatccctatagttcactttgtattaaattgggtttcatttgggatttgcaatgtaaatacgtatttctagttttcatataaagtagttcttttataacaaatgaaaagtatttttcttgtatattattaagtaatgaatatataagaactgtactcttctcagcttgagcttacataggtaaatatcaccaacatctgtccttagaaaggaccatctcatgttttttttcttgctatgacttgtgtattttcttgcctcctccctagacttccctatttcgctttctcctcggctcactttctccctttttatttttcaccaaaccatttgtagagctacaaaaggtatcctttcttattttcagtagtcagaattttatctagaaatcttttaacacctttttagtggttatttctaaaatcactgtcaacaataaatctaaccctagttgtatccctcctttcagtatttttcacttgttgccccaaatgtgaaagcatttcattcctttaagaggcctaactcattcaccctgacagagttcacaaaaagcccactttagagtatacattgctattatgggagaccacccagacatctgactaatggctctgtgcccacactccaagacctgtgccttttagagaagctcacaatgatttaaggactgtttgaaacttccaattatgtctataatttatattcttttgtttacatgatgaaactttttgttgttgcttgtttgtatataatacaatgtgtacatgtatctttttctcgattcaaatcttaacccttaggactctggtatttttgatctggcaaccatatttctggaagttgagatgtttcagcttgaagaaccaaaacagaaggaatatgtacaaagaataaattttctgctcacgatgagtttagtgtgtaaagtttagagacatctgactttgatagctaaattaaaccaaaccctattgaagaattgaatatatgctacttcaagaaactaaattgatctcgtagaattatcttaataaaataatggctataatttctctgcaaaatcagatgtcagcataagcgatggataatacctaataaactgccctcagtaaatccatggttaataaatgtggtttctacattaa

SEQ ID NO: 74051 - DNA, 747 bp, Homo sapiens
tcagtcatctcccaccaggtccctcccgcaacgcgtgggaattatgggagctacaagatgagatttaggtggggacacagagccaaaccatattaaggggttacatcttcaagtggcttactgagtccttttgattaacctagtaggctttgcttagcttatttccttgtcttatttgacaagatgttccgtattcatcttgaatattttctgcctcagtcctggaatcagatgcttttataaggaatcctggttcattttagtgtgaattactcctaccaacctgggtactggaggttgtggtttttcttgggaagtccatatttctagaatgagtgtatttaaaaaggagctttgaaagactttatttctaaacaaattaatattgattaaaaagtatggttataactttttatcatacttctttaagttttaaaagacataaaaaggctaactttacattttatttgttgcatgtccttcccaaactgaatgaaaaaagtactaaactgacacctacaacattcctcttgtgtaggagtatacggaggagatagaacgtttaaaacgagatcttgctgcagcccgtgagaaaaatggagtgtatatttctgaagaaaattttaggtaagcccttggctatggagttaatttccaagaataagcatttctgataacaggctatttgaagtaaaacttatgtagcagtaagtaaaatctttatatccagtgccgataaatacttca

SEQ ID NO: 74052 - DNA, 5866 bp, Homo sapiens
  misc_feature (5865)..(5865): n is a, c, g, or t
acctgcgtgcagtcggtcctccaggccacgcagcgcccgagagtaccagggagactccggcccctgtcggccgccaagcccctccgcccctcacagcgcccaggtccgcggccgggccttgattttttggcggggaccgtcatggcgtcgcagccaaattcgtctgcgaagaagaaagaggagaaggggaagaacatccaggtggtggtgagatgcagaccatttaatttggcagagcggaaagctagcgcccattcaatagtagaatgtgatcctgtacgaaaagaagttagtgtacgaactggaggattggctgacaagagctcaaggaaaacatacacttttgatatggtgtttggagcatctactaaacagattgatgtttaccgaagtgttgtttgtccaattctggatgaagttattatgggctataattgcactatctttgcgtatggccaaactggcactggaaaaacttttacaatggaaggtgaaaggtcacctaatgaagagtatacctgggaagaggatcccttggctggtataattccacgtacccttcatcaaatttttgagaaacttactgataatggtactgaattttcagtcaaagtgtctctgttggagatctataatgaagagctttttgatcttcttaatccatcatctgatgtttctgagagactacagatgtttgatgatccccgtaacaagagaggagtgataattaaaggtttagaagaaattacagtacacaacaaggatgaagtctatcaaattttagaaaagggggcagcaaaaaggacaactgcagctactctgatgaatgcatactctagtcgttcccactcagttttctctgttacaatacatatgaaagaaactacgattgatggagaagagcttgttaaaatcggaaagttgaacttggttgatcttgcaggaagtgaaaacattggccgttctggagctgttgataagagagctcgggaagctggaaatataaatcaatccctgttgactttgggaagggtcattactgcccttgtagaaagaacacctcatgttccttatcgagaatctaaactaactagaatcctccaggattctcttggagggcgtacaagaacatctataattgcaacaatttctcctgcatctctcaatcttgaggaaactctgagtacattggaatatgctcatagagcaaagaacatattgaataagcctgaagtgaatcagaaactcaccaaaaaagctcttattaaggagtatacggaggagatagaacgtttaaaacgagatcttgctgcagcccgtgagaaaaatggagtgtatatttctgaagaaaattttagagtcatgagtggaaaattaactgttcaagaagagcagattgtagaattgattgaaaaaattggtgctgttgaggaggagctgaatagggttacagagttgtttatggataataaaaatgaacttgaccagtgtaaatctgacctgcaaaataaaacacaagaacttgaaaccactcaaaaacatttgcaagaaactaaattacaacttgttaaagaagaatatatcacatcagctttggaaagtactgaggagaaacttcatgatgctgccagcaagctgcttaacacagttgaagaaactacaaaagatgtatctggtctccattccaaactggatcgtaagaaggcagttgaccaacacaatgcagaagctcaggatatttttggcaaaaacctgaatagtctgtttaataatatggaagaattaattaaggatggcagctcaaagcaaaaggccatgctagaagtacataagaccttatttggtaatctgctgtcttccagtgtctctgcattagataccattactacagtagcacttggatctctcacatctattccagaaaatgtgtctactcatgtttctcagatttttaatatgatactaaaagaacaatcattagcagcagaaagtaaaactgtactacaggaattgattaatgtactcaagactgatcttctaagttcactggaaatgattttatccccaactgtggtgtctatactgaaaatcaatagtcaactaaagcatattttcaagacttcattgacagtggccgataagatagaagatcaaaaaaaggaactagatggctttctcagtatactgtgtaacaatctacatgaactacaagaaaataccatttgttccttggttgagtcacaaaagcaatgtggaaacctaactgaagacctgaagacaataaagcagacccattcccaggaactttgcaagttaatgaatctttggacagagagattctgtgctttggaggaaaagtgtgaaaatatacagaaaccacttagtagtgtccaggaaaatatacagcagaaatctaaggatatagtcaacaaaatgacttttcacagtcaaaaattttgtgctgattctgatggcttctcacaggaactcagaaattttaaccaagaaggtacaaaattggttgaagaatctgtgaaacactctgataaactcaatggcaacctggaaaaaatatctcaagagactgaacagagatgtgaatctctgaacacaagaacagtttatttttctgaacagtgggtatcttccttaaatgaaagggaacaggaacttcacaacttattggaggttgtaagccaatgttgtgaggcttcaagttcagacatcactgagaaatcagatggacgtaaggcagctcatgagaaacagcataacatttttcttgatcagatgactattgatgaagataaattgatagcacaaaatctagaacttaatgaaaccataaaaattggtttgactaagcttaattgctttctggaacaggatctgaaactggatatcccaacaggtacgacaccacagaggaaaagttatttatacccatcaacactggtaagaactgaaccacgtgaacatctccttgatcagctgaaaaggaaacagcctgagctgttaatgatgctaaactgttcagaaaacaacaaagaagagacaattccggatgtggatgtagaagaggcagttctggggcagtatactgaagaacctctaagtcaagagccatctgtagatgctggtgtggattgttcatcaattggcggggttccatttttccagcataaaaaatcacatggaaaagacaaagaaaacagaggcattaacacactggagaggtctaaagtggaagaaactacagagcacttggttacaaagagcagattacctctgcgagcccagatcaacctttaattcacttgggggttggcaattttatttttaaagaaaacttaaaaataaaacctgaaaccccagaacttgagccttgtgtatagattttaaaagaatatatatatcagccgggcgcggtggctcatgcctgtaatcccagcactttgggaggctgaggcgggtggattgcttgagcccaggagtttgagaccagcctggccaacgtggcaaaacctcgtctctgttaaaaattagccgggcgtggtggcacactcctgtaatcccagctactggggaggctgaggcacgagaatcacttgaacccaggaagcggggttgcagtgagccaaaggtacaccactacactccagcctgggcaacagagcaagactcggtctcaaaaacaaaatttaaaaaagatataaggcagtactgtaaattcagttgaattttgatatctacccatttttctgtcatccctatagttcactttgtattaaattgggtttcatttgggatttgcaatgtaaatacgtatttctagttttcatataaagtagttcttttataacaaatgaaaagtatttttcttgtatattattaagtaatgaatatataagaactgtactcttctcagcttgagcttacataggtaaatatcaccaacatctgtccttagaaaggaccatctcatgttttttttcttgctatgacttgtgtattttcttgcctcctccctagacttccctatttcgctttctcctcggctcactttctccctttttatttttcaccaaaccatttgtagagctacaaaaggtatcctttcttattttcagtagtcagaattttatctagaaatcttttaacacctttttagtggttatttctaaaatcactgtcaacaataaatctaaccctagttgtatccctcctttcagtatttttcacttgttgccccaaatgtgaaagcatttcattcctttaagaggcctaactcattcaccctgacagagttcacaaaaagcccactttagagtatacattgctattatgggagaccacccagacatctgactaatggctctgtgcccacactccaagacctgtgccttttagagaagctcacaatgatttaaggactgtttgaaacttccaattatgtctataatttatattcttttgtttacatgatgaaactttttgttgttgcttgtttgtatataatacaatgtgtacatgtatctttttctcgattcaaatcttaacccttaggactctggtatttttgatctggcaaccatatttctggaagttgagatgtttcagcttgaagaaccaaaacagaaggaatatgtacaaagaataaattttctgctcacgatgagtttagtgtgtaaagtttagagacatctgactttgatagctaaattaaaccaaaccctattgaagaattgaatatatgctacttcaagaaactaaattgatctcgtagaattatcttaataaaataatggctataatttctctgcaaaatcagatgtcagcataagcgatggataatacctaataaactgccctcagtaaatccatggttaataaatgtggtttctacattaaaaaaaaaaaaaaaaaaaaaaaaaaaaaaaaaaaaaaaaaaaaaaaaaaaaaaaaaaaaaaaaaaaaaaaaaaaaaaaaaaaaaaaaaaaaaaaaaaacaagaaggaggggcgcgcccccactaaaccacccgccgcgccgacggcgccacgatagacccacccccgccgatttttttcgagacaaaaggggccgccaccactgatcgcagtcggtcttttaataaaaccaccacaggcgcgccgccgccgctgtcaaccaaccagctccaagtgagacgggagaccaaagcaacgccaccgacggaccgatagtgagcagcaagcaccacaccatcggcggggggcgaacaaaactaacggacaccacacactacagcgaaaggaagcaaccaccccccagcggagagaggacacacacagcggaccagccgttagttcggaggcaaccacagaagtatgactaagacgaggcgtcagaaaacaacccttgccactcggaggcaagctctgactgaaaaccaatatacacccccgccgagggacctaataacaaaaacgcgagagcagacgcccgtacgcaccgaacaccaggcaagaacacaacgagcgacagcacacgcagccgaccagcgggcaacagacaacgcacaccaagccccaagaaagacatgaaaccagcgaacacaaacgacagagacgcccatcctgccacagcaacgacacaccaggacccaccccaccaagccagcagccaagacagtcagaggtaagcagcgcaatcccaagccgcgagagacacaaacagcactagaagcgcagcaggcgagaagcaccaacagcagacaacacacgcaaccataacaagagtaccggcgaacagacgcacacgccaagtacggtaacgcactagacaacaacaaaaaaccgaagctcacgggcagacacaaatgtcna

SEQ ID NO: 74053 - DNA, 4180 bp, Homo sapiens
tcagtcatctcccaccaggtccctcccgcaacgcgtgggaattatgggagctacaagatgagatttaggtggggacacagagccaaaccatattaaggggttacatcttcaagtggcttactgagtccttttgattaacctagtaggctttgcttagcttatttccttgtcttatttgacaagatgttccgtattcatcttgaatattttctgcctcagtcctggaatcagatgcttttataaggaatcctggttcattttagtgtgaattactcctaccaacctgggtactggaggttgtggtttttcttgggaagtccatatttctagaatgagtgtatttaaaaaggagctttgaaagactttatttctaaacaaattaatattgattaaaaagtatggttataactttttatcatacttctttaagttttaaaagacataaaaaggctaactttacattttatttgttgcatgtccttcccaaactgaatgaaaaaagtactaaactgacacctacaacattcctcttgtgtaggagtatacggaggagatagaacgtttaaaacgagatcttgctgcagcccgtgagaaaaatggagtgtatatttctgaagaaaattttagagtcatgagtggaaaattaactgttcaagaagagcagattgtagaattgattgaaaaaattggtgctgttgaggaggagctgaatagggttacagagttgtttatggataataaaaatgaacttgaccagtgtaaatctgacctgcaaaataaaacacaagaacttgaaaccactcaaaaacatttgcaagaaactaaattacaacttgttaaagaagaatatatcacatcagctttggaaagtactgaggagaaacttcatgatgctgccagcaagctgcttaacacagttgaagaaactacaaaagatgtatctggtctccattccaaactggatcgtaagaaggcagttgaccaacacaatgcagaagctcaggatatttttggcaaaaacctgaatagtctgtttaataatatggaagaattaattaaggatggcagctcaaagcaaaaggccatgctagaagtacataagaccttatttggtaatctgctgtcttccagtgtctctgcattagataccattactacagtagcacttggatctctcacatctattccagaaaatgtgtctactcatgtttctcagatttttaatatgatactaaaagaacaatcattagcagcagaaagtaaaactgtactacaggaattgattaatgtactcaagactgatcttctaagttcactggaaatgattttatccccaactgtggtgtctatactgaaaatcaatagtcaactaaagcatattttcaagacttcattgacagtggccgataagatagaagatcaaaaaaaggaactagatggctttctcagtatactgtgtaacaatctacatgaactacaagaaaataccatttgttccttggttgagtcacaaaagcaatgtggaaacctaactgaagacctgaagacaataaagcagacccattcccaggaactttgcaagttaatgaatctttggacagagagattctgtgctttggaggaaaagtgtgaaaatatacagaaaccacttagtagtgtccaggaaaatatacagcagaaatctaaggatatagtcaacaaaatgacttttcacagtcaaaaattttgtgctgattctgatggcttctcacaggaactcagaaattttaaccaagaaggtacaaaattggttgaagaatctgtgaaacactctgataaactcaatggcaacctggaaaaaatatctcaagagactgaacagagatgtgaatctctgaacacaagaacagtttatttttctgaacagtgggtatcttccttaaatgaaagggaacaggaacttcacaacttattggaggttgtaagccaatgttgtgaggcttcaagttcagacatcactgagaaatcagatggacgtaaggcagctcatgagaaacagcataacatttttcttgatcagatgactattgatgaagataaattgatagcacaaaatctagaacttaatgaaaccataaaaattggtttgactaagcttaattgctttctggaacaggatctgaaactggatatcccaacaggtacgacaccacagaggaaaagttatttatacccatcaacactggtaagaactgaaccacgtgaacatctccttgatcagctgaaaaggaaacagcctgagctgttaatgatgctaaactgttcagaaaacaacaaagaagagacaattccggatgtggatgtagaagaggcagttctggggcagtatactgaagaacctctaagtcaagagccatctgtagatgctggtgtggattgttcatcaattggcggggttccatttttccagcataaaaaatcacatggaaaagacaaagaaaacagaggcattaacacactggagaggtctaaagtggaagaaactacagagcacttggttacaaagagcagattacctctgcgagcccagatcaacctttaattcacttgggggttggcaattttatttttaaagaaaacttaaaaataaaacctgaaaccccagaacttgagccttgtgtatagattttaaaagaatatatatatcagccgggcgcggtggctcatgcctgtaatcccagcactttgggaggctgaggcgggtggattgcttgagcccaggagtttgagaccagcctggccaacgtggcaaaacctcgtctctgttaaaaattagccgggcgtggtggcacactcctgtaatcccagctactggggaggctgaggcacgagaatcacttgaacccaggaagcggggttgcagtgagccaaaggtacaccactacactccagcctgggcaacagagcaagactcggtctcaaaaacaaaatttaaaaaagatataaggcagtactgtaaattcagttgaattttgatatctacccatttttctgtcatccctatagttcactttgtattaaattgggtttcatttgggatttgcaatgtaaatacgtatttctagttttcatataaagtagttcttttataacaaatgaaaagtatttttcttgtatattattaagtaatgaatatataagaactgtactcttctcagcttgagcttacataggtaaatatcaccaacatctgtccttagaaaggaccatctcatgttttttttcttgctatgacttgtgtattttcttgcctcctccctagacttccctatttcgctttctcctcggctcactttctccctttttatttttcaccaaaccatttgtagagctacaaaaggtatcctttcttattttcagtagtcagaattttatctagaaatcttttaacacctttttagtggttatttctaaaatcactgtcaacaataaatctaaccctagttgtatccctcctttcagtatttttcacttgttgccccaaatgtgaaagcatttcattcctttaagaggcctaactcattcaccctgacagagttcacaaaaagcccactttagagtatacattgctattatgggagaccacccagacatctgactaatggctctgtgcccacactccaagacctgtgccttttagagaagctcacaatgatttaaggactgtttgaaacttccaattatgtctataatttatattcttttgtttacatgatgaaactttttgttgttgcttgtttgtatataatacaatgtgtacatgtatctttttctcgattcaaatcttaacccttaggactctggtatttttgatctggcaaccatatttctggaagttgagatgtttcagcttgaagaaccaaaacagaaggaatatgtacaaagaataaattttctgctcacgatgagtttagtgtgtaaagtttagagacatctgactttgatagctaaattaaaccaaaccctattgaagaattgaatatatgctacttcaagaaactaaattgatctcgtagaattatcttaataaaataatggctataatttctctgcaaaatcagatgtcagcataagcgatggataatacctaataaactgccctcagtaaatccatggttaataaatgtggtttctacattaa

SEQ ID NO: 74054 - DNA, 3156 bp, Homo sapiens
cccccctccttaggggccaaccccccccccccccacaaaaaaaaaaaaaaaaaagaatggagaatggaaatgtaaattttaatgtgaatgtttagctaccaaagtatttaagatatcatttagaaaggtttacagaagtggaaatattctttttaaagacctatttgtttatttctgaaaccagaatgtactcaagactgatcttctaagttcactggaaatgattttatccccaactgtggtgtctatactgaaaatcaatagtcaactaaagcatattttcaagacttcattgacagtggccgataaggtaacaaatgctatgttcttaatatctcaaaattgatgtgttgtttaagaaggaaactcatttttgtttcttcaaagatagaagatcaaaaaaaggaactagatggctttctcagtatactgtgtaacaatctacatgaactacaagaaaataccatttgttccttggttgagtcacaaaagcaatgtggaaacctaactgaagacctgaagacaataaagcagacccattcccaggaactttgcaagttaatgaatctttggacagagagattctgtgctttggaggaaaagtgtgaaaatatacagaaaccacttagtagtgtccaggaaaatatacagcagaaatctaaggatatagtcaacaaaatgacttttcacagtcaaaaattttgtgctgattctgatggcttctcacaggaactcagaaattttaaccaagaaggtacaaaattggttgaagaatctgtgaaacactctgataaactcaatggcaacctggaaaaaatatctcaagagactgaacagagatgtgaatctctgaacacaagaacagtttatttttctgaacagtgggtatcttccttaaatgaaagggaacaggaacttcacaacttattggaggttgtaagccaatgttgtgaggcttcaagttcagacatcactgagaaatcagatggacgtaaggcagctcatgagaaacagcataacatttttcttgatcagatgactattgatgaagataaattgatagcacaaaatctagaacttaatgaaaccataaaaattggtttgactaagcttaattgctttctggaacaggatctgaaactggatatcccaacaggtacgacaccacagaggaaaagttatttatacccatcaacactggtaagaactgaaccacgtgaacatctccttgatcagctgaaaaggaaacagcctgagctgttaatgatgctaaactgttcagaaaacaacaaagaagagacaattccggatgtggatgtagaagaggcagttctggggcagtatactgaagaacctctaagtcaagagccatctgtagatgctggtgtggattgttcatcaattggcggggttccatttttccagcataaaaaatcacatggaaaagacaaagaaaacagaggcattaacacactggagaggtctaaagtggaagaaactacagagcacttggttacaaagagcagattacctctgcgagcccagatcaacctttaattcacttgggggttggcaattttatttttaaagaaaacttaaaaataaaacctgaaaccccagaacttgagccttgtgtatagattttaaaagaatatatatatcagccgggcgcggtggctcatgcctgtaatcccagcactttgggaggctgaggcgggtggattgcttgagcccaggagtttgagaccagcctggccaacgtggcaaaacctcgtctctgttaaaaattagccgggcgtggtggcacactcctgtaatcccagctactggggaggctgaggcacgagaatcacttgaacccaggaagcggggttgcagtgagccaaaggtacaccactacactccagcctgggcaacagagcaagactcggtctcaaaaacaaaatttaaaaaagatataaggcagtactgtaaattcagttgaattttgatatctacccatttttctgtcatccctatagttcactttgtattaaattgggtttcatttgggatttgcaatgtaaatacgtatttctagttttcatataaagtagttcttttataacaaatgaaaagtatttttcttgtatattattaagtaatgaatatataagaactgtactcttctcagcttgagcttacataggtaaatatcaccaacatctgtccttagaaaggaccatctcatgttttttttcttgctatgacttgtgtattttcttgcctcctccctagacttccctatttcgctttctcctcggctcactttctccctttttatttttcaccaaaccatttgtagagctacaaaaggtatcctttcttattttcagtagtcagaattttatctagaaatcttttaacacctttttagtggttatttctaaaatcactgtcaacaataaatctaaccctagttgtatccctcctttcagtatttttcacttgttgccccaaatgtgaaagcatttcattcctttaagaggcctaactcattcaccctgacagagttcacaaaaagcccactttagagtatacattgctattatgggagaccacccagacatctgactaatggctctgtgcccacactccaagacctgtgccttttagagaagctcacaatgatttaaggactgtttgaaacttccaattatgtctataatttatattcttttgtttacatgatgaaactttttgttgttgcttgtttgtatataatacaatgtgtacatgtatctttttctcgattcaaatcttaacccttaggactctggtatttttgatctggcaaccatatttctggaagttgagatgtttcagcttgaagaaccaaaacagaaggaatatgtacaaagaataaattttctgctcacgatgagtttagtgtgtaaagtttagagacatctgactttgatagctaaattaaaccaaaccctattgaagaattgaatatatgctacttcaagaaactaaattgatctcgtagaattatcttaataaaataatggctataatttctctgcaaaatcagatgtcagcataagcgatggataatacctaataaactgccctcagtaaatccatggttaataaatgtggtttctacattaa

SEQ ID NO: 74055 - DNA, 1204 bp, Homo sapiens
gtagtttcttctgaatgcttgcttatatagcatacaatggagggtgggctgttaaaatgaggcaataacctgtttcattcggggtcaatgtgttcaagaaagaaagcttgatatcctgtcaagtgtttatgaaatatattactgtgtttctaagacttcataaagaatctcagaagcttccagtttgaagcctgagattatggcttgagtttgtataagggacaaagaaaccagattatggttatttttcctttcactttgtgatgatttcaccagttacaacagctcttgctatgacttgtgtattttcttgcctcctccctagacttccctatttcgctttctcctcggctcactttctccctttttatttttcaccaaaccatttgtagagctacaaaaggtatcctttcttattttcagtagtcagaattttatctagaaatcttttaacacctttttagtggttatttctaaaatcactgtcaacaataaatctaaccctagttgtatccctcctttcagtatttttcacttgttgccccaaatgtgaaagcatttcattcctttaagaggcctaactcattcaccctgacagagttcacaaaaagcccactttagagtatacattgctattatgggagaccacccagacatctgactaatggctctgtgcccacactccaagacctgtgccttttagagaagctcacaatgatttaaggactgtttgaaacttccaattatgtctataatttatattcttttgtttacatgatgaaactttttgttgttgcttgtttgtatataatacaatgtgtacatgtatctttttctcgattcaaatcttaacccttaggactctggtatttttgatctggcaaccatatttctggaagttgagatgtttcagcttgaagaaccaaaacagaaggaatatgtacaaagaataaattttctgctcacgatgagtttagtgtgtaaagtttagagacatctgactttgatagctaaattaaaccaaaccctattgaagaattgaatatatgctacttcaagaaactaaattgatctcgtagaattatcttaataaaataatggctataatttctctgcaaaatcagatgtcagcataagcgatggataatacctaataaactgccctcagtaaatccatggttaataaatgtggtttctacattaa

SEQ ID NO: 74056 - DNA, 464 bp, Homo sapiens
attttaaactggataattctttgttgtgatgggctttcctgtggactgtactatgttggtacacaagaaaaacagtgtactatgtgaatactcactcaaagccagtagcactccctgattgtaacaccaaaaaagtctctcagcattgccaaatgtcccctgtggcagcagaatcactccctgatgagaaccactaccctggagtaaaatctataactatgtcttagaaaataacacagaaaattaatatttctttcactctactccttccattagtgatcaaataaagaaggcatttggcgctacttgccaaattgttggctcaaacttgtgctgaaccttttttggttttctacacttaagtttttttgcctataacccagagaactttgaaaatagagtgtagttaatgtgtatctaatgttactttgtattgacttaattttcccgccttaaatccacag

SEQ ID NO: 74057 - DNA, 910 bp, Homo sapiens
tgtgtgtgtgtgtgtgtgtgttgggaagagggaacattagacttatctgaaagtttagaaaatactacagaaagacacatccttattgattgacagatattctcctgcaaacactctgtcttctccccattgtgtagactctggaaagttattgtaattgttgatttcaggtcagcctctactctacctgcagcttggtctctggttttcaaattctgtagaaatttttacagctgtttgacttccttagacatgagacatgtactagatggcaatagcaggggacgtatcccctacactcctgtcctggtccaatgcctaacccatggggaacactcaatacatttatttgaactgaaatgaacctggttggtgggcgaggccgctaggggtagaggcagttggggaggaaggtggcagccatgtgcatgttggagatatgtgagtagctttaggtatctggaccccaaccagcccagtgaagagggtagagatgcaagacttgtagatatgacatcagagggtggcaaataatctgggtccctagcatgctgggcagcctgaggcgacggtccggtcagccaggctcagccaagcccctgagagcatctcgcaggaggtaccgttctgtccccagctgagaggcactaaggctttcccagcagaggttcagccctaccagagccgctcaggggaatgtgcagaaggaggacaagggaagcaactacctgacatcactctgccctgcttgtcaagacaaaacaacatgaatattaatttctcaggcataataaggtgtggaggagcaggagtgggcagggccattgtgtgggaggctgctccttcctgccatttgtcaccggcaggagtgatagatggttcttccaggcagcttcccaattagatggat

SEQ ID NO: 74058 - DNA, 792 bp, Homo sapiens
gactttcttttgtgataggtactagggatgcagagatgaataatacaaggtctcgaccttcaaggagctcagggtttagtagggaaaacagaggtataagtaagtcattgcaatgccaggtcccagatatgggaggattccagcaaagagaggataaggccaggcacagccgctcatgcctatagtcccaacactttgggaagctgagatgggaggatcacttaagcccagcagttcaaggctaccctgggcaacatagtgagtggcaaaaaatacaaaaattagccaggcagggtggcacatgcctgtggtcccagttatttgggagtttgaggtgggagaatcacctgagcctgggagattgaggctgcagtgagctgtgatcacgccactgcactccagcctgggtgacacagtgagaggtgagagcctgtatctaaaaaaaaaaaaaagagaggatcagatttacctggagaggtcagagaaggtttccagagggagtaaaacttgagcttcattttgaagaatgagaggggaatacaaggagggaaaaataataggaacaagacctgttcctgttacagcaaacctgtaactcccaccatggaatgggcacgttttcctgtagacatttggagccagtgtgggcttcaagcctagggggctgatatgatcatttgtcaatctgaagatgactcttggaacaacgtagaggatagggtgaggtgggtaggctggtggctgacagactaggtcaggagagggctgaccaagaggaggaggggtgacgag

SEQ ID NO: 74059 - DNA, 1408 bp, Homo sapiens
tacagacatgagctaccgtgcccagcctaggtatcgaattttcacaggtttcacagtccaggccctaccacccctgcagcaaataacttgatataaaacctgggcccaggctagtaatacccttgaagcccatgacagaagcaggcacagtgatagaagcaaaatcacgtagacattatcaatctagccccctccaattcctacccataaagcccactgaagatgaatttacaatcataaactacaaaacatgccaagaaagaaccacatgagggaagtcagcagatgtgtgaacagcaggaacggactccgccaccaaaggccttcaaaaggtgaatcaagcaaaaaagagaacattaattaaacatgtttaacatgggtaagaattacaggaataaaagaagtaaatgaacaagaatacgattgcaagggagtggtagaagaataggcagttttgaagaactaaatggaatatctagaatgaaaaaccatgcttgctaaaattaactcaatgagtgagtttaaaaagcaatttagacccagctgagagctgaatttgtggtatatgcagaaattacttctgatgcgaggcagagcatgatgacagaatgaggagatcccaaacatctatgagagttccattctgaatgattagaagaatgaggaagcaacagtatttaaaaagataatcactaagaaagttctatacttgatgaaaaatgtgaatcctaagattcaggaacagtgtgagacttcagctggggaaaaaagatgaaactacacttctacatttaggagtaaaactacagaatacaaaagacaaaaaaattttaaagtgaaaaataaaaccactcagattacatcaaaagcagttatcatgaaagcagcctatcaattacaatgataaaagccaagcaatagtcaaatatcgatttttttcaaagtcacaagataaaataagtagtaacataggattctgtacatagcattatttgttacctattggggcataacaaaattccccaaaactttgcagcttaaaaaacattcagtatttcaccattgccatgagtcaggaatccaggcgtggcttgagtcctctgcatattggcttctcaccagactgcaatcaggacaatagcacagtatctgtggtctcatctgaaggcttgcctgaggaagtctgcatccaagcttactcttcgttggctgttgggcagaggcaccctcagctcccagccatgtaggctttcccatggtgcagcttctatcaacaaagcacgccagacaagaggacaacacacagtcttctaggaagaagaaagccacaatctttttttaaaaagcaaagcaatatttatgtaattgccacttggtttgagaagtagaacactgtgtcaaaaacccc

SEQ ID NO: 74060 - DNA, 1162 bp, Homo sapiens
actacagagaaaaagctaagggtcatatggagagtgacttgggagaatggtcttaagggcacagggggcatggttgagaagaccttgctaatgcaaggtgacatttcagcagagacgcaaaggtatgaggaacaagctgtaggattatctggaagaagagaattttaaacagtacaaacaaaattctcaggagagactgtagctggcttgtgtaagaaacaacagggggccagtgcggctccagttgagtgaacagttgagagcatcttagaaactgaagtccaagaggtagtgagggaccagatcgtgcggggcttacaggtcctcataagacttgagtaagataggaagtcattggtgggttttgagcagcagaatgacatgaaagtgtgtatcttggcagcccagttggtaaacagttgttgtgtgatgaataagatattaatcaacacaggaatttggattttctgaggagatatttcatcctggcttccaaactgtttctgtttaacaataagaatactatcttttttccagtgaccaccataattctctcacatcacagaacattgtcctccttcctgtgaaaaagccccaccccctttcttgctatttggctttctgtttctaagacactatgaagacaatctagtctaagttaatactttttctcaccttagatgtaatctactagattacaacttagttttattctagggtatttttaattgactcttggatggttcaccatttctcgagtaggattccttctgcaggtctcatgattcattctgttttggtgagtttagcaacaaatttcaaatttaaatcctatatgcctccccaagcctctgcacatacatatacttggtgttgagtattagtactatttctagcttcaggtttgtcctaaaaatcatcagtctggaaaaacaatgcatttaaatattcattcctagccatgagaaaagtgctttttaactttggaggaaaatatactgtagcctttatataaaaatggctttaaaaaaagtttttgaggccaggtgcggtggttcatgtctgtattcccagcactttgggtggccaaggtcagggaccgcttgagcccaggagttcaagaccagctcaagcaacttggcaaaaccccatctctaccaaa

SEQ ID NO: 74061 - DNA, 1864 bp, Homo sapiens
agcggggggagccctgctctcgcaactcaagatggcggacgagagtgagacagcagtgaagccgccggcacctccgctgccgcagatgatggaagggaacgggaacggccatgagcactgcagcgattgcgagaatgaggaggacaacagctacaaccggggtggtttgagtccagccaatgacactggagccaaaaagaagaaaaagaaacaaaaaaagaagaaagaaaaaggcagtgagacagattcagcccaggatcagcctgtgaagatgaactctttgccagcagagaggatccaggaaatacagaaggccattgagctgttctcagtgggtcagggacctgccaaaaccatggaggaggctagcaagcgaagctaccagttctgggatacgcagcccgtccccaagctgggcgaagtggtgaacacccatggccccgtggagcctgacaaggacaatatccgccaggagccctacaccctgccccagggcttcacctgggatgctttggacctgggcgatcgtggtgtgctaaaagaactgtacaccctcctgaatgagaactatgtggaagatgatgacaacatgttccgatttgattattccccggagtttcttttgtgggctctccggccacccggctggctcccccagtggcactgtggggttcgagtggtctcaagtcggaaattggttgggttcattagcgccatcccagcaaacatccatatctatgacacagagaagaagatggtagagatcaacttcctgtgtgtccacaagaagctgcgttccaagagggttgctccagttctgatccgagagatcaccaggcgggttcacctggagggcatcttccaagcagtttacactgccggggtggtactaccaaagcccgttggcacctgcaggtattggcatcggtccctaaacccacggaagctgattgaagtgaagttctcccacctgagcagaaatatgaccatgcagcgcaccatgaagctctaccgactgccagagactcccaagacagctgggctgcgaccaatggaaacaaaggacattccagtagtgcaccagctcctcaccaggtacttgaagcaatttcaccttacgcccgtcatgagccaggaggaggtggagcactggttctacccccaggagaatatcatcgacactttcgtggtggagaacgcaaacggagaggtgacagatttcctgagcttttatacgctgccctccaccatcatgaaccatccaacccacaagagtctcaaagctgcttattctttctacaacgttcacacccagacccctcttctagacctcatgagcgacgcccttgtcctcgccaaaatgaaagggtttgatgtgttcaatgcactggatctcatggagaacaaaaccttcctggagaagctcaagtttggcataggggacggcaacctgcagtattacctttacaattggaaatgccccagcatgggggcagagaaggttggactggtgctacaataaccagtcaccagtgcgattctggataaagccactgaaaattcgaaccaggaaatggaaccccaccactgttggtccaattttcacacacgtgagaatccctggcaaagggagcagaactgaaccggctttaccaaaccgccagcgaacttgacaattgtattgcgatggcgtgggctgcgtgacgtcacctccggtcgtgtctctggtctccgtgttttccagttaattacatcctcatgcagccgtgatcaagggaatgtaactgctgaaaactagctcgtgattggcatataatggagttaacgggtgaataataaaagtatatatatatattatatatat

SEQ ID NO: 74062 - DNA, 673 bp, Homo sapiens
  misc_feature (2)..(2): n is a, c, g, or t
angggctaattctgcagagtttccaaaaccagaagacatcgtactaccaaagcccgttggcacctgcaggtattggcatcggtccctaaacccacggaagctgattgaagtgaagttctcccacctgagcagaaatatgaccatgcagcgcaccatgaagctctaccgactgccagagaaccaggggaggcctgaggcttcagttttactctgctgcaaaatgaaggcgggcctgcaagccgactacacctacggaggctgttgaggacaatttcattccattaaattaaaaaatactgactggctggcaggcaggtgccatgtctgggaacagggacgggggagcttcacctttttgtcttggcttttctttgggctgtgggggggcatccatttccagggtcggggaggaaataccaaatgcattgttgttctgctcaatacatctcacttgtttctaataaagaaagcagctgaacaaaaccttctgtcctggtattcctggtcagcaggtggcagtggaagaaatggagtgctggagcctaggctggagccaggacgacagggcttggacacaaagtccctcaagcccacagcaccaggccagcttccaaaggccttcctttaaggctgcccttcttccagggcaaacttggtgttgtcagacccttcc

SEQ ID NO: 74063 - DNA, 812 bp, Homo sapiens
cccggcctggacactgagtacatatgtgtacactctgagggacactgggcagaggccaggctggagggggcgctcagagtgtcctgagaaccacccggagagcggggattaacgtggaagcagcggagcttctgagggaaccttgttcttgtggctgcccacaggacagctttgaaatggcagcaaaggggtaggaaggaggctgtccccacctgtcctcacctgttcttgtttgtccctgctgctttgcagaaagggtttgatgtgttcaatgcactggatctcatggagaacaaaaccttcctggagaagctcaagtttggcataggggacggcaacctgcagtattacctttacaattggaaatgccccagcatgggggcagagaaggtaggcgacacatagccagagtccaggctgcccggcccagggtgtccatgtctccagcagaaaccgggccatgggttgaggagacagccgcagtctgggtccttgttacctcgagttgaacctttgaaaatgccctccctctgctggccagaccagcaggtcagcgttcccctctcagcaactggtgtgaggatggcagaggggacagagccacacagtagcacgaagatcatctccaatgaggccttcccacgtgagggaaccgtggaagttgagttgcccacggtttgccaggagggtagggctgggggaactctgaggaggtttcctctcctgagctgctgccctcttctggcatgacactttcttagcccttcctcccccagtgccataggggacataggggtgagcagtagcgtggg

SEQ ID NO: 74064 - DNA, 4896 bp, Homo sapiens
agcggggggagccctgctctcgcaactcaagatggcggacgagagtgagacagcagtgaagccgccggcacctccgctgccgcagatgatggaagggaacgggaacggccatgagcactgcagcgattgcgagaatgaggaggacaacagctacaaccggggtggtttgagtccagccaatgacactggagccaaaaagaagaaaaagaaacaaaaaaagaagaaagaaaaaggcagtgagacagattcagcccaggatcagcctgtgaagatgaactctttgccagcagagaggatccaggaaatacagaaggccattgagctgttctcagtgggtcagggacctgccaaaaccatggaggaggctagcaagcgaagctaccagttctgggatacgcagcccgtccccaagctgggcgaagtggtgaacacccatggccccgtggagcctgacaaggacaatatccgccaggagccctacaccctgccccagggcttcacctgggatgctttggacctgggcgatcgtggtgtgctaaaagaactgtacaccctcctgaatgagaactatgtggaagatgatgacaacatgttccgatttgattattccccggagtttcttttgtgggctctccggccacccggctggctcccccagtggcactgtggggttcgagtggtctcaagtcggaaattggttgggttcattagcgccatcccagcaaacatccatatctatgacacagagaagaagatggtagagatcaacttcctgtgtgtccacaagaagctgcgttccaagagggttgctccagttctgatccgagagatcaccaggcgggttcacctggagggcatcttccaagcagtttacactgccggggtggtactaccaaagcccgttggcacctgcaggtattggcatcggtccctaaacccacggaagctgattgaagtgaagttctcccacctgagcagaaatatgaccatgcagcgcaccatgaagctctaccgactgccagagactcccaagacagctgggctgcgaccaatggaaacaaaggacattccagtagtgcaccagctcctcaccaggtacttgaagcaatttcaccttacgcccgtcatgagccaggaggaggtggagcactggttctacccccaggagaatatcatcgacactttcgtggtggagaacgcaaacggagaggtgacagatttcctgagcttttatacgctgccctccaccatcatgaaccatccaacccacaagagtctcaaagctgcttattctttctacaacgttcacacccagacccctcttctagacctcatgagcgacgcccttgtcctcgccaaaatgaaagggtttgatgtgttcaatgcactggatctcatggagaacaaaaccttcctggagaagctcaagtttggcataggggacggcaacctgcagtattacctttacaattggaaatgccccagcatgggggcagagaaggttggactggtgctacaataaccagtcaccagtgcgattctggataaagccactgaaaattcgaaccaggaaatggaaccccaccactgttggtccaattttcacacacgtgagaatccctggcaaagggagcagaactgaaccggctttaccaaaccgccagcgaacttgacaattgtattgcgatggcgtgggctgcgtgacgtcacctccggtcgtgtctctggtctccgtgttttccagttaattacatcctcatgcagccgtgatcaagggaatgtaactgctgaaaactagctcgtgattggcatataatggagttaacgggtgaataataaaagtatatatatatattatatatatataaatattttaaatatctttcatgttccaaatgtacaaggatgtttggtctttaatgaaaagctgaatctagatcattcctcagaatgaggacccgaggacagtggcagacagacgcgttggcacagttcatggtttcctccagaggagacattggcttatcatggggaaaaagaggatctggagaacctcatccagctccccttctgaatcagctgggatgactggctttgagaaggaagggaagatggaacaggctcagatctcatgggatagcacgtggagctcttggctggggctgaccctgggcagggactttcctgcagggccagacctgcctgcattctgagacaaagcaatggacggtccgcagaagcagacctcattgattgagtcctttcttccatccccttggcctgctccctgtaggaagtcatcctgccaactgatttaaaagggctctttagccagttgttgccaaccttatagggatgagtcccctgtgagattttgcttttccactgcctgggatgatgcagtttgaagaggcccttggacctccttgtaacatcagggacctttggagaccattatcagtgtaagccctgcttagctcatcttagagcaaagagccagcaccctgatgtccctggggtggctaggcaggagtggcgtggggccaatacccagaccccttcagccaccagcccctggcctgtgccttccaacccattagccatttcttgttgtgcccctttccaagatacagcctgcaagtggtagcaagaagtgattagaggcagatctggacttggcaacagaagtggtttcccatctccattgtctgagtctgattttcgctgatgctgttttgtggatttttgtggtagtgatggttgtcagtgctgccagtttcccaaaacgtaatcaagcctctggtcacatggctgtcgatgtaggcattctggagtggtgttcagccaagtgaccgggcaaaattgggctgtgaaattgtacttccaggcttggatgtaatttttgctctagagagaagcaagtggtgggaaggaggtagcatgacgtgtggtgtgcgggtttccttgctgccgtcacctctccgctcatacaggaatgaagccttagccaggaggccaggctcagccctgtgccactcaccgaagccactttctacaggccagcaggggcttgttgcaggctgtgggttttggtgtggtttgtcagaggctaattctgcagagtttccaaaaccagaagacatcgtatgcttgggatgggggccgtgccacccgtgggaatgctgcccgctctgcagactgctgctagagccagcaactccactaaggtggattttcatcaggggcctgcagggccctcccttttcccattgttcctgcgctgcaaattgcaggccccagcaatcgtgactgacgtttgctccttgactccaagaaactgagaccaaagaagctgctgttcttagcaagatgcgcactgcattccacaggtgggaggagtcggagaggcaggggcttgctttgcagccccacagacaacagttgcacagtgcctcaagccccagagtggctcaccctgtccagacctttgaggatatcaaaggacaaagtgcccaagtctttcctaccttgggggaacctggaacttggaaaggctccctgtcctagtcttgatctgttctgggccaggtcccagcttgagctgcctctgagatttgggctgtgcggatctctggagtgagctctgtttcggttgacccaggtcatggaatggaaacggtgaggccccagtggctgttctggaagaaacagatctcctggcaaaggccccagcatctccctcactgaaaccaggtggccggctcctcggactctgctttatgttgcggtgagaactctgcccaggtgtgcagggtttggcttgtgggctgcttgctgctcatctgatttttgtcccagtagtccctgcgttcttcattcaaccccttctgggacttcagctcagagagcaccatcccgggggtcagggcctccccacaggagccctgcagtgtggtagcgccatggctgtctcaaaccaagcaaaggaaggaccctgaggccttcacgctaaccatcctcgagcaactgctgttggaaggcctccctgggcctggcccccaccctctgccacccagtcctcccagctgccatgtttcaaagacgacctttacctcctgcctttggattgactctgcatttgaccacggactccagtctgtgtgtagggagagagctgagtaggaggcctccactccggatcgaggcctgtatagggctcgtttccccacacatgcctatttctgaagaggcttctgtcttatttgaaggccagcccacacccagctactttaacaccaggtttatggaaaatgtcaggccttccccacaactcctgtctaactgctgtcgcccccctacttgctggctctcagaagcctaggggagtccctgtggtcctgaattctttccccaaagacgaccagcatttaaccaacctaagggcccaaaggccttggacaactgcatggagctgcactctaggagaaggaggggaaccagatgttagatcaggggagggagcaggagtgtccctcccgtcagtgcctacccacctgtgaggcagccttctgatggcctggcccaccttccccagaaccaggggaggcctgaggcttcagttttactctgctgcaaaatgaaggcgggcctgcaagccgactacacctacggaggctgttgaggacaatttcattccattaaattaaaaaatactgactggctggcaggcaggtgccatgtctgggaacagggacgggggagcttcacctttttgtcttggcttttctttgggctgtgggggggcatccatttccagggtcggggaggaaataccaaatgcattgttgttctgctcaatacatctcacttgtttctaataaagaaagcagctgaaca

SEQ ID NO: 74065 - DNA, 5089 bp, Homo sapiens
agcggggggagccctgctctcgcaactcaagatggcggacgagagtgagacagcagtgaagccgccggcacctccgctgccgcagatgatggaagggaacgggaacggccatgagcactgcagcgattgcgagaatgaggaggacaacagctacaaccggggtggtttgagtccagccaatgacactggagccaaaaagaagaaaaagaaacaaaaaaagaagaaagaaaaaggcagtgagacagattcagcccaggatcagcctgtgaagatgaactctttgccagcagagaggatccaggaaatacagaaggccattgagctgttctcagtgggtcagggacctgccaaaaccatggaggaggctagcaagcgaagctaccagttctgggatacgcagcccgtccccaagctgggcgaagtggtgaacacccatggccccgtggagcctgacaaggacaatatccgccaggagccctacaccctgccccagggcttcacctgggatgctttggacctgggcgatcgtggtgtgctaaaagaactgtacaccctcctgaatgagaactatgtggaagatgatgacaacatgttccgatttgattattccccggagtttcttttgtgggctctccggccacccggctggctcccccagtggcactgtggggttcgagtggtctcaagtcggaaattggttgggttcattagcgccatcccagcaaacatccatatctatgacacagagaagaagatggtagagatcaacttcctgtgtgtccacaagaagctgcgttccaagagggttgctccagttctgatccgagagatcaccaggcgggttcacctggagggcatcttccaagcagtttacactgccggggtggtactaccaaagcccgttggcacctgcaggtattggcatcggtccctaaacccacggaagctgattgaagtgaagttctcccacctgagcagaaatatgaccatgcagcgcaccatgaagctctaccgactgccagagactcccaagacagctgggctgcgaccaatggaaacaaaggacattccagtagtgcaccagctcctcaccaggtacttgaagcaatttcaccttacgcccgtcatgagccaggaggaggtggagcactggttctacccccaggagaatatcatcgacactttcgtggtggagaacgcaaacggagaggtgacagatttcctgagcttttatacgctgccctccaccatcatgaaccatccaacccacaagagtctcaaagctgcttattctttctacaacgttcacacccagacccctcttctagacctcatgagcgacgcccttgtcctcgccaaaatgaaagggtttgatgtgttcaatgcactggatctcatggagaacaaaaccttcctggagaagctcaagtttggcataggggacggcaacctgcagtattacctttacaattggaaatgccccagcatgggggcagagaaggttggactggtgctacaataaccagtcaccagtgcgattctggataaagccactgaaaattcgaaccaggaaatggaaccccaccactgttggtccaattttcacacacgtgagaatccctggcaaagggagcagaactgaaccggctttaccaaaccgccagcgaacttgacaattgtattgcgatggcgtgggctgcgtgacgtcacctccggtcgtgtctctggtctccgtgttttccagttaattacatcctcatgcagccgtgatcaagggaatgtaactgctgaaaactagctcgtgattggcatataatggagttaacgggtgaataataaaagtatatatatatattatatatatataaatattttaaatatctttcatgttccaaatgtacaaggatgtttggtctttaatgaaaagctgaatctagatcattcctcagaatgaggacccgaggacagtggcagacagacgcgttggcacagttcatggtttcctccagaggagacattggcttatcatggggaaaaagaggatctggagaacctcatccagctccccttctgaatcagctgggatgactggctttgagaaggaagggaagatggaacaggctcagatctcatgggatagcacgtggagctcttggctggggctgaccctgggcagggactttcctgcagggccagacctgcctgcattctgagacaaagcaatggacggtccgcagaagcagacctcattgattgagtcctttcttccatccccttggcctgctccctgtaggaagtcatcctgccaactgatttaaaagggctctttagccagttgttgccaaccttatagggatgagtcccctgtgagattttgcttttccactgcctgggatgatgcagtttgaagaggcccttggacctccttgtaacatcagggacctttggagaccattatcagtgtaagccctgcttagctcatcttagagcaaagagccagcaccctgatgtccctggggtggctaggcaggagtggcgtggggccaatacccagaccccttcagccaccagcccctggcctgtgccttccaacccattagccatttcttgttgtgcccctttccaagatacagcctgcaagtggtagcaagaagtgattagaggcagatctggacttggcaacagaagtggtttcccatctccattgtctgagtctgattttcgctgatgctgttttgtggatttttgtggtagtgatggttgtcagtgctgccagtttcccaaaacgtaatcaagcctctggtcacatggctgtcgatgtaggcattctggagtggtgttcagccaagtgaccgggcaaaattgggctgtgaaattgtacttccaggcttggatgtaatttttgctctagagagaagcaagtggtgggaaggaggtagcatgacgtgtggtgtgcgggtttccttgctgccgtcacctctccgctcatacaggaatgaagccttagccaggaggccaggctcagccctgtgccactcaccgaagccactttctacaggccagcaggggcttgttgcaggctgtgggttttggtgtggtttgtcagaggctaattctgcagagtttccaaaaccagaagacatcgtatgcttgggatgggggccgtgccacccgtgggaatgctgcccgctctgcagactgctgctagagccagcaactccactaaggtggattttcatcaggggcctgcagggccctcccttttcccattgttcctgcgctgcaaattgcaggccccagcaatcgtgactgacgtttgctccttgactccaagaaactgagaccaaagaagctgctgttcttagcaagatgcgcactgcattccacaggtgggaggagtcggagaggcaggggcttgctttgcagccccacagacaacagttgcacagtgcctcaagccccagagtggctcaccctgtccagacctttgaggatatcaaaggacaaagtgcccaagtctttcctaccttgggggaacctggaacttggaaaggctccctgtcctagtcttgatctgttctgggccaggtcccagcttgagctgcctctgagatttgggctgtgcggatctctggagtgagctctgtttcggttgacccaggtcatggaatggaaacggtgaggccccagtggctgttctggaagaaacagatctcctggcaaaggccccagcatctccctcactgaaaccaggtggccggctcctcggactctgctttatgttgcggtgagaactctgcccaggtgtgcagggtttggcttgtgggctgcttgctgctcatctgatttttgtcccagtagtccctgcgttcttcattcaaccccttctgggacttcagctcagagagcaccatcccgggggtcagggcctccccacaggagccctgcagtgtggtagcgccatggctgtctcaaaccaagcaaaggaaggaccctgaggccttcacgctaaccatcctcgagcaactgctgttggaaggcctccctgggcctggcccccaccctctgccacccagtcctcccagctgccatgtttcaaagacgacctttacctcctgcctttggattgactctgcatttgaccacggactccagtctgtgtgtagggagagagctgagtaggaggcctccactccggatcgaggcctgtatagggctcgtttccccacacatgcctatttctgaagaggcttctgtcttatttgaaggccagcccacacccagctactttaacaccaggtttatggaaaatgtcaggccttccccacaactcctgtctaactgctgtcgcccccctacttgctggctctcagaagcctaggggagtccctgtggtcctgaattctttccccaaagacgaccagcatttaaccaacctaagggcccaaaggccttggacaactgcatggagctgcactctaggagaaggaggggaaccagatgttagatcaggggagggagcaggagtgtccctcccgtcagtgcctacccacctgtgaggcagccttctgatggcctggcccaccttccccagaaccaggggaggcctgaggcttcagttttactctgctgcaaaatgaaggcgggcctgcaagccgactacacctacggaggctgttgaggacaatttcattccattaaattaaaaaatactgactggctggcaggcaggtgccatgtctgggaacagggacgggggagcttcacctttttgtcttggcttttctttgggctgtgggggggcatccatttccagggtcggggaggaaataccaaatgcattgttgttctgctcaatacatctcacttgtttctaataaagaaagcagctgaacaaaaccttctgtcctggtattcctggtcagcaggtggcagtggaagaaatggagtgctggagcctaggctggagccaggacgacagggcttggacacaaagtccctcaagcccacagcaccaggccagcttccaaaggccttcctttaaggctgcccttcttccagggcaaacttggtgttgtcagacccttcc

SEQ ID NO: 74066 - DNA, 4891 bp, Homo sapiens
agcggggggagccctgctctcgcaactcaagatggcggacgagagtgagacagcagtgaagccgccggcacctccgctgccgcagatgatggaagggaacgggaacggccatgagcactgcagcgattgcgagaatgaggaggacaacagctacaaccggggtggtttgagtccagccaatgacactggagccaaaaagaagaaaaagaaacaaaaaaagaagaaagaaaaaggcagtgagacagattcagcccaggatcagcctgtgaagatgaactctttgccagcagagaggatccaggaaatacagaaggccattgagctgttctcagtgggtcagggacctgccaaaaccatggaggaggctagcaagcgaagctaccagttctgggatacgcagcccgtccccaagctgggcgaagtggtgaacacccatggccccgtggagcctgacaaggacaatatccgccaggagccctacaccctgccccagggcttcacctgggatgctttggacctgggcgatcgtggtgtgctaaaagaactgtacaccctcctgaatgagaactatgtggaagatgatgacaacatgttccgatttgattattccccggagtttcttttgtgggctctccggccacccggctggctcccccagtggcactgtggggttcgagtggtctcaagtcggaaattggttgggttcattagcgccatcccagcaaacatccatatctatgacacagagaagaagatggtagagatcaacttcctgtgtgtccacaagaagctgcgttccaagagggttgctccagttctgatccgagagatcaccaggcgggttcacctggagggcatcttccaagcagtttacactgccggggtggtactaccaaagcccgttggcacctgcaggtattggcatcggtccctaaacccacggaagctgattgaagtgaagttctcccacctgagcagaaatatgaccatgcagcgcaccatgaagctctaccgactgccagagactcccaagacagctgggctgcgaccaatggaaacaaaggacattccagtagtgcaccagctcctcaccaggtacttgaagcaatttcaccttacgcccgtcatgagccaggaggaggtggagcactggttctacccccaggagaatatcatcgacactttcgtggtggagaacgcaaacggagaggtgacagatttcctgagcttttatacgctgccctccaccatcatgaaccatccaacccacaagagtctcaaagctgcttattctttctacaacgttcacacccagacccctcttctagacctcatgagcgacgcccttgtcctcgccaaaatgaaagggtttgatgtgttcaatgcactggatctcatggagaacaaaaccttcctggagaagctcaagtttggcataggggacggcaacctgcagtattacctttacaattggaaatgccccagcatgggggcagagaaggttggactggtgctacaataaccagtcaccagtgcgattctggataaagccactgaaaattcgaaccaggaaatggaaccccaccactgttggtccaattttcacacacgtgagaatccctggcaaagggagcagaactgaaccggctttaccaaaccgccagcgaacttgacaattgtattgcgatggcgtgggctgcgtgacgtcacctccggtcgtgtctctggtctccgtgttttccagttaattacatcctcatgcagccgtgatcaagggaatgtaactgctgaaaactagctcgtgattggcatataatggagttaacgggtgaataataaaagtatatatatatattatatatatataaatattttaaatatctttcatgttccaaatgtacaaggatgtttggtctttaatgaaaagctgaatctagatcattcctcagaatgaggacccgaggacagtggcagacagacgcgttggcacagttcatggtttcctccagaggagacattggcttatcatggggaaaaagaggatctggagaacctcatccagctccccttctgaatcagctgggatgactggctttgagaaggaagggaagatggaacaggctcagatctcatgggatagcacgtggagctcttggctggggctgaccctgggcagggactttcctgcagggccagacctgcctgcattctgagacaaagcaatggacggtccgcagaagcagacctcattgattgagtcctttcttccatccccttggcctgctccctgtaggaagtcatcctgccaactgatttaaaagggctctttagccagttgttgccaaccttatagggatgagtcccctgtgagattttgcttttccactgcctgggatgatgcagtttgaagaggcccttggacctccttgtaacatcagggacctttggagaccattatcagtgtaagccctgcttagctcatcttagagcaaagagccagcaccctgatgtccctggggtggctaggcaggagtggcgtggggccaatacccagaccccttcagccaccagcccctggcctgtgccttccaacccattagccatttcttgttgtgcccctttccaagatacagcctgcaagtggtagcaagaagtgattagaggcagatctggacttggcaacagaagtggtttcccatctccattgtctgagtctgattttcgctgatgctgttttgtggatttttgtggtagtgatggttgtcagtgctgccagtttcccaaaacgtaatcaagcctctggtcacatggctgtcgatgtaggcattctggagtggtgttcagccaagtgaccgggcaaaattgggctgtgaaattgtacttccaggcttggatgtaatttttgctctagagagaagcaagtggtgggaaggaggtagcatgacgtgtggtgtgcgggtttccttgctgccgtcacctctccgctcatacaggaatgaagccttagccaggaggccaggctcagccctgtgccactcaccgaagccactttctacaggccagcaggggcttgttgcaggctgtgggttttggtgtggtttgtcagaggctaattctgcagagtttccaaaaccagaagacatcgtatgcttgggatgggggccgtgccacccgtgggaatgctgcccgctctgcagactgctgctagagccagcaactccactaaggtggattttcatcaggggcctgcagggccctcccttttcccattgttcctgcgctgcaaattgcaggccccagcaatcgtgactgacgtttgctccttgactccaagaaactgagaccaaagaagctgctgttcttagcaagatgcgcactgcattccacaggtgggaggagtcggagaggcaggggcttgctttgcagccccacagacaacagttgcacagtgcctcaagccccagagtggctcaccctgtccagacctttgaggatatcaaaggacaaagtgcccaagtctttcctaccttgggggaacctggaacttggaaaggctccctgtcctagtcttgatctgttctgggccaggtcccagcttgagctgcctctgagatttgggctgtgcggatctctggagtgagctctgtttcggttgacccaggtcatggaatggaaacggtgaggccccagtggctgttctggaagaaacagatctcctggcaaaggccccagcatctccctcactgaaaccaggtggccggctcctcggactctgctttatgttgcggtgagaactctgcccaggtgtgcagggtttggcttgtgggctgcttgctgctcatctgatttttgtcccagtagtccctgcgttcttcattcaaccccttctgggacttcagctcagagagcaccatcccgggggtcagggcctccccacaggagccctgcagtgtggtagcgccatggctgtctcaaaccaagcaaaggaaggaccctgaggccttcacgctaaccatcctcgagcaactgctgttggaaggcctccctgggcctggcccccaccctctgccacccagtcctcccagctgccatgtttcaaagacgacctttacctcctgcctttggattgactctgcatttgaccacggactccagtctgtgtgtagggagagagctgagtaggaggcctccactccggatcgaggcctgtatagggctcgtttccccacacatgcctatttctgaagaggcttctgtcttatttgaaggccagcccacacccagctactttaacaccaggtttatggaaaatgtcaggccttccccacaactcctgtctaactgctgtcgcccccctacttgctggctctcagaagcctaggggagtccctgtggtcctgaattctttccccaaagacgaccagcatttaaccaacctaagggcccaaaggccttggacaactgcatggagctgcactctaggagaaggaggggaaccagatgttagatcaggggagggagcaggagtgtccctcccgtcagtgcctacccacctgtgaggcagccttctgatggcctggcccaccttccccagaaccaggggaggcctgaggcttcagttttactctgctgcaaaatgaaggcgggcctgcaagccgactacacctacggaggctgttgaggacaatttcattccattaaattaaaaaatactgactggctggcaggcaggtgccatgtctgggaacagggacgggggagcttcacctttttgtcttggcttttctttgggctgtgggggggcatccatttccagggtcggggaggaaataccaaatgcattgttgttctgctgctttctttattagaaacaagtgagatgtattgagca

SEQ ID NO: 74067 - DNA, 4430 bp, Homo sapiens
agcggggggagccctgctctcgcaactcaagatggcggacgagagtgagacagcagtgaagccgccggcacctccgctgccgcagatgatggaagggaacgggaacggccatgagcactgcagcgattgcgagaatgaggaggacaacagctacaaccggggtggtttgagtccagccaatgacactggagccaaaaagaagaaaaagaaacaaaaaaagaagaaagaaaaaggcagtgagacagattcagcccaggatcagcctgtgaagatgaactctttgccagcagagaggatccaggaaatacagaaggccattgagctgttctcagtgggtcagggacctgccaaaaccatggaggaggctagcaagcgaagctaccagttctgggatacgcagcccgtccccaagctgggcgaagtggtgaacacccatggccccgtggagcctgacaaggacaatatccgccaggagccctacaccctgccccagggcttcacctgggatgctttggacctgggcgatcgtggtgtgctaaaagaactgtacaccctcctgaatgagaactatgtggaagatgatgacaacatgttccgatttgattattccccggagtttcttttgtgggctctccggccacccggctggctcccccagtggcactgtggggttcgagtggtctcaagtcggaaattggttgggttcattagcgccatcccagcaaacatccatatctatgacacagagaagaagatggtagagatcaacttcctgtgtgtccacaagaagctgcgttccaagagggttgctccagttctgatccgagagatcaccaggcgggttcacctggagggcatcttccaagcagtttacactgccggggtggtactaccaaagcccgttggcacctgcaggtattggcatcggtccctaaacccacggaagctgattgaagtgaagttctcccacctgagcagaaatatgaccatgcagcgcaccatgaagctctaccgactgccagagactcccaagacagctgggctgcgaccaatggaaacaaaggacattccagtagtgcaccagctcctcaccaggtacttgaagcaatttcaccttacgcccgtcatgagccaggaggaggtggagcactggttctacccccaggagaatatcatcgacactttcgtggtggagaacgcaaacggagaggtgacagatttcctgagcttttatacgctgccctccaccatcatgaaccatccaacccacaagagtctcaaagctgcttattctttctacaacgttcacacccagacccctcttctagacctcatgagcgacgcccttgtcctcgccaaaatgaaagggtttgatgtgttcaatgcactggatctcatggagaacaaaaccttcctggagaagctcaagtttggcataggggacggcaacctgcagtattacctttacaattggaaatgccccagcatgggggcagagaaggttggactggtgctacaataaccagtcaccagtgcgattctggataaagccactgaaaattcgaaccaggaaatggaaccccaccactgttggtccaattttcacacacgtgagaatccctggcaaagggagcagaactgaaccggctttaccaaaccgccagcgaacttgacaattgtattgcgatggcgtgggctgcgtgacgtcacctccggtcgtgtctctggtctccgtgttttccagttaattacatcctcatgcagccgtgatcaagggaatgtaactgctgaaaactagctcgtgattggcatataatggagttaacgggtgaataataaaagtatatatatatattatatatatataaatattttaaatatctttcatgttccaaatgtacaaggatgtttggtctttaatgaaaagctgaatctagatcattcctcagaatgaggacccgaggacagtggcagacagacgcgttggcacagttcatggtttcctccagaggagacattggcttatcatggggaaaaagaggatctggagaacctcatccagctccccttctgaatcagctgggatgactggctttgagaaggaagggaagatggaacaggctcagatctcatgggatagcacgtggagctcttggctggggctgaccctgggcagggactttcctgcagggccagacctgcctgcattctgagacaaagcaatggacggtccgcagaagcagacctcattgattgagtcctttcttccatccccttggcctgctccctgtaggaagtcatcctgccaactgatttaaaagggctctttagccagttgttgccaaccttatagggatgagtcccctgtgagattttgcttttccactgcctgggatgatgcagtttgaagaggcccttggacctccttgtaacatcagggacctttggagaccattatcagtgtaagccctgcttagctcatcttagagcaaagagccagcaccctgatgtccctggggtggctaggcaggagtggcgtggggccaatacccagaccccttcagccaccagcccctggcctgtgccttccaacccattagccatttcttgttgtgcccctttccaagatacagcctgcaagtggtagcaagaagtgattagaggcagatctggacttggcaacagaagtggtttcccatctccattgtctgagtctgattttcgctgatgctgttttgtggatttttgtggtagtgatggttgtcagtgctgccagtttcccaaaacgtaatcaagcctctggtcacatggctgtcgatgtaggcattctggagtggtgttcagccaagtgaccgggcaaaattgggctgtgaaattgtacttccaggcttggatgtaatttttgctctagagagaagcaagtggtgggaaggaggtagcatgacgtgtggtgtgcgggtttccttgctgccgtcacctctccgctcatacaggaatgaagccttagccaggaggccaggctcagccctgtgccactcaccgaagccactttctacaggccagcaggggcttgttgcaggctgtgggttttggtgtggtttgtcagaggctaattctgcagagtttccaaaaccagaagacatcgtatgcttgggatgggggccgtgccacccgtgggaatgctgcccgctctgcagactgctgctagagccagcaactccactaaggtggattttcatcaggggcctgcagggccctcccttttcccattgttcctgcgctgcaaattgcaggccccagcaatcgtgactgacgtttgctccttgactccaagaaactgagaccaaagaagctgctgttcttagcaagatgcgcactgcattccacaggtgggaggagtcggagaggcaggggcttgctttgcagccccacagacaacagttgcacagtgcctcaagccccagagtggctcaccctgtccagacctttgaggatatcaaaggacaaagtgcccaagtctttcctaccttgggggaacctggaacttggaaaggctccctgtcctagtcttgatctgttctgggccaggtcccagcttgagctgcctctgagatttgggctgtgcggatctctggagtgagctctgtttcggttgacccaggtcatggaatggaaacggtgaggccccagtggctgttctggaagaaacagatctcctggcaaaggccccagcatctccctcactgaaaccaggtggccggctcctcggactctgctttatgttgcggtgagaactctgcccaggtgtgcagggtttggcttgtgggctgcttgctgctcatctgatttttgtcccagtagtccctgcgttcttcattcaaccccttctgggacttcagctcagagagcaccatcccgggggtcagggcctccccacaggagccctgcagtgtggtagcgccatggctgtctcaaaccaagcaaaggaaggaccctgaggccttcacgctaaccatcctcgagcaactgctgttggaaggcctccctgggcctggcccccaccctctgccacccagtcctcccagctgccatgtttcaaagacgacctttacctcctgcctttggattgactctgcatttgaccacggactccagtctgtgtgtagggagagagctgagtaggaggcctccactccggatcgaggcctgtatagggctcgtttccccacacatgcctatttctgaagaggcttctgtcttatttgaaggccagcccacacccagctactttaacaccaggtctttttgtcttggcttttctttgggctgtgggggggcatccatttccagggtcggggaggaaataccaaatgcattgttgttctgctcaatacatctcacttgtttctaataaagaaagcagctgaaca

SEQ ID NO: 74068 - DNA, 4886 bp, Homo sapiens
cgcagatgatggaagggaacgggaacggccatgagcactgcggcagcggaggtgccggcacctccgctgccgcagatgatggaagggaacgggaacggccatgagcactgcagcgattgcgagaatgaggaggacaacagctacaaccggggtggtttgagtccagccaatgacactggagccaaaaagaagaaaaagaaacaaaaaaagaagaaagaaaaaggcagtgagacagattcagcccaggatcagcctgtgaagatgaactctttgccagcagagaggatccaggaaatacagaaggccattgagctgttctcagtgggtcagggacctgccaaaaccatggaggaggctagcaagcgaagctaccagttctgggatacgcagcccgtccccaagctgggcgaagtggtgaacacccatggccccgtggagcctgacaaggacaatatccgccaggagccctacaccctgccccagggcttcacctgggatgctttggacctgggcgatcgtggtgtgctaaaagaactgtacaccctcctgaatgagaactatgtggaagatgatgacaacatgttccgatttgattattccccggagtttcttttgtgggctctccggccacccggctggctcccccagtggcactgtggggttcgagtggtctcaagtcggaaattggttgggttcattagcgccatcccagcaaacatccatatctatgacacagagaagaagatggtagagatcaacttcctgtgtgtccacaagaagctgcgttccaagagggttgctccagttctgatccgagagatcaccaggcgggttcacctggagggcatcttccaagcagtttacactgccggggtggtactaccaaagcccgttggcacctgcaggtattggcatcggtccctaaacccacggaagctgattgaagtgaagttctcccacctgagcagaaatatgaccatgcagcgcaccatgaagctctaccgactgccagagactcccaagacagctgggctgcgaccaatggaaacaaaggacattccagtagtgcaccagctcctcaccaggtacttgaagcaatttcaccttacgcccgtcatgagccaggaggaggtggagcactggttctacccccaggagaatatcatcgacactttcgtggtggagaacgcaaacggagaggtgacagatttcctgagcttttatacgctgccctccaccatcatgaaccatccaacccacaagagtctcaaagctgcttattctttctacaacgttcacacccagacccctcttctagacctcatgagcgacgcccttgtcctcgccaaaatgaaagggtttgatgtgttcaatgcactggatctcatggagaacaaaaccttcctggagaagctcaagtttggcataggggacggcaacctgcagtattacctttacaattggaaatgccccagcatgggggcagagaaggttggactggtgctacaataaccagtcaccagtgcgattctggataaagccactgaaaattcgaaccaggaaatggaaccccaccactgttggtccaattttcacacacgtgagaatccctggcaaagggagcagaactgaaccggctttaccaaaccgccagcgaacttgacaattgtattgcgatggcgtgggctgcgtgacgtcacctccggtcgtgtctctggtctccgtgttttccagttaattacatcctcatgcagccgtgatcaagggaatgtaactgctgaaaactagctcgtgattggcatataatggagttaacgggtgaataataaaagtatatatatatattatatatatataaatattttaaatatctttcatgttccaaatgtacaaggatgtttggtctttaatgaaaagctgaatctagatcattcctcagaatgaggacccgaggacagtggcagacagacgcgttggcacagttcatggtttcctccagaggagacattggcttatcatggggaaaaagaggatctggagaacctcatccagctccccttctgaatcagctgggatgactggctttgagaaggaagggaagatggaacaggctcagatctcatgggatagcacgtggagctcttggctggggctgaccctgggcagggactttcctgcagggccagacctgcctgcattctgagacaaagcaatggacggtccgcagaagcagacctcattgattgagtcctttcttccatccccttggcctgctccctgtaggaagtcatcctgccaactgatttaaaagggctctttagccagttgttgccaaccttatagggatgagtcccctgtgagattttgcttttccactgcctgggatgatgcagtttgaagaggcccttggacctccttgtaacatcagggacctttggagaccattatcagtgtaagccctgcttagctcatcttagagcaaagagccagcaccctgatgtccctggggtggctaggcaggagtggcgtggggccaatacccagaccccttcagccaccagcccctggcctgtgccttccaacccattagccatttcttgttgtgcccctttccaagatacagcctgcaagtggtagcaagaagtgattagaggcagatctggacttggcaacagaagtggtttcccatctccattgtctgagtctgattttcgctgatgctgttttgtggatttttgtggtagtgatggttgtcagtgctgccagtttcccaaaacgtaatcaagcctctggtcacatggctgtcgatgtaggcattctggagtggtgttcagccaagtgaccgggcaaaattgggctgtgaaattgtacttccaggcttggatgtaatttttgctctagagagaagcaagtggtgggaaggaggtagcatgacgtgtggtgtgcgggtttccttgctgccgtcacctctccgctcatacaggaatgaagccttagccaggaggccaggctcagccctgtgccactcaccgaagccactttctacaggccagcaggggcttgttgcaggctgtgggttttggtgtggtttgtcagaggctaattctgcagagtttccaaaaccagaagacatcgtatgcttgggatgggggccgtgccacccgtgggaatgctgcccgctctgcagactgctgctagagccagcaactccactaaggtggattttcatcaggggcctgcagggccctcccttttcccattgttcctgcgctgcaaattgcaggccccagcaatcgtgactgacgtttgctccttgactccaagaaactgagaccaaagaagctgctgttcttagcaagatgcgcactgcattccacaggtgggaggagtcggagaggcaggggcttgctttgcagccccacagacaacagttgcacagtgcctcaagccccagagtggctcaccctgtccagacctttgaggatatcaaaggacaaagtgcccaagtctttcctaccttgggggaacctggaacttggaaaggctccctgtcctagtcttgatctgttctgggccaggtcccagcttgagctgcctctgagatttgggctgtgcggatctctggagtgagctctgtttcggttgacccaggtcatggaatggaaacggtgaggccccagtggctgttctggaagaaacagatctcctggcaaaggccccagcatctccctcactgaaaccaggtggccggctcctcggactctgctttatgttgcggtgagaactctgcccaggtgtgcagggtttggcttgtgggctgcttgctgctcatctgatttttgtcccagtagtccctgcgttcttcattcaaccccttctgggacttcagctcagagagcaccatcccgggggtcagggcctccccacaggagccctgcagtgtggtagcgccatggctgtctcaaaccaagcaaaggaaggaccctgaggccttcacgctaaccatcctcgagcaactgctgttggaaggcctccctgggcctggcccccaccctctgccacccagtcctcccagctgccatgtttcaaagacgacctttacctcctgcctttggattgactctgcatttgaccacggactccagtctgtgtgtagggagagagctgagtaggaggcctccactccggatcgaggcctgtatagggctcgtttccccacacatgcctatttctgaagaggcttctgtcttatttgaaggccagcccacacccagctactttaacaccaggtttatggaaaatgtcaggccttccccacaactcctgtctaactgctgtcgcccccctacttgctggctctcagaagcctaggggagtccctgtggtcctgaattctttccccaaagacgaccagcatttaaccaacctaagggcccaaaggccttggacaactgcatggagctgcactctaggagaaggaggggaaccagatgttagatcaggggagggagcaggagtgtccctcccgtcagtgcctacccacctgtgaggcagccttctgatggcctggcccaccttccccagaaccaggggaggcctgaggcttcagttttactctgctgcaaaatgaaggcgggcctgcaagccgactacacctacggaggctgttgaggacaatttcattccattaaattaaaaaatactgactggctggcaggcaggtgccatgtctgggaacagggacgggggagcttcacctttttgtcttggcttttctttgggctgtgggggggcatccatttccagggtcggggaggaaataccaaatgcattgttgttctgctcaatacatctcacttgtttctaataaagaaagcagctgaaca

SEQ ID NO: 74069 - DNA, 4745 bp, Homo sapiens
ccaggtggtacgcctccgggtaacgggattgacactggagccaaaaagaagaaaaagaaacaaaaaaagaagaaagaaaaaggcagtgagacagattcagcccaggatcagcctgtgaagatgaactctttgccagcagagaggatccaggaaatacagaaggccattgagctgttctcagtgggtcagggacctgccaaaaccatggaggaggctagcaagcgaagctaccagttctgggatacgcagcccgtccccaagctgggcgaagtggtgaacacccatggccccgtggagcctgacaaggacaatatccgccaggagccctacaccctgccccagggcttcacctgggatgctttggacctgggcgatcgtggtgtgctaaaagaactgtacaccctcctgaatgagaactatgtggaagatgatgacaacatgttccgatttgattattccccggagtttcttttgtgggctctccggccacccggctggctcccccagtggcactgtggggttcgagtggtctcaagtcggaaattggttgggttcattagcgccatcccagcaaacatccatatctatgacacagagaagaagatggtagagatcaacttcctgtgtgtccacaagaagctgcgttccaagagggttgctccagttctgatccgagagatcaccaggcgggttcacctggagggcatcttccaagcagtttacactgccggggtggtactaccaaagcccgttggcacctgcaggtattggcatcggtccctaaacccacggaagctgattgaagtgaagttctcccacctgagcagaaatatgaccatgcagcgcaccatgaagctctaccgactgccagagactcccaagacagctgggctgcgaccaatggaaacaaaggacattccagtagtgcaccagctcctcaccaggtacttgaagcaatttcaccttacgcccgtcatgagccaggaggaggtggagcactggttctacccccaggagaatatcatcgacactttcgtggtggagaacgcaaacggagaggtgacagatttcctgagcttttatacgctgccctccaccatcatgaaccatccaacccacaagagtctcaaagctgcttattctttctacaacgttcacacccagacccctcttctagacctcatgagcgacgcccttgtcctcgccaaaatgaaagggtttgatgtgttcaatgcactggatctcatggagaacaaaaccttcctggagaagctcaagtttggcataggggacggcaacctgcagtattacctttacaattggaaatgccccagcatgggggcagagaaggttggactggtgctacaataaccagtcaccagtgcgattctggataaagccactgaaaattcgaaccaggaaatggaaccccaccactgttggtccaattttcacacacgtgagaatccctggcaaagggagcagaactgaaccggctttaccaaaccgccagcgaacttgacaattgtattgcgatggcgtgggctgcgtgacgtcacctccggtcgtgtctctggtctccgtgttttccagttaattacatcctcatgcagccgtgatcaagggaatgtaactgctgaaaactagctcgtgattggcatataatggagttaacgggtgaataataaaagtatatatatatattatatatatataaatattttaaatatctttcatgttccaaatgtacaaggatgtttggtctttaatgaaaagctgaatctagatcattcctcagaatgaggacccgaggacagtggcagacagacgcgttggcacagttcatggtttcctccagaggagacattggcttatcatggggaaaaagaggatctggagaacctcatccagctccccttctgaatcagctgggatgactggctttgagaaggaagggaagatggaacaggctcagatctcatgggatagcacgtggagctcttggctggggctgaccctgggcagggactttcctgcagggccagacctgcctgcattctgagacaaagcaatggacggtccgcagaagcagacctcattgattgagtcctttcttccatccccttggcctgctccctgtaggaagtcatcctgccaactgatttaaaagggctctttagccagttgttgccaaccttatagggatgagtcccctgtgagattttgcttttccactgcctgggatgatgcagtttgaagaggcccttggacctccttgtaacatcagggacctttggagaccattatcagtgtaagccctgcttagctcatcttagagcaaagagccagcaccctgatgtccctggggtggctaggcaggagtggcgtggggccaatacccagaccccttcagccaccagcccctggcctgtgccttccaacccattagccatttcttgttgtgcccctttccaagatacagcctgcaagtggtagcaagaagtgattagaggcagatctggacttggcaacagaagtggtttcccatctccattgtctgagtctgattttcgctgatgctgttttgtggatttttgtggtagtgatggttgtcagtgctgccagtttcccaaaacgtaatcaagcctctggtcacatggctgtcgatgtaggcattctggagtggtgttcagccaagtgaccgggcaaaattgggctgtgaaattgtacttccaggcttggatgtaatttttgctctagagagaagcaagtggtgggaaggaggtagcatgacgtgtggtgtgcgggtttccttgctgccgtcacctctccgctcatacaggaatgaagccttagccaggaggccaggctcagccctgtgccactcaccgaagccactttctacaggccagcaggggcttgttgcaggctgtgggttttggtgtggtttgtcagaggctaattctgcagagtttccaaaaccagaagacatcgtatgcttgggatgggggccgtgccacccgtgggaatgctgcccgctctgcagactgctgctagagccagcaactccactaaggtggattttcatcaggggcctgcagggccctcccttttcccattgttcctgcgctgcaaattgcaggccccagcaatcgtgactgacgtttgctccttgactccaagaaactgagaccaaagaagctgctgttcttagcaagatgcgcactgcattccacaggtgggaggagtcggagaggcaggggcttgctttgcagccccacagacaacagttgcacagtgcctcaagccccagagtggctcaccctgtccagacctttgaggatatcaaaggacaaagtgcccaagtctttcctaccttgggggaacctggaacttggaaaggctccctgtcctagtcttgatctgttctgggccaggtcccagcttgagctgcctctgagatttgggctgtgcggatctctggagtgagctctgtttcggttgacccaggtcatggaatggaaacggtgaggccccagtggctgttctggaagaaacagatctcctggcaaaggccccagcatctccctcactgaaaccaggtggccggctcctcggactctgctttatgttgcggtgagaactctgcccaggtgtgcagggtttggcttgtgggctgcttgctgctcatctgatttttgtcccagtagtccctgcgttcttcattcaaccccttctgggacttcagctcagagagcaccatcccgggggtcagggcctccccacaggagccctgcagtgtggtagcgccatggctgtctcaaaccaagcaaaggaaggaccctgaggccttcacgctaaccatcctcgagcaactgctgttggaaggcctccctgggcctggcccccaccctctgccacccagtcctcccagctgccatgtttcaaagacgacctttacctcctgcctttggattgactctgcatttgaccacggactccagtctgtgtgtagggagagagctgagtaggaggcctccactccggatcgaggcctgtatagggctcgtttccccacacatgcctatttctgaagaggcttctgtcttatttgaaggccagcccacacccagctactttaacaccaggtttatggaaaatgtcaggccttccccacaactcctgtctaactgctgtcgcccccctacttgctggctctcagaagcctaggggagtccctgtggtcctgaattctttccccaaagacgaccagcatttaaccaacctaagggcccaaaggccttggacaactgcatggagctgcactctaggagaaggaggggaaccagatgttagatcaggggagggagcaggagtgtccctcccgtcagtgcctacccacctgtgaggcagccttctgatggcctggcccaccttccccagaaccaggggaggcctgaggcttcagttttactctgctgcaaaatgaaggcgggcctgcaagccgactacacctacggaggctgttgaggacaatttcattccattaaattaaaaaatactgactggctggcaggcaggtgccatgtctgggaacagggacgggggagcttcacctttttgtcttggcttttctttgggctgtgggggggcatccatttccagggtcggggaggaaataccaaatgcattgttgttctgctcaatacatctcacttgtttctaataaagaaagcagctgaaca

SEQ ID NO: 74070 - DNA, 4994 bp, Homo sapiens
agcggggggagccctgctctcgcaactcaagatggcggacgagagtgagacagcagtgaagccgccggcacctccgctgccgcagatgatggaagggaacgggaacggccatgagcactgcagcgattgcgagaatgaggaggacaacagctacaaccggggtggtttgagtccagccaatgacactggagccaaaaagaagaaaaagaaacaaaaaaagaagaaagaaaaaggcagtgagacagattcagcccaggatcagcctgtgaaggttggagtgcagaagtacgaacatggctgaccgcagcctcaacctcctgggctcaagcaatcttcccacctcagcctcctgagtagccgggactacagatgaactctttgccagcagagaggatccaggaaatacagaaggccattgagctgttctcagtgggtcagggacctgccaaaaccatggaggaggctagcaagcgaagctaccagttctgggatacgcagcccgtccccaagctgggcgaagtggtgaacacccatggccccgtggagcctgacaaggacaatatccgccaggagccctacaccctgccccagggcttcacctgggatgctttggacctgggcgatcgtggtgtgctaaaagaactgtacaccctcctgaatgagaactatgtggaagatgatgacaacatgttccgatttgattattccccggagtttcttttgtgggctctccggccacccggctggctcccccagtggcactgtggggttcgagtggtctcaagtcggaaattggttgggttcattagcgccatcccagcaaacatccatatctatgacacagagaagaagatggtagagatcaacttcctgtgtgtccacaagaagctgcgttccaagagggttgctccagttctgatccgagagatcaccaggcgggttcacctggagggcatcttccaagcagtttacactgccggggtggtactaccaaagcccgttggcacctgcaggtattggcatcggtccctaaacccacggaagctgattgaagtgaagttctcccacctgagcagaaatatgaccatgcagcgcaccatgaagctctaccgactgccagagactcccaagacagctgggctgcgaccaatggaaacaaaggacattccagtagtgcaccagctcctcaccaggtacttgaagcaatttcaccttacgcccgtcatgagccaggaggaggtggagcactggttctacccccaggagaatatcatcgacactttcgtggtggagaacgcaaacggagaggtgacagatttcctgagcttttatacgctgccctccaccatcatgaaccatccaacccacaagagtctcaaagctgcttattctttctacaacgttcacacccagacccctcttctagacctcatgagcgacgcccttgtcctcgccaaaatgaaagggtttgatgtgttcaatgcactggatctcatggagaacaaaaccttcctggagaagctcaagtttggcataggggacggcaacctgcagtattacctttacaattggaaatgccccagcatgggggcagagaaggttggactggtgctacaataaccagtcaccagtgcgattctggataaagccactgaaaattcgaaccaggaaatggaaccccaccactgttggtccaattttcacacacgtgagaatccctggcaaagggagcagaactgaaccggctttaccaaaccgccagcgaacttgacaattgtattgcgatggcgtgggctgcgtgacgtcacctccggtcgtgtctctggtctccgtgttttccagttaattacatcctcatgcagccgtgatcaagggaatgtaactgctgaaaactagctcgtgattggcatataatggagttaacgggtgaataataaaagtatatatatatattatatatatataaatattttaaatatctttcatgttccaaatgtacaaggatgtttggtctttaatgaaaagctgaatctagatcattcctcagaatgaggacccgaggacagtggcagacagacgcgttggcacagttcatggtttcctccagaggagacattggcttatcatggggaaaaagaggatctggagaacctcatccagctccccttctgaatcagctgggatgactggctttgagaaggaagggaagatggaacaggctcagatctcatgggatagcacgtggagctcttggctggggctgaccctgggcagggactttcctgcagggccagacctgcctgcattctgagacaaagcaatggacggtccgcagaagcagacctcattgattgagtcctttcttccatccccttggcctgctccctgtaggaagtcatcctgccaactgatttaaaagggctctttagccagttgttgccaaccttatagggatgagtcccctgtgagattttgcttttccactgcctgggatgatgcagtttgaagaggcccttggacctccttgtaacatcagggacctttggagaccattatcagtgtaagccctgcttagctcatcttagagcaaagagccagcaccctgatgtccctggggtggctaggcaggagtggcgtggggccaatacccagaccccttcagccaccagcccctggcctgtgccttccaacccattagccatttcttgttgtgcccctttccaagatacagcctgcaagtggtagcaagaagtgattagaggcagatctggacttggcaacagaagtggtttcccatctccattgtctgagtctgattttcgctgatgctgttttgtggatttttgtggtagtgatggttgtcagtgctgccagtttcccaaaacgtaatcaagcctctggtcacatggctgtcgatgtaggcattctggagtggtgttcagccaagtgaccgggcaaaattgggctgtgaaattgtacttccaggcttggatgtaatttttgctctagagagaagcaagtggtgggaaggaggtagcatgacgtgtggtgtgcgggtttccttgctgccgtcacctctccgctcatacaggaatgaagccttagccaggaggccaggctcagccctgtgccactcaccgaagccactttctacaggccagcaggggcttgttgcaggctgtgggttttggtgtggtttgtcagaggctaattctgcagagtttccaaaaccagaagacatcgtatgcttgggatgggggccgtgccacccgtgggaatgctgcccgctctgcagactgctgctagagccagcaactccactaaggtggattttcatcaggggcctgcagggccctcccttttcccattgttcctgcgctgcaaattgcaggccccagcaatcgtgactgacgtttgctccttgactccaagaaactgagaccaaagaagctgctgttcttagcaagatgcgcactgcattccacaggtgggaggagtcggagaggcaggggcttgctttgcagccccacagacaacagttgcacagtgcctcaagccccagagtggctcaccctgtccagacctttgaggatatcaaaggacaaagtgcccaagtctttcctaccttgggggaacctggaacttggaaaggctccctgtcctagtcttgatctgttctgggccaggtcccagcttgagctgcctctgagatttgggctgtgcggatctctggagtgagctctgtttcggttgacccaggtcatggaatggaaacggtgaggccccagtggctgttctggaagaaacagatctcctggcaaaggccccagcatctccctcactgaaaccaggtggccggctcctcggactctgctttatgttgcggtgagaactctgcccaggtgtgcagggtttggcttgtgggctgcttgctgctcatctgatttttgtcccagtagtccctgcgttcttcattcaaccccttctgggacttcagctcagagagcaccatcccgggggtcagggcctccccacaggagccctgcagtgtggtagcgccatggctgtctcaaaccaagcaaaggaaggaccctgaggccttcacgctaaccatcctcgagcaactgctgttggaaggcctccctgggcctggcccccaccctctgccacccagtcctcccagctgccatgtttcaaagacgacctttacctcctgcctttggattgactctgcatttgaccacggactccagtctgtgtgtagggagagagctgagtaggaggcctccactccggatcgaggcctgtatagggctcgtttccccacacatgcctatttctgaagaggcttctgtcttatttgaaggccagcccacacccagctactttaacaccaggtttatggaaaatgtcaggccttccccacaactcctgtctaactgctgtcgcccccctacttgctggctctcagaagcctaggggagtccctgtggtcctgaattctttccccaaagacgaccagcatttaaccaacctaagggcccaaaggccttggacaactgcatggagctgcactctaggagaaggaggggaaccagatgttagatcaggggagggagcaggagtgtccctcccgtcagtgcctacccacctgtgaggcagccttctgatggcctggcccaccttccccagaaccaggggaggcctgaggcttcagttttactctgctgcaaaatgaaggcgggcctgcaagccgactacacctacggaggctgttgaggacaatttcattccattaaattaaaaaatactgactggctggcaggcaggtgccatgtctgggaacagggacgggggagcttcacctttttgtcttggcttttctttgggctgtgggggggcatccatttccagggtcggggaggaaataccaaatgcattgttgttctgctcaatacatctcacttgtttctaataaagaaagcagctgaaca

SEQ ID NO: 74071 - DNA, 4387 bp, Homo sapiens
  misc_feature (7)..(7): n is a, c, g, or t
ggtgttnatcgatgccacatagttctctaaaagaactgtacaccctcctgaatgagaactatgtggaagatgatgacaacatgttccgatttgattattccccggagtttcttttgtgggctctccggccacccggctggctcccccagtggcactgtggggttcgagtggtctcaagtcggaaattggttgggttcattagcgccatcccagcaaacatccatatctatgacacagagaagaagatggtagagatcaacttcctgtgtgtccacaagaagctgcgttccaagagggttgctccagttctgatccgagagatcaccaggcgggttcacctggagggcatcttccaagcagtttacactgccggggtggtactaccaaagcccgttggcacctgcaggtattggcatcggtccctaaacccacggaagctgattgaagtgaagttctcccacctgagcagaaatatgaccatgcagcgcaccatgaagctctaccgactgccagagactcccaagacagctgggctgcgaccaatggaaacaaaggacattccagtagtgcaccagctcctcaccaggtacttgaagcaatttcaccttacgcccgtcatgagccaggaggaggtggagcactggttctacccccaggagaatatcatcgacactttcgtggtggagaacgcaaacggagaggtgacagatttcctgagcttttatacgctgccctccaccatcatgaaccatccaacccacaagagtctcaaagctgcttattctttctacaacgttcacacccagacccctcttctagacctcatgagcgacgcccttgtcctcgccaaaatgaaagggtttgatgtgttcaatgcactggatctcatggagaacaaaaccttcctggagaagctcaagtttggcataggggacggcaacctgcagtattacctttacaattggaaatgccccagcatgggggcagagaaggttggactggtgctacaataaccagtcaccagtgcgattctggataaagccactgaaaattcgaaccaggaaatggaaccccaccactgttggtccaattttcacacacgtgagaatccctggcaaagggagcagaactgaaccggctttaccaaaccgccagcgaacttgacaattgtattgcgatggcgtgggctgcgtgacgtcacctccggtcgtgtctctggtctccgtgttttccagttaattacatcctcatgcagccgtgatcaagggaatgtaactgctgaaaactagctcgtgattggcatataatggagttaacgggtgaataataaaagtatatatatatattatatatatataaatattttaaatatctttcatgttccaaatgtacaaggatgtttggtctttaatgaaaagctgaatctagatcattcctcagaatgaggacccgaggacagtggcagacagacgcgttggcacagttcatggtttcctccagaggagacattggcttatcatggggaaaaagaggatctggagaacctcatccagctccccttctgaatcagctgggatgactggctttgagaaggaagggaagatggaacaggctcagatctcatgggatagcacgtggagctcttggctggggctgaccctgggcagggactttcctgcagggccagacctgcctgcattctgagacaaagcaatggacggtccgcagaagcagacctcattgattgagtcctttcttccatccccttggcctgctccctgtaggaagtcatcctgccaactgatttaaaagggctctttagccagttgttgccaaccttatagggatgagtcccctgtgagattttgcttttccactgcctgggatgatgcagtttgaagaggcccttggacctccttgtaacatcagggacctttggagaccattatcagtgtaagccctgcttagctcatcttagagcaaagagccagcaccctgatgtccctggggtggctaggcaggagtggcgtggggccaatacccagaccccttcagccaccagcccctggcctgtgccttccaacccattagccatttcttgttgtgcccctttccaagatacagcctgcaagtggtagcaagaagtgattagaggcagatctggacttggcaacagaagtggtttcccatctccattgtctgagtctgattttcgctgatgctgttttgtggatttttgtggtagtgatggttgtcagtgctgccagtttcccaaaacgtaatcaagcctctggtcacatggctgtcgatgtaggcattctggagtggtgttcagccaagtgaccgggcaaaattgggctgtgaaattgtacttccaggcttggatgtaatttttgctctagagagaagcaagtggtgggaaggaggtagcatgacgtgtggtgtgcgggtttccttgctgccgtcacctctccgctcatacaggaatgaagccttagccaggaggccaggctcagccctgtgccactcaccgaagccactttctacaggccagcaggggcttgttgcaggctgtgggttttggtgtggtttgtcagaggctaattctgcagagtttccaaaaccagaagacatcgtatgcttgggatgggggccgtgccacccgtgggaatgctgcccgctctgcagactgctgctagagccagcaactccactaaggtggattttcatcaggggcctgcagggccctcccttttcccattgttcctgcgctgcaaattgcaggccccagcaatcgtgactgacgtttgctccttgactccaagaaactgagaccaaagaagctgctgttcttagcaagatgcgcactgcattccacaggtgggaggagtcggagaggcaggggcttgctttgcagccccacagacaacagttgcacagtgcctcaagccccagagtggctcaccctgtccagacctttgaggatatcaaaggacaaagtgcccaagtctttcctaccttgggggaacctggaacttggaaaggctccctgtcctagtcttgatctgttctgggccaggtcccagcttgagctgcctctgagatttgggctgtgcggatctctggagtgagctctgtttcggttgacccaggtcatggaatggaaacggtgaggccccagtggctgttctggaagaaacagatctcctggcaaaggccccagcatctccctcactgaaaccaggtggccggctcctcggactctgctttatgttgcggtgagaactctgcccaggtgtgcagggtttggcttgtgggctgcttgctgctcatctgatttttgtcccagtagtccctgcgttcttcattcaaccccttctgggacttcagctcagagagcaccatcccgggggtcagggcctccccacaggagccctgcagtgtggtagcgccatggctgtctcaaaccaagcaaaggaaggaccctgaggccttcacgctaaccatcctcgagcaactgctgttggaaggcctccctgggcctggcccccaccctctgccacccagtcctcccagctgccatgtttcaaagacgacctttacctcctgcctttggattgactctgcatttgaccacggactccagtctgtgtgtagggagagagctgagtaggaggcctccactccggatcgaggcctgtatagggctcgtttccccacacatgcctatttctgaagaggcttctgtcttatttgaaggccagcccacacccagctactttaacaccaggtttatggaaaatgtcaggccttccccacaactcctgtctaactgctgtcgcccccctacttgctggctctcagaagcctaggggagtccctgtggtcctgaattctttccccaaagacgaccagcatttaaccaacctaagggcccaaaggccttggacaactgcatggagctgcactctaggagaaggaggggaaccagatgttagatcaggggagggagcaggagtgtccctcccgtcagtgcctacccacctgtgaggcagccttctgatggcctggcccaccttccccagaaccaggggaggcctgaggcttcagttttactctgctgcaaaatgaaggcgggcctgcaagccgactacacctacggaggctgttgaggacaatttcattccattaaattaaaaaatactgactggctggcaggcaggtgccatgtctgggaacagggacgggggagcttcacctttttgtcttggcttttctttgggctgtgggggggcatccatttccagggtcggggaggaaataccaaatgcattgttgttctgctcaatacatctcacttgtttctaataaagaaagcagctgaaca

SEQ ID NO: 74072 - DNA, 4143 bp, Homo sapiens
agcggggggagccctgctctcgcaactcaagatggcggacgagagtgagacagcagtgaagccgccggcacctccgctgccgcagatgatggaagggaacgggaacggccatgagcactgcagcgattgcgagaatgaggaggacaacagctacaaccgggggtattggcatcggtccctaaacccacggaagctgattgaagtgaagttctcccacctgagcagaaatatgaccatgcagcgcaccatgaagctctaccgactgccagagactcccaagacagctgggctgcgaccaatggaaacaaaggacattccagtagtgcaccagctcctcaccaggtacttgaagcaatttcaccttacgcccgtcatgagccaggaggaggtggagcactggttctacccccaggagaatatcatcgacactttcgtggtggagaacgcaaacggagaggtgacagatttcctgagcttttatacgctgccctccaccatcatgaaccatccaacccacaagagtctcaaagctgcttattctttctacaacgttcacacccagacccctcttctagacctcatgagcgacgcccttgtcctcgccaaaatgaaagggtttgatgtgttcaatgcactggatctcatggagaacaaaaccttcctggagaagctcaagtttggcataggggacggcaacctgcagtattacctttacaattggaaatgccccagcatgggggcagagaaggttggactggtgctacaataaccagtcaccagtgcgattctggataaagccactgaaaattcgaaccaggaaatggaaccccaccactgttggtccaattttcacacacgtgagaatccctggcaaagggagcagaactgaaccggctttaccaaaccgccagcgaacttgacaattgtattgcgatggcgtgggctgcgtgacgtcacctccggtcgtgtctctggtctccgtgttttccagttaattacatcctcatgcagccgtgatcaagggaatgtaactgctgaaaactagctcgtgattggcatataatggagttaacgggtgaataataaaagtatatatatatattatatatatataaatattttaaatatctttcatgttccaaatgtacaaggatgtttggtctttaatgaaaagctgaatctagatcattcctcagaatgaggacccgaggacagtggcagacagacgcgttggcacagttcatggtttcctccagaggagacattggcttatcatggggaaaaagaggatctggagaacctcatccagctccccttctgaatcagctgggatgactggctttgagaaggaagggaagatggaacaggctcagatctcatgggatagcacgtggagctcttggctggggctgaccctgggcagggactttcctgcagggccagacctgcctgcattctgagacaaagcaatggacggtccgcagaagcagacctcattgattgagtcctttcttccatccccttggcctgctccctgtaggaagtcatcctgccaactgatttaaaagggctctttagccagttgttgccaaccttatagggatgagtcccctgtgagattttgcttttccactgcctgggatgatgcagtttgaagaggcccttggacctccttgtaacatcagggacctttggagaccattatcagtgtaagccctgcttagctcatcttagagcaaagagccagcaccctgatgtccctggggtggctaggcaggagtggcgtggggccaatacccagaccccttcagccaccagcccctggcctgtgccttccaacccattagccatttcttgttgtgcccctttccaagatacagcctgcaagtggtagcaagaagtgattagaggcagatctggacttggcaacagaagtggtttcccatctccattgtctgagtctgattttcgctgatgctgttttgtggatttttgtggtagtgatggttgtcagtgctgccagtttcccaaaacgtaatcaagcctctggtcacatggctgtcgatgtaggcattctggagtggtgttcagccaagtgaccgggcaaaattgggctgtgaaattgtacttccaggcttggatgtaatttttgctctagagagaagcaagtggtgggaaggaggtagcatgacgtgtggtgtgcgggtttccttgctgccgtcacctctccgctcatacaggaatgaagccttagccaggaggccaggctcagccctgtgccactcaccgaagccactttctacaggccagcaggggcttgttgcaggctgtgggttttggtgtggtttgtcagaggctaattctgcagagtttccaaaaccagaagacatcgtatgcttgggatgggggccgtgccacccgtgggaatgctgcccgctctgcagactgctgctagagccagcaactccactaaggtggattttcatcaggggcctgcagggccctcccttttcccattgttcctgcgctgcaaattgcaggccccagcaatcgtgactgacgtttgctccttgactccaagaaactgagaccaaagaagctgctgttcttagcaagatgcgcactgcattccacaggtgggaggagtcggagaggcaggggcttgctttgcagccccacagacaacagttgcacagtgcctcaagccccagagtggctcaccctgtccagacctttgaggatatcaaaggacaaagtgcccaagtctttcctaccttgggggaacctggaacttggaaaggctccctgtcctagtcttgatctgttctgggccaggtcccagcttgagctgcctctgagatttgggctgtgcggatctctggagtgagctctgtttcggttgacccaggtcatggaatggaaacggtgaggccccagtggctgttctggaagaaacagatctcctggcaaaggccccagcatctccctcactgaaaccaggtggccggctcctcggactctgctttatgttgcggtgagaactctgcccaggtgtgcagggtttggcttgtgggctgcttgctgctcatctgatttttgtcccagtagtccctgcgttcttcattcaaccccttctgggacttcagctcagagagcaccatcccgggggtcagggcctccccacaggagccctgcagtgtggtagcgccatggctgtctcaaaccaagcaaaggaaggaccctgaggccttcacgctaaccatcctcgagcaactgctgttggaaggcctccctgggcctggcccccaccctctgccacccagtcctcccagctgccatgtttcaaagacgacctttacctcctgcctttggattgactctgcatttgaccacggactccagtctgtgtgtagggagagagctgagtaggaggcctccactccggatcgaggcctgtatagggctcgtttccccacacatgcctatttctgaagaggcttctgtcttatttgaaggccagcccacacccagctactttaacaccaggtttatggaaaatgtcaggccttccccacaactcctgtctaactgctgtcgcccccctacttgctggctctcagaagcctaggggagtccctgtggtcctgaattctttccccaaagacgaccagcatttaaccaacctaagggcccaaaggccttggacaactgcatggagctgcactctaggagaaggaggggaaccagatgttagatcaggggagggagcaggagtgtccctcccgtcagtgcctacccacctgtgaggcagccttctgatggcctggcccaccttccccagaaccaggggaggcctgaggcttcagttttactctgctgcaaaatgaaggcgggcctgcaagccgactacacctacggaggctgttgaggacaatttcattccattaaattaaaaaatactgactggctggcaggcaggtgccatgtctgggaacagggacgggggagcttcacctttttgtcttggcttttctttgggctgtgggggggcatccatttccagggtcggggaggaaataccaaatgcattgttgttctgctcaatacatctcacttgtttctaataaagaaagcagctgaaca

SEQ ID NO: 74073 - DNA, 3971 bp, Homo sapiens
acagctttgaaatggcagcaaaggggtaggaaggaggctgtccccacctgtcctcacctgttcttgtttgtccctgctgctttgcagaaagggtttgatgtgttcaatgcactggatctcatggagaacaaaaccttcctggagaaggtagtgcaccagctcctcaccaggtacttgaagcaatttcaccttacgcccgtcatgagccaggaggaggtggagcactggttctacccccaggagaatatcatcgacactttcgtggtggagaacgcaaacggagaggtgacagatttcctgagcttttatacgctgccctccaccatcatgaaccatccaacccacaagagtctcaaagctgcttattctttctacaacgttcacacccagacccctcttctagacctcatgagcgacgcccttgtcctcgccaaaatgaaagggtttgatgtgttcaatgcactggatctcatggagaacaaaaccttcctggagaagctcaagtttggcataggggacggcaacctgcagtattacctttacaattggaaatgccccagcatgggggcagagaaggttggactggtgctacaataaccagtcaccagtgcgattctggataaagccactgaaaattcgaaccaggaaatggaaccccaccactgttggtccaattttcacacacgtgagaatccctggcaaagggagcagaactgaaccggctttaccaaaccgccagcgaacttgacaattgtattgcgatggcgtgggctgcgtgacgtcacctccggtcgtgtctctggtctccgtgttttccagttaattacatcctcatgcagccgtgatcaagggaatgtaactgctgaaaactagctcgtgattggcatataatggagttaacgggtgaataataaaagtatatatatatattatatatatataaatattttaaatatctttcatgttccaaatgtacaaggatgtttggtctttaatgaaaagctgaatctagatcattcctcagaatgaggacccgaggacagtggcagacagacgcgttggcacagttcatggtttcctccagaggagacattggcttatcatggggaaaaagaggatctggagaacctcatccagctccccttctgaatcagctgggatgactggctttgagaaggaagggaagatggaacaggctcagatctcatgggatagcacgtggagctcttggctggggctgaccctgggcagggactttcctgcagggccagacctgcctgcattctgagacaaagcaatggacggtccgcagaagcagacctcattgattgagtcctttcttccatccccttggcctgctccctgtaggaagtcatcctgccaactgatttaaaagggctctttagccagttgttgccaaccttatagggatgagtcccctgtgagattttgcttttccactgcctgggatgatgcagtttgaagaggcccttggacctccttgtaacatcagggacctttggagaccattatcagtgtaagccctgcttagctcatcttagagcaaagagccagcaccctgatgtccctggggtggctaggcaggagtggcgtggggccaatacccagaccccttcagccaccagcccctggcctgtgccttccaacccattagccatttcttgttgtgcccctttccaagatacagcctgcaagtggtagcaagaagtgattagaggcagatctggacttggcaacagaagtggtttcccatctccattgtctgagtctgattttcgctgatgctgttttgtggatttttgtggtagtgatggttgtcagtgctgccagtttcccaaaacgtaatcaagcctctggtcacatggctgtcgatgtaggcattctggagtggtgttcagccaagtgaccgggcaaaattgggctgtgaaattgtacttccaggcttggatgtaatttttgctctagagagaagcaagtggtgggaaggaggtagcatgacgtgtggtgtgcgggtttccttgctgccgtcacctctccgctcatacaggaatgaagccttagccaggaggccaggctcagccctgtgccactcaccgaagccactttctacaggccagcaggggcttgttgcaggctgtgggttttggtgtggtttgtcagaggctaattctgcagagtttccaaaaccagaagacatcgtatgcttgggatgggggccgtgccacccgtgggaatgctgcccgctctgcagactgctgctagagccagcaactccactaaggtggattttcatcaggggcctgcagggccctcccttttcccattgttcctgcgctgcaaattgcaggccccagcaatcgtgactgacgtttgctccttgactccaagaaactgagaccaaagaagctgctgttcttagcaagatgcgcactgcattccacaggtgggaggagtcggagaggcaggggcttgctttgcagccccacagacaacagttgcacagtgcctcaagccccagagtggctcaccctgtccagacctttgaggatatcaaaggacaaagtgcccaagtctttcctaccttgggggaacctggaacttggaaaggctccctgtcctagtcttgatctgttctgggccaggtcccagcttgagctgcctctgagatttgggctgtgcggatctctggagtgagctctgtttcggttgacccaggtcatggaatggaaacggtgaggccccagtggctgttctggaagaaacagatctcctggcaaaggccccagcatctccctcactgaaaccaggtggccggctcctcggactctgctttatgttgcggtgagaactctgcccaggtgtgcagggtttggcttgtgggctgcttgctgctcatctgatttttgtcccagtagtccctgcgttcttcattcaaccccttctgggacttcagctcagagagcaccatcccgggggtcagggcctccccacaggagccctgcagtgtggtagcgccatggctgtctcaaaccaagcaaaggaaggaccctgaggccttcacgctaaccatcctcgagcaactgctgttggaaggcctccctgggcctggcccccaccctctgccacccagtcctcccagctgccatgtttcaaagacgacctttacctcctgcctttggattgactctgcatttgaccacggactccagtctgtgtgtagggagagagctgagtaggaggcctccactccggatcgaggcctgtatagggctcgtttccccacacatgcctatttctgaagaggcttctgtcttatttgaaggccagcccacacccagctactttaacaccaggtttatggaaaatgtcaggccttccccacaactcctgtctaactgctgtcgcccccctacttgctggctctcagaagcctaggggagtccctgtggtcctgaattctttccccaaagacgaccagcatttaaccaacctaagggcccaaaggccttggacaactgcatggagctgcactctaggagaaggaggggaaccagatgttagatcaggggagggagcaggagtgtccctcccgtcagtgcctacccacctgtgaggcagccttctgatggcctggcccaccttccccagaaccaggggaggcctgaggcttcagttttactctgctgcaaaatgaaggcgggcctgcaagccgactacacctacggaggctgttgaggacaatttcattccattaaattaaaaaatactgactggctggcaggcaggtgccatgtctgggaacagggacgggggagcttcacctttttgtcttggcttttctttgggctgtgggggggcatccatttccagggtcggggaggaaataccaaatgcattgttgttctgctcaatacatctcacttgtttctaataaagaaagcagctgaaca

SEQ ID NO: 74074 - DNA, 3785 bp, Homo sapiens
cccggcctggacactgagtacatatgtgtacactctgagggacactgggcagaggccaggctggagggggcgctcagagtgtcctgagaaccacccggagagcggggattaacgtggaagcagcggagcttctgagggaaccttgttcttgtggctgcccacaggacagctttgaaatggcagcaaaggggtaggaaggaggctgtccccacctgtcctcacctgttcttgtttgtccctgctgctttgcagaaagggtttgatgtgttcaatgcactggatctcatggagaacaaaaccttcctggagaagctcaagtttggcataggggacggcaacctgcagtattacctttacaattggaaatgccccagcatgggggcagagaaggttggactggtgctacaataaccagtcaccagtgcgattctggataaagccactgaaaattcgaaccaggaaatggaaccccaccactgttggtccaattttcacacacgtgagaatccctggcaaagggagcagaactgaaccggctttaccaaaccgccagcgaacttgacaattgtattgcgatggcgtgggctgcgtgacgtcacctccggtcgtgtctctggtctccgtgttttccagttaattacatcctcatgcagccgtgatcaagggaatgtaactgctgaaaactagctcgtgattggcatataatggagttaacgggtgaataataaaagtatatatatatattatatatatataaatattttaaatatctttcatgttccaaatgtacaaggatgtttggtctttaatgaaaagctgaatctagatcattcctcagaatgaggacccgaggacagtggcagacagacgcgttggcacagttcatggtttcctccagaggagacattggcttatcatggggaaaaagaggatctggagaacctcatccagctccccttctgaatcagctgggatgactggctttgagaaggaagggaagatggaacaggctcagatctcatgggatagcacgtggagctcttggctggggctgaccctgggcagggactttcctgcagggccagacctgcctgcattctgagacaaagcaatggacggtccgcagaagcagacctcattgattgagtcctttcttccatccccttggcctgctccctgtaggaagtcatcctgccaactgatttaaaagggctctttagccagttgttgccaaccttatagggatgagtcccctgtgagattttgcttttccactgcctgggatgatgcagtttgaagaggcccttggacctccttgtaacatcagggacctttggagaccattatcagtgtaagccctgcttagctcatcttagagcaaagagccagcaccctgatgtccctggggtggctaggcaggagtggcgtggggccaatacccagaccccttcagccaccagcccctggcctgtgccttccaacccattagccatttcttgttgtgcccctttccaagatacagcctgcaagtggtagcaagaagtgattagaggcagatctggacttggcaacagaagtggtttcccatctccattgtctgagtctgattttcgctgatgctgttttgtggatttttgtggtagtgatggttgtcagtgctgccagtttcccaaaacgtaatcaagcctctggtcacatggctgtcgatgtaggcattctggagtggtgttcagccaagtgaccgggcaaaattgggctgtgaaattgtacttccaggcttggatgtaatttttgctctagagagaagcaagtggtgggaaggaggtagcatgacgtgtggtgtgcgggtttccttgctgccgtcacctctccgctcatacaggaatgaagccttagccaggaggccaggctcagccctgtgccactcaccgaagccactttctacaggccagcaggggcttgttgcaggctgtgggttttggtgtggtttgtcagaggctaattctgcagagtttccaaaaccagaagacatcgtatgcttgggatgggggccgtgccacccgtgggaatgctgcccgctctgcagactgctgctagagccagcaactccactaaggtggattttcatcaggggcctgcagggccctcccttttcccattgttcctgcgctgcaaattgcaggccccagcaatcgtgactgacgtttgctccttgactccaagaaactgagaccaaagaagctgctgttcttagcaagatgcgcactgcattccacaggtgggaggagtcggagaggcaggggcttgctttgcagccccacagacaacagttgcacagtgcctcaagccccagagtggctcaccctgtccagacctttgaggatatcaaaggacaaagtgcccaagtctttcctaccttgggggaacctggaacttggaaaggctccctgtcctagtcttgatctgttctgggccaggtcccagcttgagctgcctctgagatttgggctgtgcggatctctggagtgagctctgtttcggttgacccaggtcatggaatggaaacggtgaggccccagtggctgttctggaagaaacagatctcctggcaaaggccccagcatctccctcactgaaaccaggtggccggctcctcggactctgctttatgttgcggtgagaactctgcccaggtgtgcagggtttggcttgtgggctgcttgctgctcatctgatttttgtcccagtagtccctgcgttcttcattcaaccccttctgggacttcagctcagagagcaccatcccgggggtcagggcctccccacaggagccctgcagtgtggtagcgccatggctgtctcaaaccaagcaaaggaaggaccctgaggccttcacgctaaccatcctcgagcaactgctgttggaaggcctccctgggcctggcccccaccctctgccacccagtcctcccagctgccatgtttcaaagacgacctttacctcctgcctttggattgactctgcatttgaccacggactccagtctgtgtgtagggagagagctgagtaggaggcctccactccggatcgaggcctgtatagggctcgtttccccacacatgcctatttctgaagaggcttctgtcttatttgaaggccagcccacacccagctactttaacaccaggtttatggaaaatgtcaggccttccccacaactcctgtctaactgctgtcgcccccctacttgctggctctcagaagcctaggggagtccctgtggtcctgaattctttccccaaagacgaccagcatttaaccaacctaagggcccaaaggccttggacaactgcatggagctgcactctaggagaaggaggggaaccagatgttagatcaggggagggagcaggagtgtccctcccgtcagtgcctacccacctgtgaggcagccttctgatggcctggcccaccttccccagaaccaggggaggcctgaggcttcagttttactctgctgcaaaatgaaggcgggcctgcaagccgactacacctacggaggctgttgaggacaatttcattccattaaattaaaaaatactgactggctggcaggcaggtgccatgtctgggaacagggacgggggagcttcacctttttgtcttggcttttctttgggctgtgggggggcatccatttccagggtcggggaggaaataccaaatgcattgttgttctgctcaatacatctcacttgtttctaataaagaaagcagctgaaca

SEQ ID NO: 74075 - DNA, 2513 bp, Homo sapiens
gaagaaaagtaagctaaagaagggaaacagaacctgcagaacactactacaagagagaagattctatacctctgacatagatcctctaatcttccactcgaagaatgaaatcctcttgtgatagagaaaggagttctcgttcttcctcattgtcatctcatcactcatcaaagagagactggtctaaatctgataaggatgtccagagctctttaacccattccagcagggacccactcgcgagtgggtccctgcaagtggtagcaagaagtgattagaggcagatctggacttggcaacagaagtggtttcccatctccattgtctgagtctgattttcgctgatgctgttttgtggatttttgtggtagtgatggttgtcagtgctgccagtttcccaaaacgtaatcaagcctctggtcacatggctgtcgatgtaggcattctggagtggtgttcagccaagtgaccgggcaaaattgggctgtgaaattgtacttccaggcttggatgtaatttttgctctagagagaagcaagtggtgggaaggaggtagcatgacgtgtggtgtgcgggtttccttgctgccgtcacctctccgctcatacaggaatgaagccttagccaggaggccaggctcagccctgtgccactcaccgaagccactttctacaggccagcaggggcttgttgcaggctgtgggttttggtgtggtttgtcagaggctaattctgcagagtttccaaaaccagaagacatcgtatgcttgggatgggggccgtgccacccgtgggaatgctgcccgctctgcagactgctgctagagccagcaactccactaaggtggattttcatcaggggcctgcagggccctcccttttcccattgttcctgcgctgcaaattgcaggccccagcaatcgtgactgacgtttgctccttgactccaagaaactgagaccaaagaagctgctgttcttagcaagatgcgcactgcattccacaggtgggaggagtcggagaggcaggggcttgctttgcagccccacagacaacagttgcacagtgcctcaagccccagagtggctcaccctgtccagacctttgaggatatcaaaggacaaagtgcccaagtctttcctaccttgggggaacctggaacttggaaaggctccctgtcctagtcttgatctgttctgggccaggtcccagcttgagctgcctctgagatttgggctgtgcggatctctggagtgagctctgtttcggttgacccaggtcatggaatggaaacggtgaggccccagtggctgttctggaagaaacagatctcctggcaaaggccccagcatctccctcactgaaaccaggtggccggctcctcggactctgctttatgttgcggtgagaactctgcccaggtgtgcagggtttggcttgtgggctgcttgctgctcatctgatttttgtcccagtagtccctgcgttcttcattcaaccccttctgggacttcagctcagagagcaccatcccgggggtcagggcctccccacaggagccctgcagtgtggtagcgccatggctgtctcaaaccaagcaaaggaaggaccctgaggccttcacgctaaccatcctcgagcaactgctgttggaaggcctccctgggcctggcccccaccctctgccacccagtcctcccagctgccatgtttcaaagacgacctttacctcctgcctttggattgactctgcatttgaccacggactccagtctgtgtgtagggagagagctgagtaggaggcctccactccggatcgaggcctgtatagggctcgtttccccacacatgcctatttctgaagaggcttctgtcttatttgaaggccagcccacacccagctactttaacaccaggtttatggaaaatgtcaggccttccccacaactcctgtctaactgctgtcgcccccctacttgctggctctcagaagcctaggggagtccctgtggtcctgaattctttccccaaagacgaccagcatttaaccaacctaagggcccaaaggccttggacaactgcatggagctgcactctaggagaaggaggggaaccagatgttagatcaggggagggagcaggagtgtccctcccgtcagtgcctacccacctgtgaggcagccttctgatggcctggcccaccttccccagaaccaggggaggcctgaggcttcagttttactctgctgcaaaatgaaggcgggcctgcaagccgactacacctacggaggctgttgaggacaatttcattccattaaattaaaaaatactgactggctggcaggcaggtgccatgtctgggaacagggacgggggagcttcacctttttgtcttggcttttctttgggctgtgggggggcatccatttccagggtcggggaggaaataccaaatgcattgttgttctgctcaatacatctcacttgtttctaataaagaaagcagctgaaca

SEQ ID NO: 74076 - DNA, 2099 bp, Homo sapiens
tagacttagagaatcaccttgttcaagcattctggagtggtgttcagccaagtgaccgggcaaaattgggctgtgaaattgtacttccaggcttggatgtaatttttgctctagagagaagcaagtggtgggaaggaggtagcatgacgtgtggtgtgcgggtttccttgctgccgtcacctctccgctcatacaggaatgaagccttagccaggaggccaggctcagccctgtgccactcaccgaagccactttctacaggccagcaggggcttgttgcaggctgtgggttttggtgtggtttgtcagaggctaattctgcagagtttccaaaaccagaagacatcgtatgcttgggatgggggccgtgccacccgtgggaatgctgcccgctctgcagactgctgctagagccagcaactccactaaggtggattttcatcaggggcctgcagggccctcccttttcccattgttcctgcgctgcaaattgcaggccccagcaatcgtgactgacgtttgctccttgactccaagaaactgagaccaaagaagctgctgttcttagcaagatgcgcactgcattccacaggtgggaggagtcggagaggcaggggcttgctttgcagccccacagacaacagttgcacagtgcctcaagccccagagtggctcaccctgtccagacctttgaggatatcaaaggacaaagtgcccaagtctttcctaccttgggggaacctggaacttggaaaggctccctgtcctagtcttgatctgttctgggccaggtcccagcttgagctgcctctgagatttgggctgtgcggatctctggagtgagctctgtttcggttgacccaggtcatggaatggaaacggtgaggccccagtggctgttctggaagaaacagatctcctggcaaaggccccagcatctccctcactgaaaccaggtggccggctcctcggactctgctttatgttgcggtgagaactctgcccaggtgtgcagggtttggcttgtgggctgcttgctgctcatctgatttttgtcccagtagtccctgcgttcttcattcaaccccttctgggacttcagctcagagagcaccatcccgggggtcagggcctccccacaggagccctgcagtgtggtagcgccatggctgtctcaaaccaagcaaaggaaggaccctgaggccttcacgctaaccatcctcgagcaactgctgttggaaggcctccctgggcctggcccccaccctctgccacccagtcctcccagctgccatgtttcaaagacgacctttacctcctgcctttggattgactctgcatttgaccacggactccagtctgtgtgtagggagagagctgagtaggaggcctccactccggatcgaggcctgtatagggctcgtttccccacacatgcctatttctgaagaggcttctgtcttatttgaaggccagcccacacccagctactttaacaccaggtttatggaaaatgtcaggccttccccacaactcctgtctaactgctgtcgcccccctacttgctggctctcagaagcctaggggagtccctgtggtcctgaattctttccccaaagacgaccagcatttaaccaacctaagggcccaaaggccttggacaactgcatggagctgcactctaggagaaggaggggaaccagatgttagatcaggggagggagcaggagtgtccctcccgtcagtgcctacccacctgtgaggcagccttctgatggcctggcccaccttccccagaaccaggggaggcctgaggcttcagttttactctgctgcaaaatgaaggcgggcctgcaagccgactacacctacggaggctgttgaggacaatttcattccattaaattaaaaaatactgactggctggcaggcaggtgccatgtctgggaacagggacgggggagcttcacctttttgtcttggcttttctttgggctgtgggggggcatccatttccagggtcggggaggaaataccaaatgcattgttgttctgctcaatacatctcacttgtttctaataaagaaagcagctgaaca

SEQ ID NO: 74077 - DNA, 1842 bp, Homo sapiens
agctcggtaccccttttggggtctctgctacaagaaagataagggatggcagaggctaattctgcagagtttccaaaaccagaagacatcgtatgcttgggatgggggccgtgccacccgtgggaatgctgcccgctctgcagactgctgctagagccagcaactccactaaggtggattttcatcaggggcctgcagggccctcccttttcccattgttcctgcgctgcaaattgcaggccccagcaatcgtgactgacgtttgctccttgactccaagaaactgagaccaaagaagctgctgttcttagcaagatgcgcactgcattccacaggtgggaggagtcggagaggcaggggcttgctttgcagccccacagacaacagttgcacagtgcctcaagccccagagtggctcaccctgtccagacctttgaggatatcaaaggacaaagtgcccaagtctttcctaccttgggggaacctggaacttggaaaggctccctgtcctagtcttgatctgttctgggccaggtcccagcttgagctgcctctgagatttgggctgtgcggatctctggagtgagctctgtttcggttgacccaggtcatggaatggaaacggtgaggccccagtggctgttctggaagaaacagatctcctggcaaaggccccagcatctccctcactgaaaccaggtggccggctcctcggactctgctttatgttgcggtgagaactctgcccaggtgtgcagggtttggcttgtgggctgcttgctgctcatctgatttttgtcccagtagtccctgcgttcttcattcaaccccttctgggacttcagctcagagagcaccatcccgggggtcagggcctccccacaggagccctgcagtgtggtagcgccatggctgtctcaaaccaagcaaaggaaggaccctgaggccttcacgctaaccatcctcgagcaactgctgttggaaggcctccctgggcctggcccccaccctctgccacccagtcctcccagctgccatgtttcaaagacgacctttacctcctgcctttggattgactctgcatttgaccacggactccagtctgtgtgtagggagagagctgagtaggaggcctccactccggatcgaggcctgtatagggctcgtttccccacacatgcctatttctgaagaggcttctgtcttatttgaaggccagcccacacccagctactttaacaccaggtttatggaaaatgtcaggccttccccacaactcctgtctaactgctgtcgcccccctacttgctggctctcagaagcctaggggagtccctgtggtcctgaattctttccccaaagacgaccagcatttaaccaacctaagggcccaaaggccttggacaactgcatggagctgcactctaggagaaggaggggaaccagatgttagatcaggggagggagcaggagtgtccctcccgtcagtgcctacccacctgtgaggcagccttctgatggcctggcccaccttccccagaaccaggggaggcctgaggcttcagttttactctgctgcaaaatgaaggcgggcctgcaagccgactacacctacggaggctgttgaggacaatttcattccattaaattaaaaaatactgactggctggcaggcaggtgccatgtctgggaacagggacgggggagcttcacctttttgtcttggcttttctttgggctgtgggggggcatccatttccagggtcggggaggaaataccaaatgcattgttgttctgctcaatacatctcacttgtttctaataaagaaagcagctgaaca

SEQ ID NO: 74078 - DNA, 1297 bp, Homo sapiens
agcggggggagccctgctctcgcaactcaagatggcggacgagagtgagacagcagtgaagccgccggcacctccgctgccgcagatgatggaagggaacgggaacggccatgagcactgcagcgattgcgagaatgaggaggacaacagctacaaccggggtggtttgagtccagccaatgacactggagccaaaaagaagaaaaagaaacaaaaaaagaagaaagaaaaaggcagtgagacagattcagcccaggatcagcctgtgaagatgaactctttgccagcagagaggatccaggaaatacagaaggccattgagctgttctcagtgggtcagggacctgccaaaaccatggaggaggctagcaagcgaagctaccagttctgggatacgcagcccgtccccaagctgggcgaagtggtgaacacccatggccccgtggagcctgacaaggacaatatccgccaggagccctacaccctgccccagggcttcacctgggatgctttggacctgggcgatcgtggtgtgctaaaagaactgtacaccctcctgaatgagaactatgtggaagatgatgacaacatgttccgatttgattattccccggagtttcttttgtgggctctccggccacccggctggctcccccagtggcactgtggggttcgagtggtctcaagtcggaaattggttgggttcattagcgccatcccagcaaacatccatatctatgacacagagaagaagatggtagagatcaacttcctgtgtgtccacaagaagctgcgttccaagagggttgctccagttctgatccgagagatcaccaggcgggttcacctggagggcatcttccaagcagtttacactgccggggtggtactaccaaagcccgttggcacctgcaggtattggcatcggtccctaaacccacggaagctgattgaagtgaagttctcccacctgagcagaaatatgaccatgcagcgcaccatgaagctctaccgactgccagagactcccaagacagctgggctgcgaccaatggaaacaaaggacattccagtagtgcaccagctcctcaccaggtacttgaagcaatttcaccttacgcccgtcatgagccaggaggaggtggagcactggttctacccccaggagaatatcatcgacactttcgtggtggagaacgcaaacggagaggtgacagatttcctgagcttttatacgctgccctccaccatcatgaacccgtctccacaggggaacctctagatcgaccatacagca

SEQ ID NO: 74079 - DNA, 1727 bp, Homo sapiens
agcggggggagccctgctctcgcaactcaagatggcggacgagagtgagacagcagtgaagccgccggcacctccgctgccgcagatgatggaagggaacgggaacggccatgagcactgcagcgattgcgagaatgaggaggacaacagctacaaccggggtggtttgagtccagccaatgacactggagccaaaaagaagaaaaagaaacaaaaaaagaagaaagaaaaaggcagtgagacagattcagcccaggatcagcctgtgaagatgaactctttgccagcagagaggatccaggaaatacagaaggccattgagctgttctcagtgggtcagggacctgccaaaaccatggaggaggctagcaagcgaagctaccagttctgggatacgcagcccgtccccaagctgggcgaagtggtgaacacccatggccccgtggagcctgacaaggacaatatccgccaggagccctacaccctgccccagggcttcacctgggatgctttggacctgggcgatcgtggtgtgctaaaagaactgtacaccctcctgaatgagaactatgtggaagatgatgacaacatgttccgatttgattattccccggagtttcttttgtgggctctccggccacccggctggctcccccagtggcactgtggggttcgagtggtctcaagtcggaaattggttgggttcattagcgccatcccagcaaacatccatatctatgacacagagaagaagatggtagagatcaacttcctgtgtgtccacaagaagctgcgttccaagagggttgctccagttctgatccgagagatcaccaggcgggttcacctggagggcatcttccaagcagtttacactgccggggtggtactaccaaagcccgttggcacctgcaggtattggcatcggtccctaaacccacggaagctgattgaagtgaagttctcccacctgagcagaaatatgaccatgcagcgcaccatgaagctctaccgactgccagagggccagtgctgccccgggtggtgggcagggggcagagagagggcaaggagagcctggctgtcagcaggagagaagggctctgggtggagagggagctttctcctactggaaaagcgaaccagcccatagtcttcagatttcctggactttctatttctgttatctgaagcaggattttattttagtttaactttctcagttcctctgagtctgtgcctggactagcttctctgccatctgttgaaaggctcagagaacacctattctctgtaattttagcctaagtaaagcataaatagaatgatgaatccacttagtgaaccttcatacacacggcagcgcgttccaaagcccagcgcagatgcactacagggtctgtgacgcccctctgccgggtcaggtaaagggtgacctgagcttgtgagggatccccgatttctaatcccaatttccccacccagatttggctgaaggactgggcaaccttaaagtgagctgcttttctgttctgggtctcagttttcctagtttcccaaagaaacaaatgctccaactgtggctggcttcaggtagggattcttttttttttgttttgagacggggtctcattctgttgcccaggctggagtgcagtggcacagtcacagctcactgcagcctcgacctcccacttcatgttaccaatctgaagtgggagcggtcc

SEQ ID NO: 74080 - DNA, 1135 bp, Homo sapiens
agcggggggagccctgctctcgcaactcaagatggcggacgagagtgagacagcagtgaagccgccggcacctccgctgccgcagatgatggaagggaacgggaacggccatgagcactgcagcgattgcgagaatgaggaggacaacagctacaaccggggtggtttgagtccagccaatgacactggagccaaaaagaagaaaaagaaacaaaaaaagaagaaagaaaaaggcagtgagacagattcagcccaggatcagcctgtgaagatgaactctttgccagcagagaggatccaggaaatacagaaggccattgagctgttctcagtgggtcagggacctgccaaaaccatggaggaggctagcaagcgaagctaccagttctgggatacgcagcccgtccccaagctgggcgaagtggtgaacacccatggccccgtggagcctgacaaggacaatatccgccaggagccctacaccctgccccagggcttcacctgggatgctttggacctgggcgatcgtggtgtgctaaaagaactgtacaccctcctgaatgagaactatgtggaagatgatgacaacatgttccgatttgattattccccggagtttcttttgtgggctctccggccacccggctggctcccccagtggcactgtggggttcgagtggtctcaagtcggaaattggttgggttcattagcgccatcccagcaaacatccatatctatgacacagagaagaagatggtagagatcaacttcctgtgtgtccacaagaagctgcgttccaagagggttgctccagttctgatccgagagatcaccaggcgggttcacctggagggcatcttccaagcagtttacactgccggggtggtactaccaaagcccgttggcacctgcaggtattggcatcggtccctaaacccacggaagctgattgaagtgaagttctcccacctgagcagaaatatgaccatgcagcgcaccatgaagctctaccgactgccagagactcccaagacagctgggctgcgaccaatggaaacaaaggacattccaacagctacaaccggggtggtttgagtccagccaatgacactggagccaaaaagaagaaaaaga

SEQ ID NO: 74081 - DNA, 1265 bp, Homo sapiens
agcggggggagccctgctctcgcaactcaagatggcggacgagagtgagacagcagtgaagccgccggcacctccgctgccgcagatgatggaagggaacgggaacggccatgagcactgcagcgattgcgagaatgaggaggacaacagctacaaccggggtggtttgagtccagccaatgacactggagccaaaaagaagaaaaagaaacaaaaaaagaagaaagaaaaaggcagtgagacagattcagcccaggatcagcctgtgaagatgaactctttgccagcagagaggatccaggaaatacagaaggccattgagctgttctcagtgggtcagggacctgccaaaaccatggaggaggctagcaagcgaagctaccagttctgggatacgcagcccgtccccaagctgggcgaagtggtgaacacccatggccccgtggagcctgacaaggacaatatccgccaggagccctacaccctgccccagggcttcacctgggatgctttggacctgggcgatcgtggtgtgctaaaagaactgtacaccctcctgaatgagaactatgtggaagatgatgacaacatgttccgatttgattattccccggagtttcttttgtgggctctccggccacccggctggctcccccagtggcactgtggggttcgagtggtctcaagtcggaaattggttgggttcattagcgccatcccagcaaacatccatatctatgacacagagaagaagatggtagagatcaacttcctgtgtgtccacaagaagctgcgttccaagagggttgctccagttctgatccgagagatcaccaggcgggttcacctggagggcatcttccaagcagtttacactgccggggtggtactaccaaagcccgttggcacctgcaggtattggcatcggtccctaaacccacggaagctgattgaagtgaagttctcccacctgagcagaaatatgaccatgcagcgcaccatgaagctctaccgactgccagagggccagtgctgccccgggtggtgggcagggggcagagagagggcaaggagagcctggctgtcagcaggagagaagggctctgggtggagagggagctttctcctactggaaaagcgaaccagcctatcatccctccgagctgtcctagacgtctctatttacttgcctatccgaatcagcgacgtctagtttatgtttacctgatctcagttctctgagtcctgtgcctaactagcttctc

SEQ ID NO: 74082 - DNA, 1397 bp, Homo sapiens
aggatcccccatgccctcatccagtggtcttgggggaacctggaacttggaaaggctccctgtcctagtcttgatctgttctgggccaggtcccagcttgagctgcctctgagatttgggctgtgcggatctctggagtgagctctgtttcggttgacccaggtcatggaatggaaacggtgaggccccagtggctgttctggaagaaacagatctcctggcaaaggccccagcatctccctcactgaaaccaggtggccggctcctcggactctgctttatgttgcggtgagaactctgcccaggtgtgcagggtttggcttgtgggctgcttgctgctcatctgatttttgtcccagtagtccctgcgttcttcattcaaccccttctgggacttcagctcagagagcaccatcccgggggtcagggcctccccacaggagccctgcagtgtggtagcgccatggctgtctcaaaccaagcaaaggaaggaccctgaggccttcacgctaaccatcctcgagcaactgctgttggaaggcctccctgggcctggcccccaccctctgccacccagtcctcccagctgccatgtttcaaagacgacctttacctcctgcctttggattgactctgcatttgaccacggactccagtctgtgtgtagggagagagctgagtaggaggcctccactccggatcgaggcctgtatagggctcgtttccccacacatgcctatttctgaagaggcttctgtcttatttgaaggccagcccacacccagctactttaacaccaggtttatggaaaatgtcaggccttccccacaactcctgtctaactgctgtcgcccccctacttgctggctctcagaagcctaggggagtccctgtggtcctgaattctttccccaaagacgaccagcatttaaccaacctaagggcccaaaggccttggacaactgcatggagctgcactctaggagaaggaggggaaccagatgttagatcaggggagggagcaggagtgtccctcccgtcagtgcctacccacctgtgaggcagccttctgatggcctggcccaccttccccagaaccaggggaggcctgaggcttcagttttactctgctgcaaaatgaaggcgggcctgcaagccgactacacctacggaggctgttgaggacaatttcattccattaaattaaaaaatactgactggctggcaggcaggtgccatgtctgggaacagggacgggggagcttcacctttttgtcttggcttttctttgggctgtgggggggcatccatttccagggtcggggaggaaataccaaatgcattgttgttctgctcaatacatctcacttgtttctaataaagaaagcagctgaaca

SEQ ID NO: 74083 - DNA, 928 bp, Homo sapiens
agcggggggagccctgctctcgcaactcaagatggcggacgagagtgagacagcagtgaagccgccggcacctccgctgccgcagatgatggaagggaacgggaacggccatgagcactgcagcgattgcgagaatgaggaggacaacagctacaaccggggtggtttgagtccagccaatgacactggagccaaaaagaagaaaaagaaacaaaaaaagaagaaagaaaaaggcagtgagacagattcagcccaggatcagcctgtgaagatgaactctttgccagcagagaggatccaggaaatacagaaggccattgagctgttctcagtgggtcagggacctgccaaaaccatggaggaggctagcaagcgaagctaccagttctgggatacgcagcccgtccccaagctgggcgaagtggtgaacacccatggccccgtggagcctgacaaggacaatatccgccaggagccctacaccctgccccagggcttcacctgggatgctttggacctgggcgatcgtggtgtgctaaaagaactgtacaccctcctgaatgagaactatgtggaagatgatgacaacatgttccgatttgattattccccggagtttcttttgtgggctctccggccacccggctggctcccccagtggcactgtggggttcgagtggtctcaagtcggaaattggttgggttcattagcgccatcccagcaaacatccatatctatgacacagagaagaagatggtagagatcaacttcctgtgtgtccacaagaagtcagacgagccgcgtagtcagatcgggccgcgtggtcagatcgagccgcgtagtcagatcgagccgcgtagtcagatcgagccgcgtagtcagatcgagccgcgtagtcagatcgagccgcgtagtccgatcgagccg

SEQ ID NO: 74084 - DNA, 840 bp, Homo sapiens
agctgattctagagtatccctcctcccagctgccatgtttcaaagacgacctttacctcctgcctttggattgactctgcatttgaccacggactccagtctgtgtgtagggagagagctgagtaggaggcctccactccggatcgaggcctgtatagggctcgtttccccacacatgcctatttctgaagaggcttctgtcttatttgaaggccagcccacacccagctactttaacaccaggtttatggaaaatgtcaggccttccccacaactcctgtctaactgctgtcgcccccctacttgctggctctcagaagcctaggggagtccctgtggtcctgaattctttccccaaagacgaccagcatttaaccaacctaagggcccaaaggccttggacaactgcatggagctgcactctaggagaaggaggggaaccagatgttagatcaggggagggagcaggagtgtccctcccgtcagtgcctacccacctgtgaggcagccttctgatggcctggcccaccttccccagaaccaggggaggcctgaggcttcagttttactctgctgcaaaatgaaggcgggcctgcaagccgactacacctacggaggctgttgaggacaatttcattccattaaattaaaaaatactgactggctggcaggcaggtgccatgtctgggaacagggacgggggagcttcacctttttgtcttggcttttctttgggctgtgggggggcatccatttccagggtcggggaggaaataccaaatgcattgttgttctgctcaatacatctcacttgtttctaataaagaaagcagctgaaca

SEQ ID NO: 74085 - DNA, 442 bp, Homo sapiens
catggccccgtggagcctgacaaggacaatatccgccaggagccctacaccctgccccagggcttcacctgggatgctttggacctgggcgatcgtggtgtggtgagtgggccctcagaaggttacacctgcgggtaggagccactttcacagtaagccctgcagtctcacctagactacgtttactcgagccctagagagctgagccaaggaggtctgaacagactcccgtctgtaacttcctggggcatggccaagactccacataaatagctcttagcttttctggcaggttggaagttaacctctgtaggtccccgatgtggatacctgtttttcatttattcttttttgttcattcatttcctcattttctttctagtctgtctcctgactggagcagctggggctgctaaatgaggccctgtcctcccctttccac

SEQ ID NO: 74086 - DNA, 4836 bp, Homo sapiens
agcggggggagccctgctctcgcaactcaagatggcggacgagagtgagacagcagtgaagccgccggcacctccgctgccgcagatgatggaagggaacgggaacggccatgagcactgcagcgattgcgagaatgaggaggacaacagctacaaccggggtggtttgagtccagccaatgacactggagccaaaaagaagaaaaagaaacaaaaaaagaagaaagaaaaaggcagtgagacagattcagcccaggatcagcctgtgaagatgaactctttgccagcagagaggatccaggaaatacagaaggccattgagctgttctcagtgggtcagggacctgccaaaaccatggaggaggctagcaagcgaagctaccagttctgggatacgcagcccgtccccaagctgggcgaagtggtgaacacccatggccccgtggagcctgacaaggacaatatccgccaggagccctacaccctgccccagggcttcacctgggatgctttggacctgggcgatcgtggtgtgctaaaagaactgtacaccctcctgaatgagaactatgtggaagatgatgacaacatgttccgatttgattattccccggagtttcttttgtgggctctccggccacccggctggctcccccagtggcactgtggggttcgagtggtctcaagtcggaaattggttgggttcattagcgccatcccagcaaacatccatatctatgacacagagaagaagatggtagagatcaacttcctgtgtgtccacaagaagctgcgttccaagagggttgctccagttctgatccgagagatcaccaggcgggttcacctggagggcatcttccaagcagtttacactgccggggtggtactaccaaagcccgttggcacctgcaggtattggcatcggtccctaaacccacggaagctgattgaagtgaagttctcccacctgagcagaaatatgaccatgcagcgcaccatgaagctctaccgactgccagagactcccaagacagctgggctgcgaccaatggaaacaaaggacattccagtagtgcaccagctcctcaccaggtacttgaagcaatttcaccttacgcccgtcatgagccaggaggaggtggagcactggttctacccccaggagaatatcatcgacactttcgtggtggagaacgcaaacggagaggtgacagatttcctgagcttttatacgctgccctccaccatcatgaaccatccaacccacaagagtctcaaagctgcttattctttctacaacgttcacacccagacccctcttctagacctcatgagcgacgcccttgtcctcgccaaaatgaaagggtttgatgtgttcaatgcactggatctcatggagaacaaaaccttcctggagaagctcaagtttggcataggggacggcaacctgcagtattacctttacaattggaaatgccccagcatgggggcagagaaggttggactggtgctacaataaccagtcaccagtgcgattctggataaagccactgaaaattcgaaccaggaaatggaaccccaccactgttggtccaattttcacacacgtgagaatccctggcaaagggagcagaactgaaccggctttaccaaaccgccagcgaacttgacaattgtattgcgatggcgtgggctgcgtgacgtcacctccggtcgtgtctctggtctccgtgttttccagttaattacatcctcatgcagccgtgatcaagggaatgtaactgctgaaaactagctcgtgattggcatataatggagttaacgggtgaataataaaagtatatatatatattatatatatataaatattttaaatatctttcatgttccaaatgtacaaggatgtttggtctttaatgaaaagctgaatctagatcattcctcagaatgaggacccgaggacagtggcagacagacgcgttggcacagttcatggtttcctccagaggagacattggcttatcatggggaaaaagaggatctggagaacctcatccagctccccttctgaatcagctgggatgactggctttgagaaggaagggaagatggaacaggctcagatctcatgggatagcacgtggagctcttggctggggctgaccctgggcagggactttcctgcagggccagacctgcctgcattctgagacaaagcaatggacggtccgcagaagcagacctcattgattgagtcctttcttccatccccttggcctgctccctgtaggaagtcatcctgccaactgatttaaaagggctctttagccagttgttgccaaccttatagggatgagtcccctgtgagattttgcttttccactgcctgggatgatgcagtttgaagaggcccttggacctccttgtaacatcagggacctttggagaccattatcagtgtaagccctgcttagctcatcttagagcaaagagccagcaccctgatgtccctggggtggctaggcaggagtggcgtggggccaatacccagaccccttcagccaccagcccctggcctgtgccttccaacccattagccatttcttgttgtgcccctttccaagatacagcctgcaagtggtagcaagaagtgattagaggcagatctggacttggcaacagaagtggtttcccatctccattgtctgagtctgattttcgctgatgctgttttgtggatttttgtggtagtgatggttgtcagtgctgccagtttcccaaaacgtaatcaagcctctggtcacatggctgtcgatgtaggcattctggagtggtgttcagccaagtgaccgggcaaaattgggctgtgaaattgtacttccaggcttggatgtaatttttgctctagagagaagcaagtggtgggaaggaggtagcatgacgtgtggtgtgcgggtttccttgctgccgtcacctctccgctcatacaggaatgaagccttagccaggaggccaggctcagccctgtgccactcaccgaagccactttctacaggccagcaggggcttgttgcaggctgtgggttttggtgtggtttgtcagaggctaattctgcagagtttccaaaaccagaagacatcgtatgcttgggatgggggccgtgccacccgtgggaatgctgcccgctctgcagactgctgctagagccagcaactccactaaggtggattttcatcaggggcctgcagggccctcccttttcccattgttcctgcgctgcaaattgcaggccccagcaatcgtgactgacgtttgctccttgactccaagaaactgagaccaaagaagctgctgttcttagcaagatgcgcactgcattccacaggtgggaggagtcggagaggcaggggcttgctttgcagccccacagacaacagttgcacagtgcctcaagccccagagtggctcaccctgtccagacctttgaggatatcaaaggacaaagtgcccaagtctttcctaccttgggggaacctggaacttggaaaggctccctgtcctagtcttgatctgttctgggccaggtcccagcttgagctgcctctgagatttgggctgtgcggatctctggagtgagctctgtttcggttgacccaggtcatggaatggaaacggtgaggccccagtggctgttctggaagaaacagatctcctggcaaaggccccagcatctccctcactgaaaccaggtggccggctcctcggactctgctttatgttgcggtgagaactctgcccaggtgtgcagggtttggcttgtgggctgcttgctgctcatctgatttttgtcccagtagtccctgcgttcttcattcaaccccttctgggacttcagctcagagagcaccatcccgggggtcagggcctccccacaggagccctgcagtgtggtagcgccatggctgtctcaaaccaagcaaaggaaggaccctgaggccttcacgctaaccatcctcgagcaactgctgttggaaggcctccctgggcctggcccccaccctctgccacccagtcctcccagctgccatgtttcaaagacgacctttacctcctgcctttggattgactctgcatttgaccacggactccagtctgtgtgtagggagagagctgagtaggaggcctccactccggatcgaggcctgtatagggctcgtttccccacacatgcctatttctgaagaggcttctgtcttatttgaaggccagcccacacccagctactttaacaccaggtgctggctctcagaagcctaggggagtccctgtggtcctgaattctttccccaaagacgaccagcatttaaccaacctaagggcccaaaggccttggacaactgcatggagctgcactctaggagaaggaggggaaccagatgttagatcaggggagggagcaggagtgtccctcccgtcagtgcctacccacctgtgaggcagccttctgatggcctggcccaccttccccagaaccaggggaggcctgaggcttcagttttactctgctgcaaaatgaaggcgggcctgcaagccgactacacctacggaggctgttgaggacaatttcattccattaaattaaaaaatactgactggctggcaggcaggtgccatgtctgggaacagggacgggggagcttcacctttttgtcttggcttttctttgggctgtgggggggcatccatttccagggtcggggaggaaataccaaatgcattgttgttctgctcaatacatctcacttgtttctaataaagaaagcagctgaaca

SEQ ID NO: 74087 - DNA, 4644 bp, Homo sapiens
agcggggggagccctgctctcgcaactcaagatggcggacgagagtgagacagcagtgaagccgccggcacctccgctgccgcagatgatggaagggaacgggaacggccatgagcactgcagcgattgcgagaatgaggaggacaacagctacaaccggggtggtttgagtccagccaatgacactggagccaaaaagaagaaaaagaaacaaaaaaagaagaaagaaaaaggcagtgagacagattcagcccaggatcagcctgtgaagatgaactctttgccagcagagaggatccaggaaatacagaaggccattgagctgttctcagtgggtcagggacctgccaaaaccatggaggaggctagcaagcgaagctaccagttctgggatacgcagcccgtccccaagctgggcgaagtggtgaacacccatggccccgtggagcctgacaaggacaatatccgccaggagccctacaccctgccccagggcttcacctgggatgctttggacctgggcgatcgtggtgtgctaaaagaactgtacaccctcctgaatgagaactatgtggaagatgatgacaacatgttccgatttgattattccccggagtttcttttgtgggctctccggccacccggctggctcccccagtggcactgtggggttcgagtggtctcaagtcggaaattggttgggttcattagcgccatcccagcaaacatccatatctatgacacagagaagaagatggtagagatcaacttcctgtgtgtccacaagaatagatatggatgtttactggaatgtcctttggtagtgcaccagctcctcaccaggtacttgaagcaatttcaccttacgcccgtcatgagccaggaggaggtggagcactggttctacccccaggagaatatcatcgacactttcgtggtggagaacgcaaacggagaggtgacagatttcctgagcttttatacgctgccctccaccatcatgaaccatccaacccacaagagtctcaaagctgcttattctttctacaacgttcacacccagacccctcttctagacctcatgagcgacgcccttgtcctcgccaaaatgaaagggtttgatgtgttcaatgcactggatctcatggagaacaaaaccttcctggagaagctcaagtttggcataggggacggcaacctgcagtattacctttacaattggaaatgccccagcatgggggcagagaaggttggactggtgctacaataaccagtcaccagtgcgattctggataaagccactgaaaattcgaaccaggaaatggaaccccaccactgttggtccaattttcacacacgtgagaatccctggcaaagggagcagaactgaaccggctttaccaaaccgccagcgaacttgacaattgtattgcgatggcgtgggctgcgtgacgtcacctccggtcgtgtctctggtctccgtgttttccagttaattacatcctcatgcagccgtgatcaagggaatgtaactgctgaaaactagctcgtgattggcatataatggagttaacgggtgaataataaaagtatatatatatattatatatatataaatattttaaatatctttcatgttccaaatgtacaaggatgtttggtctttaatgaaaagctgaatctagatcattcctcagaatgaggacccgaggacagtggcagacagacgcgttggcacagttcatggtttcctccagaggagacattggcttatcatggggaaaaagaggatctggagaacctcatccagctccccttctgaatcagctgggatgactggctttgagaaggaagggaagatggaacaggctcagatctcatgggatagcacgtggagctcttggctggggctgaccctgggcagggactttcctgcagggccagacctgcctgcattctgagacaaagcaatggacggtccgcagaagcagacctcattgattgagtcctttcttccatccccttggcctgctccctgtaggaagtcatcctgccaactgatttaaaagggctctttagccagttgttgccaaccttatagggatgagtcccctgtgagattttgcttttccactgcctgggatgatgcagtttgaagaggcccttggacctccttgtaacatcagggacctttggagaccattatcagtgtaagccctgcttagctcatcttagagcaaagagccagcaccctgatgtccctggggtggctaggcaggagtggcgtggggccaatacccagaccccttcagccaccagcccctggcctgtgccttccaacccattagccatttcttgttgtgcccctttccaagatacagcctgcaagtggtagcaagaagtgattagaggcagatctggacttggcaacagaagtggtttcccatctccattgtctgagtctgattttcgctgatgctgttttgtggatttttgtggtagtgatggttgtcagtgctgccagtttcccaaaacgtaatcaagcctctggtcacatggctgtcgatgtaggcattctggagtggtgttcagccaagtgaccgggcaaaattgggctgtgaaattgtacttccaggcttggatgtaatttttgctctagagagaagcaagtggtgggaaggaggtagcatgacgtgtggtgtgcgggtttccttgctgccgtcacctctccgctcatacaggaatgaagccttagccaggaggccaggctcagccctgtgccactcaccgaagccactttctacaggccagcaggggcttgttgcaggctgtgggttttggtgtggtttgtcagaggctaattctgcagagtttccaaaaccagaagacatcgtatgcttgggatgggggccgtgccacccgtgggaatgctgcccgctctgcagactgctgctagagccagcaactccactaaggtggattttcatcaggggcctgcagggccctcccttttcccattgttcctgcgctgcaaattgcaggccccagcaatcgtgactgacgtttgctccttgactccaagaaactgagaccaaagaagctgctgttcttagcaagatgcgcactgcattccacaggtgggaggagtcggagaggcaggggcttgctttgcagccccacagacaacagttgcacagtgcctcaagccccagagtggctcaccctgtccagacctttgaggatatcaaaggacaaagtgcccaagtctttcctaccttgggggaacctggaacttggaaaggctccctgtcctagtcttgatctgttctgggccaggtcccagcttgagctgcctctgagatttgggctgtgcggatctctggagtgagctctgtttcggttgacccaggtcatggaatggaaacggtgaggccccagtggctgttctggaagaaacagatctcctggcaaaggccccagcatctccctcactgaaaccaggtggccggctcctcggactctgctttatgttgcggtgagaactctgcccaggtgtgcagggtttggcttgtgggctgcttgctgctcatctgatttttgtcccagtagtccctgcgttcttcattcaaccccttctgggacttcagctcagagagcaccatcccgggggtcagggcctccccacaggagccctgcagtgtggtagcgccatggctgtctcaaaccaagcaaaggaaggaccctgaggccttcacgctaaccatcctcgagcaactgctgttggaaggcctccctgggcctggcccccaccctctgccacccagtcctcccagctgccatgtttcaaagacgacctttacctcctgcctttggattgactctgcatttgaccacggactccagtctgtgtgtagggagagagctgagtaggaggcctccactccggatcgaggcctgtatagggctcgtttccccacacatgcctatttctgaagaggcttctgtcttatttgaaggccagcccacacccagctactttaacaccaggtttatggaaaatgtcaggccttccccacaactcctgtctaactgctgtcgcccccctacttgctggctctcagaagcctaggggagtccctgtggtcctgaattctttccccaaagacgaccagcatttaaccaacctaagggcccaaaggccttggacaactgcatggagctgcactctaggagaaggaggggaaccagatgttagatcaggggagggagcaggagtgtccctcccgtcagtgcctacccacctgtgaggcagccttctgatggcctggcccaccttccccagaaccaggggaggcctgaggcttcagttttactctgctgcaaaatgaaggcgggcctgcaagccgactacacctacggaggctgttgaggacaatttcattccattaaattaaaaaatactgactggctggcaggcaggtgccatgtctgggaacagggacgggggagcttcacctttttgtcttggcttttctttgggctgtgggggggcatccatttccagggtcggggaggaaataccaaatgcattgttgttctgctcaatacatctcacttgtttctaataaagaaagcagctgaaca

SEQ ID NO: 74088 - DNA, 5500 bp, Homo sapiens
tgcctcgtcctcctgagtagctgggactacaggcatgtgccaccaggccccagctaatgtttatatttttagtagaaacagggttttgccatgttggccagtctggccttaaactcctgacctcaagtgatccacctgcctcggcctcccaaagtgttgggattacaggtgtgagctaccacgcctggctgatttgggcatttctcatgactgaccattttggacacagattgtggcaatgttaatgtgcctttttcctcatccctcactcccttttcatactgtcttgtgctccagatccagctggggaaaatcatgaaacctaatacatttgggaggtggaggaaggaagggcaaagcattccagaaagcccatcactgccttttggctgtcatccttttacattcagagttcaaggaagtattgtagtatgaatgccttgttaacaattatcattcgtctttggtgccattaccctggcaatataaagaaaataagcaacataaaagcaagaacggaaaaggccctttcacacaaataggacatcccttgcccagcactccctccctgaaagccgagggggcgcgagtcaggaggagtgctggtgtcctccaaatgccctttctggacctgggttcttcagcctgcttctgaaaccaacaggcttgattaaggaaggtctggctccacagaaagctctttgtcaggggtagcacaaaacagattttttttaaaccctgcattagtatttactttttgttacagtggtttgagtccagccaatgacactggagccaaaaagaagaaaaagaaacaaaaaaagaagaaagaaaaaggcagtgagacagattcagcccaggatcagcctgtgaagatgaactctttgccagcagagaggatccaggaaatacagaaggccattgagctgttctcagtgggtcagggacctgccaaaaccatggaggaggctagcaagcgaagctaccagttctgggatacgcagcccgtccccaagctgggcgaagtggtgaacacccatggccccgtggagcctgacaaggacaatatccgccaggagccctacaccctgccccagggcttcacctgggatgctttggacctgggcgatcgtggtgtgctaaaagaactgtacaccctcctgaatgagaactatgtggaagatgatgacaacatgttccgatttgattattccccggagtttcttttgtgggctctccggccacccggctggctcccccagtggcactgtggggttcgagtggtctcaagtcggaaattggttgggttcattagcgccatcccagcaaacatccatatctatgacacagagaagaagatggtagagatcaacttcctgtgtgtccacaagaagctgcgttccaagagggttgctccagttctgatccgagagatcaccaggcgggttcacctggagggcatcttccaagcagtttacactgccggggtggtactaccaaagcccgttggcacctgcaggtattggcatcggtccctaaacccacggaagctgattgaagtgaagttctcccacctgagcagaaatatgaccatgcagcgcaccatgaagctctaccgactgccagagactcccaagacagctgggctgcgaccaatggaaacaaaggacattccagtagtgcaccagctcctcaccaggtacttgaagcaatttcaccttacgcccgtcatgagccaggaggaggtggagcactggttctacccccaggagaatatcatcgacactttcgtggtggagaacgcaaacggagaggtgacagatttcctgagcttttatacgctgccctccaccatcatgaaccatccaacccacaagagtctcaaagctgcttattctttctacaacgttcacacccagacccctcttctagacctcatgagcgacgcccttgtcctcgccaaaatgaaagggtttgatgtgttcaatgcactggatctcatggagaacaaaaccttcctggagaagctcaagtttggcataggggacggcaacctgcagtattacctttacaattggaaatgccccagcatgggggcagagaaggttggactggtgctacaataaccagtcaccagtgcgattctggataaagccactgaaaattcgaaccaggaaatggaaccccaccactgttggtccaattttcacacacgtgagaatccctggcaaagggagcagaactgaaccggctttaccaaaccgccagcgaacttgacaattgtattgcgatggcgtgggctgcgtgacgtcacctccggtcgtgtctctggtctccgtgttttccagttaattacatcctcatgcagccgtgatcaagggaatgtaactgctgaaaactagctcgtgattggcatataatggagttaacgggtgaataataaaagtatatatatatattatatatatataaatattttaaatatctttcatgttccaaatgtacaaggatgtttggtctttaatgaaaagctgaatctagatcattcctcagaatgaggacccgaggacagtggcagacagacgcgttggcacagttcatggtttcctccagaggagacattggcttatcatggggaaaaagaggatctggagaacctcatccagctccccttctgaatcagctgggatgactggctttgagaaggaagggaagatggaacaggctcagatctcatgggatagcacgtggagctcttggctggggctgaccctgggcagggactttcctgcagggccagacctgcctgcattctgagacaaagcaatggacggtccgcagaagcagacctcattgattgagtcctttcttccatccccttggcctgctccctgtaggaagtcatcctgccaactgatttaaaagggctctttagccagttgttgccaaccttatagggatgagtcccctgtgagattttgcttttccactgcctgggatgatgcagtttgaagaggcccttggacctccttgtaacatcagggacctttggagaccattatcagtgtaagccctgcttagctcatcttagagcaaagagccagcaccctgatgtccctggggtggctaggcaggagtggcgtggggccaatacccagaccccttcagccaccagcccctggcctgtgccttccaacccattagccatttcttgttgtgcccctttccaagatacagcctgcaagtggtagcaagaagtgattagaggcagatctggacttggcaacagaagtggtttcccatctccattgtctgagtctgattttcgctgatgctgttttgtggatttttgtggtagtgatggttgtcagtgctgccagtttcccaaaacgtaatcaagcctctggtcacatggctgtcgatgtaggcattctggagtggtgttcagccaagtgaccgggcaaaattgggctgtgaaattgtacttccaggcttggatgtaatttttgctctagagagaagcaagtggtgggaaggaggtagcatgacgtgtggtgtgcgggtttccttgctgccgtcacctctccgctcatacaggaatgaagccttagccaggaggccaggctcagccctgtgccactcaccgaagccactttctacaggccagcaggggcttgttgcaggctgtgggttttggtgtggtttgtcagaggctaattctgcagagtttccaaaaccagaagacatcgtatgcttgggatgggggccgtgccacccgtgggaatgctgcccgctctgcagactgctgctagagccagcaactccactaaggtggattttcatcaggggcctgcagggccctcccttttcccattgttcctgcgctgcaaattgcaggccccagcaatcgtgactgacgtttgctccttgactccaagaaactgagaccaaagaagctgctgttcttagcaagatgcgcactgcattccacaggtgggaggagtcggagaggcaggggcttgctttgcagccccacagacaacagttgcacagtgcctcaagccccagagtggctcaccctgtccagacctttgaggatatcaaaggacaaagtgcccaagtctttcctaccttgggggaacctggaacttggaaaggctccctgtcctagtcttgatctgttctgggccaggtcccagcttgagctgcctctgagatttgggctgtgcggatctctggagtgagctctgtttcggttgacccaggtcatggaatggaaacggtgaggccccagtggctgttctggaagaaacagatctcctggcaaaggccccagcatctccctcactgaaaccaggtggccggctcctcggactctgctttatgttgcggtgagaactctgcccaggtgtgcagggtttggcttgtgggctgcttgctgctcatctgatttttgtcccagtagtccctgcgttcttcattcaaccccttctgggacttcagctcagagagcaccatcccgggggtcagggcctccccacaggagccctgcagtgtggtagcgccatggctgtctcaaaccaagcaaaggaaggaccctgaggccttcacgctaaccatcctcgagcaactgctgttggaaggcctccctgggcctggcccccaccctctgccacccagtcctcccagctgccatgtttcaaagacgacctttacctcctgcctttggattgactctgcatttgaccacggactccagtctgtgtgtagggagagagctgagtaggaggcctccactccggatcgaggcctgtatagggctcgtttccccacacatgcctatttctgaagaggcttctgtcttatttgaaggccagcccacacccagctactttaacaccaggtttatggaaaatgtcaggccttccccacaactcctgtctaactgctgtcgcccccctacttgctggctctcagaagcctaggggagtccctgtggtcctgaattctttccccaaagacgaccagcatttaaccaacctaagggcccaaaggccttggacaactgcatggagctgcactctaggagaaggaggggaaccagatgttagatcaggggagggagcaggagtgtccctcccgtcagtgcctacccacctgtgaggcagccttctgatggcctggcccaccttccccagaaccaggggaggcctgaggcttcagttttactctgctgcaaaatgaaggcgggcctgcaagccgactacacctacggaggctgttgaggacaatttcattccattaaattaaaaaatactgactggctggcaggcaggtgccatgtctgggaacagggacgggggagcttcacctttttgtcttggcttttctttgggctgtgggggggcatccatttccagggtcggggaggaaataccaaatgcattgttgttctgctcaatacatctcacttgtttctaataaagaaagcagctgaaca

SEQ ID NO: 74089 - DNA, 4787 bp, Homo sapiens
agcggggggagccctgctctcgcaactcaagatggcggacgagagtgagacagcagtgaagccgccggcacctccgctgccgcagatgatggaagggaacgggaacggccatgagcactgcagcgattgcgagaatgaggaggacaacagctacaaccggggatgaactctttgccagcagagaggatccaggaaatacagaaggccattgagctgttctcagtgggtcagggacctgccaaaaccatggaggaggctagcaagcgaagctaccagttctgggatacgcagcccgtccccaagctgggcgaagtggtgaacacccatggccccgtggagcctgacaaggacaatatccgccaggagccctacaccctgccccagggcttcacctgggatgctttggacctgggcgatcgtggtgtgctaaaagaactgtacaccctcctgaatgagaactatgtggaagatgatgacaacatgttccgatttgattattccccggagtttcttttgtgggctctccggccacccggctggctcccccagtggcactgtggggttcgagtggtctcaagtcggaaattggttgggttcattagcgccatcccagcaaacatccatatctatgacacagagaagaagatggtagagatcaacttcctgtgtgtccacaagaagctgcgttccaagagggttgctccagttctgatccgagagatcaccaggcgggttcacctggagggcatcttccaagcagtttacactgccggggtggtactaccaaagcccgttggcacctgcaggtattggcatcggtccctaaacccacggaagctgattgaagtgaagttctcccacctgagcagaaatatgaccatgcagcgcaccatgaagctctaccgactgccagagactcccaagacagctgggctgcgaccaatggaaacaaaggacattccagtagtgcaccagctcctcaccaggtacttgaagcaatttcaccttacgcccgtcatgagccaggaggaggtggagcactggttctacccccaggagaatatcatcgacactttcgtggtggagaacgcaaacggagaggtgacagatttcctgagcttttatacgctgccctccaccatcatgaaccatccaacccacaagagtctcaaagctgcttattctttctacaacgttcacacccagacccctcttctagacctcatgagcgacgcccttgtcctcgccaaaatgaaagggtttgatgtgttcaatgcactggatctcatggagaacaaaaccttcctggagaagctcaagtttggcataggggacggcaacctgcagtattacctttacaattggaaatgccccagcatgggggcagagaaggttggactggtgctacaataaccagtcaccagtgcgattctggataaagccactgaaaattcgaaccaggaaatggaaccccaccactgttggtccaattttcacacacgtgagaatccctggcaaagggagcagaactgaaccggctttaccaaaccgccagcgaacttgacaattgtattgcgatggcgtgggctgcgtgacgtcacctccggtcgtgtctctggtctccgtgttttccagttaattacatcctcatgcagccgtgatcaagggaatgtaactgctgaaaactagctcgtgattggcatataatggagttaacgggtgaataataaaagtatatatatatattatatatatataaatattttaaatatctttcatgttccaaatgtacaaggatgtttggtctttaatgaaaagctgaatctagatcattcctcagaatgaggacccgaggacagtggcagacagacgcgttggcacagttcatggtttcctccagaggagacattggcttatcatggggaaaaagaggatctggagaacctcatccagctccccttctgaatcagctgggatgactggctttgagaaggaagggaagatggaacaggctcagatctcatgggatagcacgtggagctcttggctggggctgaccctgggcagggactttcctgcagggccagacctgcctgcattctgagacaaagcaatggacggtccgcagaagcagacctcattgattgagtcctttcttccatccccttggcctgctccctgtaggaagtcatcctgccaactgatttaaaagggctctttagccagttgttgccaaccttatagggatgagtcccctgtgagattttgcttttccactgcctgggatgatgcagtttgaagaggcccttggacctccttgtaacatcagggacctttggagaccattatcagtgtaagccctgcttagctcatcttagagcaaagagccagcaccctgatgtccctggggtggctaggcaggagtggcgtggggccaatacccagaccccttcagccaccagcccctggcctgtgccttccaacccattagccatttcttgttgtgcccctttccaagatacagcctgcaagtggtagcaagaagtgattagaggcagatctggacttggcaacagaagtggtttcccatctccattgtctgagtctgattttcgctgatgctgttttgtggatttttgtggtagtgatggttgtcagtgctgccagtttcccaaaacgtaatcaagcctctggtcacatggctgtcgatgtaggcattctggagtggtgttcagccaagtgaccgggcaaaattgggctgtgaaattgtacttccaggcttggatgtaatttttgctctagagagaagcaagtggtgggaaggaggtagcatgacgtgtggtgtgcgggtttccttgctgccgtcacctctccgctcatacaggaatgaagccttagccaggaggccaggctcagccctgtgccactcaccgaagccactttctacaggccagcaggggcttgttgcaggctgtgggttttggtgtggtttgtcagaggctaattctgcagagtttccaaaaccagaagacatcgtatgcttgggatgggggccgtgccacccgtgggaatgctgcccgctctgcagactgctgctagagccagcaactccactaaggtggattttcatcaggggcctgcagggccctcccttttcccattgttcctgcgctgcaaattgcaggccccagcaatcgtgactgacgtttgctccttgactccaagaaactgagaccaaagaagctgctgttcttagcaagatgcgcactgcattccacaggtgggaggagtcggagaggcaggggcttgctttgcagccccacagacaacagttgcacagtgcctcaagccccagagtggctcaccctgtccagacctttgaggatatcaaaggacaaagtgcccaagtctttcctaccttgggggaacctggaacttggaaaggctccctgtcctagtcttgatctgttctgggccaggtcccagcttgagctgcctctgagatttgggctgtgcggatctctggagtgagctctgtttcggttgacccaggtcatggaatggaaacggtgaggccccagtggctgttctggaagaaacagatctcctggcaaaggccccagcatctccctcactgaaaccaggtggccggctcctcggactctgctttatgttgcggtgagaactctgcccaggtgtgcagggtttggcttgtgggctgcttgctgctcatctgatttttgtcccagtagtccctgcgttcttcattcaaccccttctgggacttcagctcagagagcaccatcccgggggtcagggcctccccacaggagccctgcagtgtggtagcgccatggctgtctcaaaccaagcaaaggaaggaccctgaggccttcacgctaaccatcctcgagcaactgctgttggaaggcctccctgggcctggcccccaccctctgccacccagtcctcccagctgccatgtttcaaagacgacctttacctcctgcctttggattgactctgcatttgaccacggactccagtctgtgtgtagggagagagctgagtaggaggcctccactccggatcgaggcctgtatagggctcgtttccccacacatgcctatttctgaagaggcttctgtcttatttgaaggccagcccacacccagctactttaacaccaggtttatggaaaatgtcaggccttccccacaactcctgtctaactgctgtcgcccccctacttgctggctctcagaagcctaggggagtccctgtggtcctgaattctttccccaaagacgaccagcatttaaccaacctaagggcccaaaggccttggacaactgcatggagctgcactctaggagaaggaggggaaccagatgttagatcaggggagggagcaggagtgtccctcccgtcagtgcctacccacctgtgaggcagccttctgatggcctggcccaccttccccagaaccaggggaggcctgaggcttcagttttactctgctgcaaaatgaaggcgggcctgcaagccgactacacctacggaggctgttgaggacaatttcattccattaaattaaaaaatactgactggctggcaggcaggtgccatgtctgggaacagggacgggggagcttcacctttttgtcttggcttttctttgggctgtgggggggcatccatttccagggtcggggaggaaataccaaatgcattgttgttctgctcaatacatctcacttgtttctaataaagaaagcagctgaaca

SEQ ID NO: 74090 - DNA, 3751 bp, Homo sapiens
  misc_feature (3705)..(3706): n is a, c, g, or t
agcggggggagccctgctctcgcaactcaagatggcggacgagagtgagacagcagtgaagccgccggcacctccgctgccgcagatgatggaagggaacgggaacggccatgagcactgcagcgattgcgagaatgaggaggacaacagctacaaccggggtggtttgagtccagccaatgacactggagccaaaaagaagaaaaagaaacaaaaaaagaagaaagaaaaaggcagtgagacagattcagcccaggatcagcctgtgaagatgaactctttgccagcagagaggatccaggaaatacagaaggccattgagctgttctcagtgggtcagggacctgccaaaaccatggaggaggctagcaagcgaagctaccagttctgggatacgcagcccgtccccaagctgggcgaagtggtgaacacccatggccccgtggagcctgacaaggacaatatccgccaggagccctacaccctgccccagggcttcacctgggatgctttggacctgggcgatcgtggtgtgctaaaagaactgtacaccctcctgaatgagaactatgtggaagatgatgacaacatgttccgatttgattattccccggagtttcttttgtgggctctccggccacccggctggctcccccagtggcactgtggggttcgagtggtctcaagtcggaaattggttgggttcattagcgccatcccagcaaacatccatatctatgacacagagaagaagatggtagagatcaacttcctgtgtgtccacaagaagctgcgttccaagagggttgctccagttctgatccgagagatcaccaggcgggttcacctggagggcatcttccaagcagtttacactgccggggtggtactaccaaagcccgttggcacctgcaggtattggcatcggtccctaaacccacggaagctgattgaagtgaagttctcccacctgagcagaaatatgaccatgcagcgcaccatgaagctctaccgactgccagagactcccaagacagctgggctgcgaccaatggaaacaaaggacattccagtagtgcaccagctcctcaccaggtacttgaagcaatttcaccttacgcccgtcatgagccaggaggaggtggagcactggttctacccccaggagaatatcatcgacactttcgtggtggagaacgcaaacggagaggtgacagatttcctgagcttttatacgctgccctccaccatcatgaaccatccaacccacaagagtctcaaagctgcttattctttctacaacgttcacacccagacccctcttctagacctcatgagcgacgcccttgtcctcgccaaaatgaaagggtttgatgtgttcaatgcactggatctcatggagaacaaaaccttcctggagaagctcaagtttggcataggggacggcaacctgcagtattacctttacaattggaaatgccccagcatgggggcagagaaggttggactggtgctacaataaccagtcaccagtgcgattctggataaagccactgaaaattcgaaccaggaaatggaaccccaccactgttggtccaattttcacacacgtgagaatccctggcaaagggagcagaactgaaccggctttaccaaaccgccagcgaacttgacaattgtattgcgatggcgtgggctgcgtgacgtcacctccggtcgtgtctctggtctccgtgttttccagttaattacatcctcatgcagccgtgatcaagggaatgtaactgctgaaaactagctcgtgattggcatataatggagttaacgggtgaataataaaagtatatatatatattatatatatataaatattttaaatatctttcatgttccaaatgtacaaggatgtttggtctttaatgaaaagctgaatctagatcattcctcagaatgaggacccgaggacagtggcagacagacgcgttggcacagttcatggtttcctccagaggagacattggcttatcatggggaaaaagaggatctggagaacctcatccagctccccttctgaatcagctgggatgactggctttgagaaggaagggaagatggaacaggctcagatctcatgggatagcacgtggagctcttggctggggctgaccctgggcagggactttcctgcagggccagacctgcctgcattctgagacaaagcaatggacggtccgcagaagcagacctcattgattgagtcctttcttccatccccttggcctgctccctgtaggaagtcatcctgccaactgatttaaaagggctctttagccagttgttgccaaccttatagggatgagtcccctgtgagattttgcttttccactgcctgggatgatgcagtttgaagaggcccttggacctccttgtaacatcagggacctttggagaccattatcagtgtaagccctgcttagctcatcttagagcaaagagccagcaccctgatgtccctggggtggctaggcaggagtggcgtggggccaatacccagaccccttcagccaccagcccctggcctgtgccttccaacccattagccatttcttgttgtgcccctttccaagatacagcctgcaagtggtagcaagaagtgattagaggcagatctggacttggcaacagaagtggtttcccatctccattgtctgagtctgattttcgctgatgctgttttgtggatttttgtggtagtgatggttgtcagtgctgccagtttcccaaaacgtaatcaagcctctggtcacatggctgtcgatgtaggcattctggagtggtgttcagccaagtgaccgggcaaaattgggctgtgaaattgtacttccaggcttggatgtaatttttgctctagagagaagcaagtggtgggaaggaggtagcatgacgtgtggtgtgcgggtttccttgctgccgtcacctctccgctcatacaggaatgaagccttagccaggaggccaggctcagccctgtgccactcaccgaagccactttctacaggccagcaggggcttgttgcaggctgtgggttttggtgtggtttgtcagaggctaattctgcagagtttccaaaaccagaagacatcgtatgcttgggatgggggccgtgccacccgtgggaatgctgcccgctctgcagactgctgctagagccagcaactccactaaggtggattttcatcaggggcctgcagggccctcccttttcccattgttcctgcgctgcaaattgcaggccccagcaatcgtgactgacgtttgctccttgactccaagaaactgagaccaaagaagctgctgttcttagcaagatgcgcactgcattccacaggtgggaggagtcggagaggcaggggcttgctttgcagccccacagacaacagttgcacagtgcctcaagccccagagtggctcaccctgtccagacctttgaggatatcaaaggacaaagtgcccaagtctttcctaccttgggggaacctggaacttggaaaggctccctgtcctagtcttgatctgttctgggccaggtcccagcttgagctgcctctgagatttgggctgtgcggatctctggagtgagctctgtttcggttgacccaggtcatggaatggaaacggtgaggccccagtggctgttctggaanntcagagaacaccgctatgcatgtgttctgagttcgcgcgcggggt

SEQ ID NO: 74091 - DNA, 3982 bp, Homo sapiens
gagccgccgaatgaccagggattctctcttgagggcctgatctgtccttgccatggatagatccagggtgatcagctcatctcactccatctcttctgtcttgcctccagactcccaagacagctgggctgcgaccaatggaaacaaaggacattccagtagtgcaccagctcctcaccaggtacttgaagcaatttcaccttacgcccgtcatgagccaggaggaggtggagcactggttctacccccaggagaatatcatcgacactttcgtggtggagaacgcaaacggagaggtgacagatttcctgagcttttatacgctgccctccaccatcatgaaccatccaacccacaagagtctcaaagctgcttattctttctacaacgttcacacccagacccctcttctagacctcatgagcgacgcccttgtcctcgccaaaatgaaagggtttgatgtgttcaatgcactggatctcatggagaacaaaaccttcctggagaagctcaagtttggcataggggacggcaacctgcagtattacctttacaattggaaatgccccagcatgggggcagagaaggttggactggtgctacaataaccagtcaccagtgcgattctggataaagccactgaaaattcgaaccaggaaatggaaccccaccactgttggtccaattttcacacacgtgagaatccctggcaaagggagcagaactgaaccggctttaccaaaccgccagcgaacttgacaattgtattgcgatggcgtgggctgcgtgacgtcacctccggtcgtgtctctggtctccgtgttttccagttaattacatcctcatgcagccgtgatcaagggaatgtaactgctgaaaactagctcgtgattggcatataatggagttaacgggtgaataataaaagtatatatatatattatatatatataaatattttaaatatctttcatgttccaaatgtacaaggatgtttggtctttaatgaaaagctgaatctagatcattcctcagaatgaggacccgaggacagtggcagacagacgcgttggcacagttcatggtttcctccagaggagacattggcttatcatggggaaaaagaggatctggagaacctcatccagctccccttctgaatcagctgggatgactggctttgagaaggaagggaagatggaacaggctcagatctcatgggatagcacgtggagctcttggctggggctgaccctgggcagggactttcctgcagggccagacctgcctgcattctgagacaaagcaatggacggtccgcagaagcagacctcattgattgagtcctttcttccatccccttggcctgctccctgtaggaagtcatcctgccaactgatttaaaagggctctttagccagttgttgccaaccttatagggatgagtcccctgtgagattttgcttttccactgcctgggatgatgcagtttgaagaggcccttggacctccttgtaacatcagggacctttggagaccattatcagtgtaagccctgcttagctcatcttagagcaaagagccagcaccctgatgtccctggggtggctaggcaggagtggcgtggggccaatacccagaccccttcagccaccagcccctggcctgtgccttccaacccattagccatttcttgttgtgcccctttccaagatacagcctgcaagtggtagcaagaagtgattagaggcagatctggacttggcaacagaagtggtttcccatctccattgtctgagtctgattttcgctgatgctgttttgtggatttttgtggtagtgatggttgtcagtgctgccagtttcccaaaacgtaatcaagcctctggtcacatggctgtcgatgtaggcattctggagtggtgttcagccaagtgaccgggcaaaattgggctgtgaaattgtacttccaggcttggatgtaatttttgctctagagagaagcaagtggtgggaaggaggtagcatgacgtgtggtgtgcgggtttccttgctgccgtcacctctccgctcatacaggaatgaagccttagccaggaggccaggctcagccctgtgccactcaccgaagccactttctacaggccagcaggggcttgttgcaggctgtgggttttggtgtggtttgtcagaggctaattctgcagagtttccaaaaccagaagacatcgtatgcttgggatgggggccgtgccacccgtgggaatgctgcccgctctgcagactgctgctagagccagcaactccactaaggtggattttcatcaggggcctgcagggccctcccttttcccattgttcctgcgctgcaaattgcaggccccagcaatcgtgactgacgtttgctccttgactccaagaaactgagaccaaagaagctgctgttcttagcaagatgcgcactgcattccacaggtgggaggagtcggagaggcaggggcttgctttgcagccccacagacaacagttgcacagtgcctcaagccccagagtggctcaccctgtccagacctttgaggatatcaaaggacaaagtgcccaagtctttcctaccttgggggaacctggaacttggaaaggctccctgtcctagtcttgatctgttctgggccaggtcccagcttgagctgcctctgagatttgggctgtgcggatctctggagtgagctctgtttcggttgacccaggtcatggaatggaaacggtgaggccccagtggctgttctggaagaaacagatctcctggcaaaggccccagcatctccctcactgaaaccaggtggccggctcctcggactctgctttatgttgcggtgagaactctgcccaggtgtgcagggtttggcttgtgggctgcttgctgctcatctgatttttgtcccagtagtccctgcgttcttcattcaaccccttctgggacttcagctcagagagcaccatcccgggggtcagggcctccccacaggagccctgcagtgtggtagcgccatggctgtctcaaaccaagcaaaggaaggaccctgaggccttcacgctaaccatcctcgagcaactgctgttggaaggcctccctgggcctggcccccaccctctgccacccagtcctcccagctgccatgtttcaaagacgacctttacctcctgcctttggattgactctgcatttgaccacggactccagtctgtgtgtagggagagagctgagtaggaggcctccactccggatcgaggcctgtatagggctcgtttccccacacatgcctatttctgaagaggcttctgtcttatttgaaggccagcccacacccagctactttaacaccaggtttatggaaaatgtcaggccttccccacaactcctgtctaactgctgtcgcccccctacttgctggctctcagaagcctaggggagtccctgtggtcctgaattctttccccaaagacgaccagcatttaaccaacctaagggcccaaaggccttggacaactgcatggagctgcactctaggagaaggaggggaaccagatgttagatcaggggagggagcaggagtgtccctcccgtcagtgcctacccacctgtgaggcagccttctgatggcctggcccaccttccccagaaccaggggaggcctgaggcttcagttttactctgctgcaaaatgaaggcgggcctgcaagccgactacacctacggaggctgttgaggacaatttcattccattaaattaaaaaatactgactggctggcaggcaggtgccatgtctgggaacagggacgggggagcttcacctttttgtcttggcttttctttgggctgtgggggggcatccatttccagggtcggggaggaaataccaaatgcattgttgttctgctcaatacatctcacttgtttctaataaagaaagcagctgaaca

SEQ ID NO: 74092 - DNA, 2289 bp, Homo sapiens
agcggggggagccctgctctcgcaactcaagatggcggacgagagtgagacagcagtgaagccgccggcacctccgctgccgcagatgatggaagggaacgggaacggccatgagcactgcagcgattgcgagaatgaggaggacaacagctacaaccggggtggtttgagtccagccaatgacactggagccaaaaagaagaaaaagaaacaaaaaaagaagaaagaaaaaggcagtgagacagattcagcccaggatcagcctgtgaagatgaactctttgccagcagagaggatccaggaaatacagaaggccattgagctgttctcagtgggtcagggacctgccaaaaccatggaggaggctagcaagcgaagctaccagttctgggatacgcagcccgtccccaagctgggcgaagtggtgaacacccatggccccgtggagcctgacaaggacaatatccgccaggagccctacaccctgccccagggcttcacctgggatgctttggacctgggcgatcgtggtgtgctaaaagaactgtacaccctcctgaatgagaactatgtggaagatgatgacaacatgttccgatttgattattccccggagtttcttttgtgggctctccggccacccggctggctcccccagtggcactgtggggttcgagtggtctcaagtcggaaattggttgggttcattagcgccatcccagcaaacatccatatctatgacacagagaagaagatggtagagatcaacttcctgtgtgtccacaagaagctgcgttccaagagggttgctccagttctgatccgagagatcaccaggcgggttcacctggagggcatcttccaagcagtttacactgccggggtggtactaccaaagcccgttggcacctgcaggtattggcatcggtccctaaacccacggaagctgattgaagtgaagttctcccacctgagcagaaatatgaccatgcagcgcaccatgaagctctaccgactgccagagactcccaagacagctgggctgcgaccaatggaaacaaaggacattccagtagtgcaccagctcctcaccaggtacttgaagcaatttcaccttacgcccgtcatgagccaggaggaggtggagcactggttctacccccaggagaatatcatcgacactttcgtggtggagaacgcaaacggagaggtgacagatttcctgagcttttatacgctgccctccaccatcatgaaccatccaacccacaagagtctcaaagctgcttattctttctacaacgttcacacccagacccctcttctagacctcatgagcgacgcccttgtcctcgccaaaatgaaagggtttgatgtgttcaatgcactggatctcatggagaacaaaaccttcctggagaagctcaagtttggcataggggacggcaacctgcagtattacctttacaattggaaatgccccagcatgggggcagagaaggttggactggtgctacaataaccagtcaccagtgcgattctggataaagccactgaaaattcgaaccaggaaatggaaccccaccactgttggtccaattttcacacacgtgagaatccctggcaaagggagcagaactgaaccggctttaccaaaccgccagcgaacttgacaattgtattgcgatggcgtgggctgcgtgacgtcacctccggtcgtgtctctggtctccgtgttttccagttaattacatcctcatgcagccttctgatggcctggcccaccttccccagaaccaggggaggcctgaggcttcagttttactctgctgcaaaatgaaggcgggcctgcaagccgactacacctacggaggctgttgaggacaatttcattccattaaattaaaaaatactgactggctggcaggcaggtgccatgtctgggaacagggacgggggagcttcacctttttgtcttggcttttctttgggctgtgggggggcatccatttccagggtcggggaggaaataccaaatgcattgttgttctgctcaatacatctcacttgtttctaataaagaaagcagctgaacaaaaccttctgtcctggtattcctggtcagcaggtggcagtggaagaaatggagtgctggagcctaggctggagccaggacgacagggcttggacacaaagtccctcaagcccacagcaccaggccagcttccaaaggccttcctttaaggctgcccttcttccagggcaaacttggtgttgtcagacccttcc

SEQ ID NO: 74093 - DNA, 1923 bp, Homo sapiens
agcggggggagccctgctctcgcaactcaagatggcggacgagagtgagacagcagtgaagccgccggcacctccgctgccgcagatgatggaagggaacgggaacggccatgagcactgcagcgattgcgagaatgaggaggacaacagctacaaccggggtggtttgagtccagccaatgacactggagccaaaaagaagaaaaagaaacaaaaaaagaagaaagaaaaaggcagtgagacagattcagcccaggatcagcctgtgaagatgaactctttgccagcagagaggatccaggaaatacagaaggccattgagctgttctcagtgggtcagggacctgccaaaaccatggaggaggctagcaagcgaagctaccagttctgggatacgcagcccgtccccaagctgggcgaagtggtgaacacccatggccccgtggagcctgacaaggacaatatccgccaggagccctacaccctgccccagggcttcacctgggatgctttggacctgggcgatcgtggtgtgctaaaagaactgtacaccctcctgaatgagaactatgtggaagatgatgacaacatgttccgatttgattattccccggagtttcttttgtgggctctccggccacccggctggctcccccagtggcactgtggggttcgagtggtctcaagtcggaaattggttgggttcattagcgccatcccagcaaacatccatatctatgacacagagaagaagatggtagagatcaacttcctgtgtgtccacaagaagctgcgttccaagagggttgctccagttctgatccgagagatcaccaggcgggttcacctggagggcatcttccaagcagtttacactgccggggtggtactaccaaagcccgttggcacctgcaggtattggcatcggtccctaaacccacggaagctgattgaagtgaagttctcccacctgagcagaaatatgaccatgcagcgcaccatgaagctctaccgactgccagagactcccaagacagctgggctgcgaccaatggaaacaaaggacattccagtagtgcaccagctcctcaccaggtacttgaagcaatttcaccttacgcccgtcatgagccaggaggaggtggagcactggttctacccccaggagaatatcatcgacactttcgtggtggagaacgcaaacggagaggtgacagatttcctgagcttttatacgctgccctccaccatcatgaaccatccaacccacaagagtctcaaagctgcttattctttctacaacgttcacacccagacccctcttctagacctcatgagcgacgcccttgtcctcgccaaaatgaaagggtttgatgtgttcaatgcactggatctcatggagaacaaaaccttcctggagaagctcaagtttggcataggggacggcaacctgcagtattacctttacaattggaaatgccccagcatgggggcagagaaggtaggcgacacatagccagagtccaggctgcccggcccagggtgtccatgtctccagcagaaaccgggccatgggttgaggagacagccgcagtctgggtccttgttacctcgagttgaacctttgaaaatgccctccctctgctggccagaccagcaggtcagcgttcccctctcagcaactggtgtgaggatggcagaggggacagagccacacagtagcacgaagatcatctccaatgaggccttcccacgtgagggaaccgtggaagttgagttgcccacggtttgccaggagggtagggctgggggaactctgaggaggtttcctctcctgagctgctgccctcttctggcatgacactttcttagcccttcctcccccagtgccataggggacataggggtgagcagtagcgtggg

SEQ ID NO: 74094 - DNA, 1789 bp, Homo sapiens
agcggggggagccctgctctcgcaactcaagatggcggacgagagtgagacagcagtgaagccgccggcacctccgctgccgcagatgatggaagggaacgggaacggccatgagcactgcagcgattgcgagaatgaggaggacaacagctacaaccggggtggtttgagtccagccaatgacactggagccaaaaagaagaaaaagaaacaaaaaaagaagaaagaaaaaggcagtgagacagattcagcccaggatcagcctgtgaagatgaactctttgccagcagagaggatccaggaaatacagaaggccattgagctgttctcagtgggtcagggacctgccaaaaccatggaggaggctagcaagcgaagctaccagttctgggatacgcagcccgtccccaagctgggcgaagtggtgaacacccatggccccgtggagcctgacaaggacaatatccgccaggagccctacaccctgccccagggcttcacctgggatgctttggacctgggcgatcgtggtgtgctaaaagaactgtacaccctcctgaatgagaactatgtggaagatgatgacaacatgttccgatttgattattccccggagtttcttttgtgggctctccggccacccggctggctcccccagtggcactgtggggttcgagtggtctcaagtcggaaattggttgggttcattagcgccatcccagcaaacatccatatctatgacacagagaagaagatggtagagatcaacttcctgtgtgtccacaagaagctgcgttccaagagggttgctccagttctgatccgagagatcaccaggcgggttcacctggagggcatcttccaagcagtttacactgccggggtggtactaccaaagcccgttggcacctgcaggtattggcatcggtccctaaacccacggaagctgattgaagtgaagttctcccacctgagcagaaatatgaccatgcagcgcaccatgaagctctaccgactgccagagggccagtgctgccccgggtggtgggcagggggcagagagagggcaaggagagcctggctgtcagcaggagagaagggctctgggtggagagggagctttctcctactggaaaagcgaaccagcccatagtcttcagatttcctggactttctatttctgttatctgaagcaggattttattttagtttaactttctcagttcctctgagtctgtgcctggactagcttctctgccatctgttgaaaggctcagagaacacctattctctgtaattttagcctaagtaaagcataaatagaatgatgaatccacttagtgaaccttcatacacacggcagcgcgttccaaagcccagcgcagatgcactacagggtctgtgacgcccctctgccgggtcaggtaaagggtgacctgagcttgtgagggatccccgatttctaatcccaatttccccacccagatttggctgaaggactgggcaaccttaaagtgagctgcttttctgttctgggtctcagttttcctagtttcccaaagaaacaaatgctccaactgtggctggcttcaggtagggattcttttttttttgttttgagacggggtctcattctgttgcccaggctggagtgcagtggcacagtcacagctcactgcagcctcgacctcccagactcaactgattctcccacctcagcctcccaagtagctgggactacaggcgtgtgccgccatgcccggccaatttttgtttttatagaaacggg

SEQ ID NO: 74095 - DNA, 1083 bp, Homo sapiens
agcggggggagccctgctctcgcaactcaagatggcggacgagagtgagacagcagtgaagccgccggcacctccgctgccgcagatgatggaagggaacgggaacggccatgagcactgcagcgattgcgagaatgaggaggacaacagctacaaccggggtggtttgagtccagccaatgacactggagccaaaaagaagaaaaagaaacaaaaaaagaagaaagaaaaaggcagtgagacagattcagcccaggatcagcctgtgaagatgaactctttgccagcagagaggatccaggaaatacagaaggccattgagctgttctcagtgggtcagggacctgccaaaaccatggaggaggctagcaagcgaagctaccagttctgggatacgcagcccgtccccaagctgggcgaagtggtgaacacccatggccccgtggagcctgacaaggacaatatccgccaggagccctacaccctgccccagggcttcacctgggatgctttggacctgggcgatcgtggtgtgctaaaagaactgtacaccctcctgaatgagaactatgtggaagatgatgacaacatgttccgatttgattattccccggagtttcttttgtgggctctccggccacccggctggctcccccagtggcactgtggggttcgagtggtctcaagtcggaaattggttgggttcattagcgccatcccagcaaacatccatatctatgacacagagaagaagatggtagagatcaacttcctgtgtgtccacaagaagctgcgttccaagagggttgctccagttctgatccgagagatcaccaggcgggttcacctggagggcatcttccaagcagtttacactgccggggtggtactaccaaagcccgttggcacctgcaggtattggcatcggtccctaaacccacggaagctgattgaagtgaagttctcccacctgagcagaaatatgaccatgcagcgcaccatgaagctctaccgactgccagagactcccaagacagctggactgtgaccaggcgtaggggatcctgcagagacgaccgcagc

SEQ ID NO: 74096 - DNA, 1261 bp, Homo sapiens
agcggggggagccctgctctcgcaactcaagatggcggacgagagtgagacagcagtgaagccgccggcacctccgctgccgcagatgatggaagggaacgggaacggccatgagcactgcagcgattgcgagaatgaggaggacaacagctacaaccggggtggtttgagtccagccaatgacactggagccaaaaagaagaaaaagaaacaaaaaaagaagaaagaaaaaggcagtgagacagattcagcccaggatcagcctgtgaagatgaactctttgccagcagagaggatccaggaaatacagaaggccattgagctgttctcagtgggtcagggacctgccaaaaccatggaggaggctagcaagcgaagctaccagttctgggatacgcagcccgtccccaagctgggcgaagtggtgaacacccatggccccgtggagcctgacaaggacaatatccgccaggagccctacaccctgccccagggcttcacctgggatgctttggacctgggcgatcgtggtgtgctaaaagaactgtacaccctcctgaatgagaactatgtggaagatgatgacaacatgttccgatttgattattccccggagtttcttttgtgggctctccggccacccggctggctcccccagtggcactgtggggttcgagtggtctcaagtcggaaattggttgggttcattagcgccatcccagcaaacatccatatctatgacacagagaagaagatggtagagatcaacttcctgtgtgtccacaagaagctgcgttccaagagggttgctccagttctgatccgagagatcaccaggcgggttcacctggagggcatcttccaagcagtttacactgccggggtggtactaccaaagcccgttggcacctgcaggtaaaactgtcttcctgtaagtccccgaaaatgcgggtgtctgcactgtagttgaggagcatgtgccactgtgagtcacagctccgcccttagcatcccacctctggcgtatctggtaaggcgggcacttggtgcctgcaggagccagatggggagcatggagagggcgggagggttgtagggatggcagattggcaagtccctgccttgtctggagggctcttggtgtctgctggctgctgtccatttggagatggtggggggcggtactggtggtttgtttctctcgtccctctagggatgagccccatatctgatattattatgggttatgtctgtaaagatc

SEQ ID NO: 74097 - DNA, 777 bp, Homo sapiens
agcggggggagccctgctctcgcaactcaagatggcggacgagagtgagacagcagtgaagccgccggcacctccgctgccgcagatgatggaagggaacgggaacggccatgagcactgcagcgattgcgagaatgaggaggacaacagctacaaccggggtggtttgagtccagccaatgacactggagccaaaaagaagaaaaagaaacaaaaaaagaagaaagaaaaaggcagtgagacagattcagcccaggatcagcctgtgaagatgaactctttgccagcagagaggatccaggaaatacagaaggccattgagctgttctcagtgggtcagggacctgccaaaaccatggaggaggctagcaagcgaagctaccagttctgggatacgcagcccgtccccaagctgggcgaagtggtgaacacccatggccccgtggagcctgacaaggacaatatccgccaggagccctacaccctgccccagggcttcacctgggatgctttggacctgggcgatcgtggtgtgctaaaagaactgtacaccctcctgaatgagaactatgtggaagatgatgacaacatgttccgatttgattattccccggagtttcttttgtgggctctccggccacccggctggctcccccagtggcactgtggggttcgagtggtctcaagtcggaaattggttgggttcattagcgccatcccagcaaacatccatatctatgacactgatgacacatatgtcgggtgatcctctagagt

SEQ ID NO: 74098 - DNA, 195 bp, Homo sapiens
tgccatgaaatggaaatactaattcaagttttccaccaggctggatatgctcataggaaaataatcctttttgctcttatgagatagaggcgttgaaaatagaacctgtaaagttgagaaatgcagtcgtgttttcagttgtctacattgagcatttattacctttataataaaaaatatggtttaggctgcgca

SEQ ID NO: 74099 - DNA, 424 bp, Homo sapiens
cctgggtttggatttgtattgtgaggaagaggagacagagtggggtgtgtcacaaaggctgagatgagcaggaaatcaagccttgctagttggttttctggagtggaattgagccttaagaaatgagatttgtgagggccaggtgtggtggctcatgcctgtaatcccggtgctttgggagaccaggtgggaggctagcttgaggccgagagaccagcctgggtaacatagcaagacccagtctctacaaaaaataaaaagatgagctgggtgtgttggtgcatgcctgcggtcccagctactcaggagtctgaggtgggaggatctctggggtccttgggatgcccccctacccccacatctagcgggctttggccactgcactccagcctgggtgatagagcaaggtcctatctctaagaaa

SEQ ID NO: 74100 - DNA, 352 bp, Homo sapiens
ctgtgacttgcgcgtatacgcccagatggcctgaagtaactgaagaatcacaaaagaagtgaaaaggccctgccccgccttaactgatgacattccaccattgtgatttgttcctgccccaccttaactgagtgattaaccctgtaaatttccttcttctggctcagaagctcccgcactgagcaccttgtgacccccgcccctgcccaccagagaacaaccccctttgcatgtaattttccattaccttcccaaatcctataaaacggccccatccctactccctttgctgactctcttttcggactcatccggcctgcacccaggtgaaataaacagccatgttgctcac

SEQ ID NO: 74101 - DNA, 1102 bp, Homo sapiens
gccgctttcgccgcggtctcctcctctagcgcccgccgcggccggtaaatctcggctggaggagcagcggcggcccccgagtcaactttcattccctttttgcttctgcctcaccattctcttctcctcctcgaaagatggctgtttggagaagggggagaagttaagaggtcgccagcgcggagcgaaggagggcgcgatagcctcagcaggagcgggcggaggtttctcctctgccaacccctcctggaccattgtcagcagttgaacgacaaaggctgtgaatctgcatcctagtcttagcagtccctctgattctcatgatgagctcacctgcacagcctgaaatgaggtcttactgtgttgcccaggctggtatcaaactccagtgatcaagtggtcctcctacctcagcctcccaaacagatatgacagctgcatagattcaacctactatgaaaagccaaaacatggaatattacactaattaaacggttacacaacagaacatggaatgtgcgacacttcatcttgggatgcaaatttttgtgctaaaaaaaactgagaaaaacaaaaagaaaaacatgtatttctgaggaacttgtttttatatctggcataaatgagaaaaagctaattaaaactattaattatcagaaaattgaagataaagttgaagagcctataccaaccaaagttgaataaatggcaaaatataatatagatgagttactctgaaataattttttatttcctactatctaacttaccaaacttcctgattttaattacataacaattttttggttattttaatattcatttggtacttatttccttttttattgttatagtattagatgaaatcataacatcaatttgctcctttgtaaaagaggatgttgagttagaagtgttctaaggtggctttcagcaataggctgccataccaattggaaaaatctagcatggtataaaagaatatttaagcagtaattatgactggaaaacatcagagtggaaatgaagtatggctgagaaacctttttgcttttagctttttttggagttcattacaataaaatgaaattatagaaactta

SEQ ID NO: 74102 - DNA, 743 bp, Homo sapiens
ggggaagagaggcacagacacagataggagaagggcaccggctggagccacttgcaggactgagggtttttgcaacaaaaccctagcagcctgaagaactctaagccaggtttaattggtttctttttctcgtgggtagacttaataattttctacgtattctgacaaagaaataaccccgaagcacgttcctatttcccacctgcttgtagtttccgggataacctaaactccagagagctatagcatccactctgtcctttctgctttgcacacagatggggtggctggacgagagcagctcttggctcagcaaagaatgcacagtatgatcagctcagaggagtgggacccatgactgagctgggaaggcaggatacctaaacctgctcaagtttctattgggaagaaccaagaagcaggaggaatagatgttagctaggcactagcagtatttgctacaacgtggatattgttgaactatgggtgttgactttcttttcatgaagataatatatctgtttaaatactaatgggaaagaagctttcagaagatcattaaatgcattaaaacctgcagatgtccacatgtctgtgcctctctttagcagcctgactcctttgggtcagttattcttagcctcggtatttctatcttatggcatcgcaggtctaagattagcttgttaggcgttatcatgccatatgagttacctcctaatataactctacactggaatgat

SEQ ID NO: 74103 - DNA, 4354 bp, Homo sapiens
  misc_feature (4257)..(4257): n is a, c, g, or t
ggggaagagaggcacagacacagataggagaagggcaccggctggagccacttgcaggactgagggtttttgcaacaaaaccctagcagcctgaagaactctaagccagatggggtggctggacgagagcagctcttggctcagcaaagaatgcacagtatgatcagctcagtggatgtgaagtcagaagttcctgtgggcctggagcccatctcacctttagacctaaggacagacctcaggatgatgatgcccgtggtggaccctgttgtccgtgagaagcaattgcagcaggaattacttcttatccagcagcagcaacaaatccagaagcagcttctgatagcagagtttcagaaacagcatgagaacttgacacggcagcaccaggctcagcttcaggagcatatcaaggaacttctagccataaaacagcaacaagaactcctagaaaaggagcagaaactggagcagcagaggcaagaacaggaagtagagaggcatcgcagagaacagcagcttcctcctctcagaggcaaagatagaggacgagaaagggcagtggcaagtacagaagtaaagcagaagcttcaagagttcctactgagtaaatcagcaacgaaagacactccaactaatggaaaaaatcattccgtgagccgccatcccaagctctggtacacggctgcccaccacacatcattggatcaaagctctccaccccttagtggaacatctccatcctacaagtacacattaccaggagcacaagatgcaaaggatgatttcccccttcgaaaaactgcctctgagcccaacttgaaggtgcggtccaggttaaaacagaaagtggcagagaggagaagcagccccttactcaggcggaaggatggaaatgttgtcacttcattcaagaagcgaatgtttgaggtgacagaatcctcagtcagtagcagttctccaggctctggtcccagttcaccaaacaatgggccaactggaagtgttactgaaaatgagacttcggttttgccccctacccctcatgccgagcaaatggtttcacagcaacgcattctaattcatgaagattccatgaacctgctaagtctttatacctctccttctttgcccaacattaccttggggcttcccgcagtgccatcccagctcaatgcttcgaattcactcaaagaaaagcagaagtgtgagacgcagacgcttaggcaaggtgttcctctgcctgggcagtatggaggcagcatcccggcatcttccagccaccctcatgttactttagagggaaagccacccaacagcagccaccaggctctcctgcagcatttattattgaaagaacaaatgcgacagcaaaagcttcttgtagctggtggagttcccttacatcctcagtctcccttggcaacaaaagagagaatttcacctggcattagaggtacccacaaattgccccgtcacagacccctgaaccgaacccagtctgcacctttgcctcagagcacgttggctcagctggtcattcaacagcaacaccagcaattcttggagaagcagaagcaataccagcagcagatccacatgaacaaactgctttcgaaatctattgaacaactgaagcaaccaggcagtcaccttgaggaagcagaggaagagcttcagggggaccaggcgatgcaggaagacagagcgccctctagtggcaacagcactaggagcgacagcagtgcttgtgtggatgacacactgggacaagttggggctgtgaaggtcaaggaggaaccagtggacagtgatgaagatgctcagatccaggaaatggaatctggggagcaggctgcttttatgcaacaggtaataggcaaagatttagctccaggatttgtaattaaagtcattatctgaacatgaaatgcattgcaggtttggtaaatggatatgatttcctatcagtttatatttctctatgatttgagttcagtgtttaaggattctacctaatgcagatatatgtatatatctatatagaggtctttctatatactgatctctatatagatatcaatgtttcattgaaaatccactggtaaggaaatacctgttatactaaaattatgatacataatatctgagcagttaataggctttaaatttatcccaaagcctgctacaccaattacttctaaagaaaacaaattcactgttattttgagtttatgtgttgagatcagtgactgctggatagtctcccagtctgatcaatgaagcattcgattagtttttgattttttgcaacatctagaatttaattttcacatcactgtacataatgtatcatactatagtcttgaacactgttaaaggtagtctgccccttccttcctctctctttttttagttaagtagaaatgttctggtcaccatgccagtagtcctaggttattgtgtaggttgcaattgaacatattaggaatacaggtggttttaaatatatagatgcaaattgcagcactactttaaatattagattatgtctcacatagcactgctcattttacttttattttgtgtaatttgatgacactgtctatcaaaaaagagcaaatgaagcagatgcaaatgttagtgagaagtaatgtgcagcattatggtccaatcagatacaatattgtgtctacaattgcaaaaaacacagtaacaggatgaatattatctgatatcaagtcaaaatcagtttgaaaagaaggtgtatcatattttatattgtcactagaatctcttaagtataattccataatgacatgggcatataccgtaacattctggcaaataacaattagaaaagataggtttaacaaaaaaatttacttgtatataatgcaccttcaggaggactatgtcctttgatgctataaaatacaaacaactttgaaggcaacagaagacactgtttattcaagtcagttctttgtcaggttcctgctgttctcctacagaaaagtgattctgtgagggtgaacaggaaatgccttgtggaaacaggaagtccaagtgattcatgtactgaggaatgtaggaaaaaaaatctgaggatagtgctttactctttctgtttttaaagggcactctatgaattgatttattgtctaagaaaataacaccacaagtagggaaattgttacggaagcttttcactggaacatttccttcatattcccttttgatatgtttaccttgttttataggtttacttttgttaagctagttaaaggttcgttgtattaagacccctttaatatggataatccaaattgacctagaatctttgtgaggttttttctattaaaatatttatatttctaaatccgaggtatttcaaggtgtagtatcctatttcaaaggagatatagcagttttgccaaatgtagacattgttcaactgtatgttattggcacgtgttgtttacattttgctgtgacatttaaaaatatttctttaaaaatgttactgctaaagatacattatccttttttaaaaagtctccattcaaattaaattaacataactagaagttagaaagtttaaaagttttccacataatgaaagtccttctgataatttgacaaatagctataataggaacactccctatcaccaacatattttggttagtatattccttcatattaaaatgactttttgtcagttgttttgcattaaaaatatggcatgcctaagataaaattgtatattttttccatctcataaatattcattttcttcaaagtcttttttcaatctcataaaaaagggatagtgcatcttttaaaatacattttatttggggaggaacatgtggctgagcagacttttgtataatattacttcaaagatatgtaatcacaaacaaaaaaaactattttttataatgtcatttgagagagtttcatcagtacagttggtggacgttaattgtttgaatttgatagtctttgaatttaatcaagaaactacctggaaccagtgaaaaggaaagctggacttaaataatcttagaattaattgataaatgtctcttttaaaatctactgtatttattataatttacacccttgaaggtgatctcttgttttgtgttgtaaatatattgtttgtatgtttcccttcttgccttctgttataagtctcttcctttctcaaataaagttttttttaaaagaaaaaaccccaatccaccnccaacaaaaataaaaaaacccgcacgagcttcccggtgccctgagcttggcggcttgcattcgcccggggggagggaaggcaactcgaggataggca

SEQ ID NO: 74104 - DNA, 3564 bp, Homo sapiens
gccgctttcgccgcggtctcctcctctagcgcccgccgcggccggtaaatctcggctggaggagcagcggcggcccccgagtcaactttcattccctttttgcttctgcctcaccattctcttctcctcctcgaaagatggctgtttggagaagggggagaagttaagaggtcgccagcgcggagcgaaggagggcgcgatagcctcagcaggagcgggcggaggtttctcctctgccaacccctcctggaccattgtcagcagttgaacgacaaaggctgtgaatctgcatcctagtcttagcagtccctctgattctcatgatgagctcacctgcacagcctggagtacctggtaaaatgctgtggtgtatggagacagttatgagaaactggagggaggatgatagttgagatggggtggctggacgagagcagctcttggctcagcaaagaatgcacagtatgatcagctcagtggatgtgaagtcagaagttcctgtgggcctggagcccatctcacctttagacctaaggacagacctcaggatgatgatgcccgtggtggaccctgttgtccgtgagaagcaattgcagcaggaattacttcttatccagcagcagcaacaaatccagaagcagcttctgatagcagagtttcagaaacagcatgagaacttgacacggcagcaccaggctcagcttcaggagcatatcaaggaacttctagccataaaacagcaacaagaactcctagaaaaggagcagaaactggagcagcagaggcaagaacaggaagtagagaggcatcgcagagaacagcagcttcctcctctcagaggcaaagatagaggacgagaaagggcagtggcaagtacagaagtaaagcagaagcttcaagagttcctactgagtaaatcagcaacgaaagacactccaactaatggaaaaaatcattccgtgagccgccatcccaagctctggtacacggctgcccaccacacatcattggatcaaagctctccaccccttagtggaacatctccatcctacaagtacacattaccaggagcacaagatgcaaaggatgatttcccccttcgaaaaactgcctctgagcccaacttgaaggtgcggtccaggttaaaacagaaagtggcagagaggagaagcagccccttactcaggcggaaggatggaaatgttgtcacttcattcaagaagcgaatgtttgaggtgacagaatcctcagtcagtagcagttctccaggctctggtcccagttcaccaaacaatgggccaactggaagtgttactgaaaatgagacttcggttttgccccctacccctcatgccgagcaaatggtttcacagcaacgcattctaattcatgaagattccatgaacctgctaagtctttatacctctccttctttgcccaacattaccttggggcttcccgcagtgccatcccagctcaatgcttcgaattcactcaaagaaaagcagaagtgtgagacgcagacgcttaggcaaggtgttcctctgcctgggcagtatggaggcagcatcccggcatcttccagccaccctcatgttactttagagggaaagccacccaacagcagccaccaggctctcctgcagcatttattattgaaagaacaaatgcgacagcaaaagcttcttgtagctggtggagttcccttacatcctcagtctcccttggcaacaaaagagagaatttcacctggcattagaggtacccacaaattgccccgtcacagacccctgaaccgaacccagtctgcacctttgcctcagagcacgttggctcagctggtcattcaacagcaacaccagcaattcttggagaagcagaagcaataccagcagcagatccacatgaacaaactgctttcgaaatctattgaacaactgaagcaaccaggcagtcaccttgaggaagcagaggaagagcttcagggggaccaggcgatgcaggaagacagagcgccctctagtggcaacagcactaggagcgacagcagtgcttgtgtggatgacacactgggacaagttggggctgtgaaggtcaaggaggaaccagtggacagtgatgaagatgctcagatccaggaaatggaatctggggagcaggctgcttttatgcaacagcctttcctggaacccacgcacacacgtgcgctctctgtgcgccaagctccgctggctgcggttggcatggatggattagagaaacaccgtctcgtctccaggactcactcttcccctgctgcctctgttttacctcacccagcaatggaccgccccctccagcctggctctgcaactggaattgcctatgaccccttgatgctgaaacaccagtgcgtttgtggcaattccaccacccaccctgagcatgctggacgaatacagagtatctggtcacgactgcaagaaactgggctgctaaataaatgtgagcgaattcaaggtcgaaaagccagcctggaggaaatacagcttgttcattctgaacatcactcactgttgtatggcaccaaccccctggacggacagaagctggaccccaggatactcctaggtgatgactctcaaaagtttttttcctcattaccttgtggtggacttggggtggacagtgacaccatttggaatgagctacactcgtccggtgctgcacgcatggctgttggctgtgtcatcgagctggcttccaaagtggcctcaggagagctgaagaatgggtttgctgttgtgaggccccctggccatcacgctgaagaatccacagccatggggttctgcttttttaattcagttgcaattaccgccaaatacttgagagaccaactaaatataagcaagatattgattgtagatctggatgttcaccatggaaacggtacccagcaggccttttatgctgaccccagcatcctgtacatttcactccatcgctatgatgaagggaactttttccctggcagtggagccccaaatgaggttggaacaggccttggagaagggtacaatataaatattgcctggacaggtggccttgatcctcccatgggagatgttgagtaccttgaagcattcaggaccatcgtgaagcctgtggccaaagagtttgatccagacatggtcttagtatctgctggatttgatgcattggaaggccacacccctcctctaggagggtacaaagtgacggcaaaatgttttggtcatttgacgaagcaattgatgacattggctgatggacgtgtggtgttggctctagaaggaggacatgatctcacagccatctgtgatgcatcagaagcctgtgtaaatgcccttctaggaaatgagctggagccacttgcagaagatattctccaccaaagcccgaatatgaatgctgttatttctttacagaagatcattgaaattcaaagtatgtctttaaagttctcttaaaaattctaagcaggtaaaactaactaaaattatattgaaaattatagtacaaagaaacatttatttagagtta

SEQ ID NO: 74105 - DNA, 3325 bp, Homo sapiens
ggggaagagaggcacagacacagataggagaagggcaccggctggagccacttgcaggactgagggtttttgcaacaaaaccctagcagcctgaagaactctaagccagtttccgggataacctaaactccagagagctatagcatccactctgtcctttctgctttgcacacagatggggtggctggacgagagcagctcttggctcagcaaagaatgcacagtatgatcagctcagtggatgtgaagtcagaagttcctgtgggcctggagcccatctcacctttagacctaaggacagacctcaggatgatgatgcccgtggtggaccctgttgtccgtgagaagcaattgcagcaggaattacttcttatccagcagcagcaacaaatccagaagcagcttctgatagcagagtttcagaaacagcatgagaacttgacacggcagcaccaggctcagcttcaggagcatatcaaggaacttctagccataaaacagcaacaagaactcctagaaaaggagcagaaactggagcagcagaggcaagaacaggaagtagagaggcatcgcagagaacagcagcttcctcctctcagaggcaaagatagaggacgagaaagggcagtggcaagtacagaagtaaagcagaagcttcaagagttcctactgagtaaatcagcaacgaaagacactccaactaatggaaaaaatcattccgtgagccgccatcccaagctctggtacacggctgcccaccacacatcattggatcaaagctctccaccccttagtggaacatctccatcctacaagtacacattaccaggagcacaagatgcaaaggatgatttcccccttcgaaaaactgcctctgagcccaacttgaaggtgcggtccaggttaaaacagaaagtggcagagaggagaagcagccccttactcaggcggaaggatggaaatgttgtcacttcattcaagaagcgaatgtttgaggtgacagaatcctcagtcagtagcagttctccaggctctggtcccagttcaccaaacaatgggccaactggaagtgttactgaaaatgagacttcggttttgccccctacccctcatgccgagcaaatggtttcacagcaacgcattctaattcatgaagattccatgaacctgctaagtctttatacctctccttctttgcccaacattaccttggggcttcccgcagtgccatcccagctcaatgcttcgaattcactcaaagaaaagcagaagtgtgagacgcagacgcttaggcaaggtgttcctctgcctgggcagtatggaggcagcatcccggcatcttccagccaccctcatgttactttagagggaaagccacccaacagcagccaccaggctctcctgcagcatttattattgaaagaacaaatgcgacagcaaaagcttcttgtagctggtggagttcccttacatcctcagtctcccttggcaacaaaagagagaatttcacctggcattagaggtacccacaaattgccccgtcacagacccctgaaccgaacccagtctgcacctttgcctcagagcacgttggctcagctggtcattcaacagcaacaccagcaattcttggagaagcagaagcaataccagcagcagatccacatgaacaaactgctttcgaaatctattgaacaactgaagcaaccaggcagtcaccttgaggaagcagaggaagagcttcagggggaccaggcgatgcaggaagacagagcgccctctagtggcaacagcactaggagcgacagcagtgcttgtgtggatgacacactgggacaagttggggctgtgaaggtcaaggaggaaccagtggacagtgatgaagatgctcagatccaggaaatggaatctggggagcaggctgcttttatgcaacagcctttcctggaacccacgcacacacgtgcgctctctgtgcgccaagctccgctggctgcggttggcatggatggattagagaaacaccgtctcgtctccaggactcactcttcccctgctgcctctgttttacctcacccagcaatggaccgccccctccagcctggctctgcaactggaattgcctatgaccccttgatgctgaaacaccagtgcgtttgtggcaattccaccacccaccctgagcatgctggacgaatacagagtatctggtcacgactgcaagaaactgggctgctaaataaatgtgagcgaattcaaggtcgaaaagccagcctggaggaaatacagcttgttcattctgaacatcactcactgttgtatggcaccaaccccctggacggacagaagctggaccccaggatactcctaggtgatgactctcaaaagtttttttcctcattaccttgtggtggacttggggtggacagtgacaccatttggaatgagctacactcgtccggtgctgcacgcatggctgttggctgtgtcatcgagctggcttccaaagtggcctcaggagagctgaagaatgggtttgctgttgtgaggccccctggccatcacgctgaagaatccacagccatggggttctgcttttttaattcagttgcaattaccgccaaatacttgagagaccaactaaatataagcaagatattgattgtagatctggatgttcaccatggaaacggtacccagcaggccttttatgctgaccccagcatcctgtacatttcactccatcgctatgatgaagggaactttttccctggcagtggagccccaaatgaggttggaacaggccttggagaagggtacaatataaatattgcctggacaggtggccttgatcctcccatgggagatgttgagtaccttgaagcattcaggaccatcgtgaagcctgtggccaaagagtttgatccagacatggtcttagtatctgctggatttgatgcattggaaggccacacccctcctctaggagggtacaaagtgacggcaaaatgttttggtcatttgacgaagcaattgatgacattggctgatggacgtgtggtgttggctctagaaggaggacatgatctcacagccatctgtgatgcatcagaagcctgtgtaaatgcccttctaggaaatgagctggagccacttgcagaagatattctccaccaaagcccgaatatgaatgctgttatttctttacagaagatcattgaaattcaaagtatgtctttaaagttctcttaaaaattctaagcaggtaaaactaactaaaattatattgaaaattatagtacaaagaaacatttatttagagtta

SEQ ID NO: 74106 - DNA, 4294 bp, Homo sapiens
  misc_feature (4197)..(4197): n is a, c, g, or t
gccgctttcgccgcggtctcctcctctagcgcccgccgcggccggtaaatctcggctggaggagcagcggcggcccccgagtcaactttcattccctttttgcttctgcctcaccattctcttctcctcctcgaaagatggctgtttggagaagggggagaagttaagaggtcgccagcgcggagcgaaggagggcgcgatagcctcagcaggagcgggcggaggtttctcctctgccaacccctcctggaccattgtcagcagttgaacgacaaaggctgtgaatctgcatcctagtcttagcagtccctctgattctcatgatgagctcacctgcacagcctggagtacctggtaaaatgctgtggtgtatggagacagttatgagaaactggagggaggatgatagttgagatggggtggctggacgagagcagctcttggctcagcaaagaatgcacagtatgatcagctcagtggatgtgaagtcagaagttcctgtgggcctggagcccatctcacctttagacctaaggacagacctcaggatgatgatgcccgtggtggaccctgttgtccgtgagaagcaattgcagcaggaattacttcttatccagcagcagcaacaaatccagaagcagcttctgatagcagagtttcagaaacagcatgagaacttgacacggcagcaccaggctcagcttcaggagcatatcaaggaacttctagccataaaacagcaacaagaactcctagaaaaggagcagaaactggagcagcagaggcaagaacaggaagtagagaagcagccccttactcaggcggaaggatggaaatgttgtcacttcattcaagaagcgaatgtttgaggtgacagaatcctcagtcagtagcagttctccaggctctggtcccagttcaccaaacaatgggccaactggaagtgttactgaaaatgagacttcggttttgccccctacccctcatgccgagcaaatggtttcacagcaacgcattctaattcatgaagattccatgaacctgctaagtctttatacctctccttctttgcccaacattaccttggggcttcccgcagtgccatcccagctcaatgcttcgaattcactcaaagaaaagcagaagtgtgagacgcagacgcttaggcaaggtgttcctctgcctgggcagtatggaggcagcatcccggcatcttccagccaccctcatgttactttagagggaaagccacccaacagcagccaccaggctctcctgcagcatttattattgaaagaacaaatgcgacagcaaaagcttcttgtagctggtggagttcccttacatcctcagtctcccttggcaacaaaagagagaatttcacctggcattagaggtacccacaaattgccccgtcacagacccctgaaccgaacccagtctgcacctttgcctcagagcacgttggctcagctggtcattcaacagcaacaccagcaattcttggagaagcagaagcaataccagcagcagatccacatgaacaaactgctttcgaaatctattgaacaactgaagcaaccaggcagtcaccttgaggaagcagaggaagagcttcagggggaccaggcgatgcaggaagacagagcgccctctagtggcaacagcactaggagcgacagcagtgcttgtgtggatgacacactgggacaagttggggctgtgaaggtcaaggaggaaccagtggacagtgatgaagatgctcagatccaggaaatggaatctggggagcaggctgcttttatgcaacaggtaataggcaaagatttagctccaggatttgtaattaaagtcattatctgaacatgaaatgcattgcaggtttggtaaatggatatgatttcctatcagtttatatttctctatgatttgagttcagtgtttaaggattctacctaatgcagatatatgtatatatctatatagaggtctttctatatactgatctctatatagatatcaatgtttcattgaaaatccactggtaaggaaatacctgttatactaaaattatgatacataatatctgagcagttaataggctttaaatttatcccaaagcctgctacaccaattacttctaaagaaaacaaattcactgttattttgagtttatgtgttgagatcagtgactgctggatagtctcccagtctgatcaatgaagcattcgattagtttttgattttttgcaacatctagaatttaattttcacatcactgtacataatgtatcatactatagtcttgaacactgttaaaggtagtctgccccttccttcctctctctttttttagttaagtagaaatgttctggtcaccatgccagtagtcctaggttattgtgtaggttgcaattgaacatattaggaatacaggtggttttaaatatatagatgcaaattgcagcactactttaaatattagattatgtctcacatagcactgctcattttacttttattttgtgtaatttgatgacactgtctatcaaaaaagagcaaatgaagcagatgcaaatgttagtgagaagtaatgtgcagcattatggtccaatcagatacaatattgtgtctacaattgcaaaaaacacagtaacaggatgaatattatctgatatcaagtcaaaatcagtttgaaaagaaggtgtatcatattttatattgtcactagaatctcttaagtataattccataatgacatgggcatataccgtaacattctggcaaataacaattagaaaagataggtttaacaaaaaaatttacttgtatataatgcaccttcaggaggactatgtcctttgatgctataaaatacaaacaactttgaaggcaacagaagacactgtttattcaagtcagttctttgtcaggttcctgctgttctcctacagaaaagtgattctgtgagggtgaacaggaaatgccttgtggaaacaggaagtccaagtgattcatgtactgaggaatgtaggaaaaaaaatctgaggatagtgctttactctttctgtttttaaagggcactctatgaattgatttattgtctaagaaaataacaccacaagtagggaaattgttacggaagcttttcactggaacatttccttcatattcccttttgatatgtttaccttgttttataggtttacttttgttaagctagttaaaggttcgttgtattaagacccctttaatatggataatccaaattgacctagaatctttgtgaggttttttctattaaaatatttatatttctaaatccgaggtatttcaaggtgtagtatcctatttcaaaggagatatagcagttttgccaaatgtagacattgttcaactgtatgttattggcacgtgttgtttacattttgctgtgacatttaaaaatatttctttaaaaatgttactgctaaagatacattatccttttttaaaaagtctccattcaaattaaattaacataactagaagttagaaagtttaaaagttttccacataatgaaagtccttctgataatttgacaaatagctataataggaacactccctatcaccaacatattttggttagtatattccttcatattaaaatgactttttgtcagttgttttgcattaaaaatatggcatgcctaagataaaattgtatattttttccatctcataaatattcattttcttcaaagtcttttttcaatctcataaaaaagggatagtgcatcttttaaaatacattttatttggggaggaacatgtggctgagcagacttttgtataatattacttcaaagatatgtaatcacaaacaaaaaaaactattttttataatgtcatttgagagagtttcatcagtacagttggtggacgttaattgtttgaatttgatagtctttgaatttaatcaagaaactacctggaaccagtgaaaaggaaagctggacttaaataatcttagaattaattgataaatgtctcttttaaaatctactgtatttattataatttacacccttgaaggtgatctcttgttttgtgttgtaaatatattgtttgtatgtttcccttcttgccttctgttataagtctcttcctttctcaaataaagttttttttaaaagaaaaaaccccaatccaccnccaacaaaaataaaaaaacccgcacgagcttcccggtgccctgagcttggcggcttgcattcgcccggggggagggaaggcaactcgaggataggca

SEQ ID NO: 74107 - DNA, 4048 bp, Homo sapiens
  misc_feature (3951)..(3951): n is a, c, g, or t
ggggaagagaggcacagacacagataggagaagggcaccggctggagccacttgcaggactgagggtttttgcaacaaaaccctagcagcctgaagaactctaagccagatggggtggctggacgagagcagctcttggctcagcaaagaatgcacagtatgatcagctcagttgaactatgggtgttgactttcttttcatgaagataatatatctgtttaaatactaattggatgtgaagtcagaagttcctgtgggcctggagcccatctcacctttagacctaaggacagacctcaggatgatgatgcccgtggtggaccctgttgtccgtgagaagcaattgcagcaggaattacttcttatccagcagcagcaacaaatccagaagcagcttctgatagcagagtttcagaaacagcatgagaacttgacacggcagcaccaggctcagcttcaggagcatatcaaggaacttctagccataaaacagcaacaagaactcctagaaaaggagcagaaactggagcagcagaggcaagaacaggaagtagagaagcagccccttactcaggcggaaggatggaaatgttgtcacttcattcaagaagcgaatgtttgaggtgacagaatcctcagtcagtagcagttctccaggctctggtcccagttcaccaaacaatgggccaactggaagtgttactgaaaatgagacttcggttttgccccctacccctcatgccgagcaaatggtttcacagcaacgcattctaattcatgaagattccatgaacctgctaagtctttatacctctccttctttgcccaacattaccttggggcttcccgcagtgccatcccagctcaatgcttcgaattcactcaaagaaaagcagaagtgtgagacgcagacgcttaggcaaggtgttcctctgcctgggcagtatggaggcagcatcccggcatcttccagccaccctcatgttactttagagggaaagccacccaacagcagccaccaggctctcctgcagcatttattattgaaagaacaaatgcgacagcaaaagcttcttgtagctggtggagttcccttacatcctcagtctcccttggcaacaaaagagagaatttcacctggcattagaggtacccacaaattgccccgtcacagacccctgaaccgaacccagtctgcacctttgcctcagagcacgttggctcagctggtcattcaacagcaacaccagcaattcttggagaagcagaagcaataccagcagcagatccacatgaacaaactgctttcgaaatctattgaacaactgaagcaaccaggcagtcaccttgaggaagcagaggaagagcttcagggggaccaggcgatgcaggaagacagagcgccctctagtggcaacagcactaggagcgacagcagtgcttgtgtggatgacacactgggacaagttggggctgtgaaggtcaaggaggaaccagtggacagtgatgaagatgctcagatccaggaaatggaatctggggagcaggctgcttttatgcaacaggtaataggcaaagatttagctccaggatttgtaattaaagtcattatctgaacatgaaatgcattgcaggtttggtaaatggatatgatttcctatcagtttatatttctctatgatttgagttcagtgtttaaggattctacctaatgcagatatatgtatatatctatatagaggtctttctatatactgatctctatatagatatcaatgtttcattgaaaatccactggtaaggaaatacctgttatactaaaattatgatacataatatctgagcagttaataggctttaaatttatcccaaagcctgctacaccaattacttctaaagaaaacaaattcactgttattttgagtttatgtgttgagatcagtgactgctggatagtctcccagtctgatcaatgaagcattcgattagtttttgattttttgcaacatctagaatttaattttcacatcactgtacataatgtatcatactatagtcttgaacactgttaaaggtagtctgccccttccttcctctctctttttttagttaagtagaaatgttctggtcaccatgccagtagtcctaggttattgtgtaggttgcaattgaacatattaggaatacaggtggttttaaatatatagatgcaaattgcagcactactttaaatattagattatgtctcacatagcactgctcattttacttttattttgtgtaatttgatgacactgtctatcaaaaaagagcaaatgaagcagatgcaaatgttagtgagaagtaatgtgcagcattatggtccaatcagatacaatattgtgtctacaattgcaaaaaacacagtaacaggatgaatattatctgatatcaagtcaaaatcagtttgaaaagaaggtgtatcatattttatattgtcactagaatctcttaagtataattccataatgacatgggcatataccgtaacattctggcaaataacaattagaaaagataggtttaacaaaaaaatttacttgtatataatgcaccttcaggaggactatgtcctttgatgctataaaatacaaacaactttgaaggcaacagaagacactgtttattcaagtcagttctttgtcaggttcctgctgttctcctacagaaaagtgattctgtgagggtgaacaggaaatgccttgtggaaacaggaagtccaagtgattcatgtactgaggaatgtaggaaaaaaaatctgaggatagtgctttactctttctgtttttaaagggcactctatgaattgatttattgtctaagaaaataacaccacaagtagggaaattgttacggaagcttttcactggaacatttccttcatattcccttttgatatgtttaccttgttttataggtttacttttgttaagctagttaaaggttcgttgtattaagacccctttaatatggataatccaaattgacctagaatctttgtgaggttttttctattaaaatatttatatttctaaatccgaggtatttcaaggtgtagtatcctatttcaaaggagatatagcagttttgccaaatgtagacattgttcaactgtatgttattggcacgtgttgtttacattttgctgtgacatttaaaaatatttctttaaaaatgttactgctaaagatacattatccttttttaaaaagtctccattcaaattaaattaacataactagaagttagaaagtttaaaagttttccacataatgaaagtccttctgataatttgacaaatagctataataggaacactccctatcaccaacatattttggttagtatattccttcatattaaaatgactttttgtcagttgttttgcattaaaaatatggcatgcctaagataaaattgtatattttttccatctcataaatattcattttcttcaaagtcttttttcaatctcataaaaaagggatagtgcatcttttaaaatacattttatttggggaggaacatgtggctgagcagacttttgtataatattacttcaaagatatgtaatcacaaacaaaaaaaactattttttataatgtcatttgagagagtttcatcagtacagttggtggacgttaattgtttgaatttgatagtctttgaatttaatcaagaaactacctggaaccagtgaaaaggaaagctggacttaaataatcttagaattaattgataaatgtctcttttaaaatctactgtatttattataatttacacccttgaaggtgatctcttgttttgtgttgtaaatatattgtttgtatgtttcccttcttgccttctgttataagtctcttcctttctcaaataaagttttttttaaaagaaaaaaccccaatccaccnccaacaaaaataaaaaaacccgcacgagcttcccggtgccctgagcttggcggcttgcattcgcccggggggagggaaggcaactcgaggataggca

SEQ ID NO: 74108 - DNA, 3936 bp, Homo sapiens
  misc_feature (3839)..(3839): n is a, c, g, or t
gtgggagaaccaggggaagactgtcagctacgattttctctagcctcaagaagactgagaccgagccaaactcctggccaacgtgctttgtggattcacagtgtagcttgagaaaaatgtggatgtgaagtcagaagttcctgtgggcctggagcccatctcacctttagacctaaggacagacctcaggatgatgatgcccgtggtggaccctgttgtccgtgagaagcaattgcagcaggaattacttcttatccagcagcagcaacaaatccagaagcagcttctgatagcagagtttcagaaacagcatgagaacttgacacggcagcaccaggctcagcttcaggagcatatcaaggaacttctagccataaaacagcaacaagaactcctagaaaaggagcagaaactggagcagcagaggcaagaacaggaagtagagaagcagccccttactcaggcggaaggatggaaatgttgtcacttcattcaagaagcgaatgtttgaggtgacagaatcctcagtcagtagcagttctccaggctctggtcccagttcaccaaacaatgggccaactggaagtgttactgaaaatgagacttcggttttgccccctacccctcatgccgagcaaatggtttcacagcaacgcattctaattcatgaagattccatgaacctgctaagtctttatacctctccttctttgcccaacattaccttggggcttcccgcagtgccatcccagctcaatgcttcgaattcactcaaagaaaagcagaagtgtgagacgcagacgcttaggcaaggtgttcctctgcctgggcagtatggaggcagcatcccggcatcttccagccaccctcatgttactttagagggaaagccacccaacagcagccaccaggctctcctgcagcatttattattgaaagaacaaatgcgacagcaaaagcttcttgtagctggtggagttcccttacatcctcagtctcccttggcaacaaaagagagaatttcacctggcattagaggtacccacaaattgccccgtcacagacccctgaaccgaacccagtctgcacctttgcctcagagcacgttggctcagctggtcattcaacagcaacaccagcaattcttggagaagcagaagcaataccagcagcagatccacatgaacaaactgctttcgaaatctattgaacaactgaagcaaccaggcagtcaccttgaggaagcagaggaagagcttcagggggaccaggcgatgcaggaagacagagcgccctctagtggcaacagcactaggagcgacagcagtgcttgtgtggatgacacactgggacaagttggggctgtgaaggtcaaggaggaaccagtggacagtgatgaagatgctcagatccaggaaatggaatctggggagcaggctgcttttatgcaacaggtaataggcaaagatttagctccaggatttgtaattaaagtcattatctgaacatgaaatgcattgcaggtttggtaaatggatatgatttcctatcagtttatatttctctatgatttgagttcagtgtttaaggattctacctaatgcagatatatgtatatatctatatagaggtctttctatatactgatctctatatagatatcaatgtttcattgaaaatccactggtaaggaaatacctgttatactaaaattatgatacataatatctgagcagttaataggctttaaatttatcccaaagcctgctacaccaattacttctaaagaaaacaaattcactgttattttgagtttatgtgttgagatcagtgactgctggatagtctcccagtctgatcaatgaagcattcgattagtttttgattttttgcaacatctagaatttaattttcacatcactgtacataatgtatcatactatagtcttgaacactgttaaaggtagtctgccccttccttcctctctctttttttagttaagtagaaatgttctggtcaccatgccagtagtcctaggttattgtgtaggttgcaattgaacatattaggaatacaggtggttttaaatatatagatgcaaattgcagcactactttaaatattagattatgtctcacatagcactgctcattttacttttattttgtgtaatttgatgacactgtctatcaaaaaagagcaaatgaagcagatgcaaatgttagtgagaagtaatgtgcagcattatggtccaatcagatacaatattgtgtctacaattgcaaaaaacacagtaacaggatgaatattatctgatatcaagtcaaaatcagtttgaaaagaaggtgtatcatattttatattgtcactagaatctcttaagtataattccataatgacatgggcatataccgtaacattctggcaaataacaattagaaaagataggtttaacaaaaaaatttacttgtatataatgcaccttcaggaggactatgtcctttgatgctataaaatacaaacaactttgaaggcaacagaagacactgtttattcaagtcagttctttgtcaggttcctgctgttctcctacagaaaagtgattctgtgagggtgaacaggaaatgccttgtggaaacaggaagtccaagtgattcatgtactgaggaatgtaggaaaaaaaatctgaggatagtgctttactctttctgtttttaaagggcactctatgaattgatttattgtctaagaaaataacaccacaagtagggaaattgttacggaagcttttcactggaacatttccttcatattcccttttgatatgtttaccttgttttataggtttacttttgttaagctagttaaaggttcgttgtattaagacccctttaatatggataatccaaattgacctagaatctttgtgaggttttttctattaaaatatttatatttctaaatccgaggtatttcaaggtgtagtatcctatttcaaaggagatatagcagttttgccaaatgtagacattgttcaactgtatgttattggcacgtgttgtttacattttgctgtgacatttaaaaatatttctttaaaaatgttactgctaaagatacattatccttttttaaaaagtctccattcaaattaaattaacataactagaagttagaaagtttaaaagttttccacataatgaaagtccttctgataatttgacaaatagctataataggaacactccctatcaccaacatattttggttagtatattccttcatattaaaatgactttttgtcagttgttttgcattaaaaatatggcatgcctaagataaaattgtatattttttccatctcataaatattcattttcttcaaagtcttttttcaatctcataaaaaagggatagtgcatcttttaaaatacattttatttggggaggaacatgtggctgagcagacttttgtataatattacttcaaagatatgtaatcacaaacaaaaaaaactattttttataatgtcatttgagagagtttcatcagtacagttggtggacgttaattgtttgaatttgatagtctttgaatttaatcaagaaactacctggaaccagtgaaaaggaaagctggacttaaataatcttagaattaattgataaatgtctcttttaaaatctactgtatttattataatttacacccttgaaggtgatctcttgttttgtgttgtaaatatattgtttgtatgtttcccttcttgccttctgttataagtctcttcctttctcaaataaagttttttttaaaagaaaaaaccccaatccaccnccaacaaaaataaaaaaacccgcacgagcttcccggtgccctgagcttggcggcttgcattcgcccggggggagggaaggcaactcgaggataggca

SEQ ID NO: 74109 - DNA, 4301 bp, Homo sapiens
  misc_feature (4204)..(4204): n is a, c, g, or t
gtgggagaaccaggggaagactgtcagctacgattttctctagcctcaagaagactgagaccgagccaaactcctggccaacgtgctttgtggattcacagtgtagcttgagaaaaatgtggatgtgaagtcagaagttcctgtgggcctggagcccatctcacctttagacctaaggacagacctcaggatgatgatgcccgtggtggaccctgttgtccgtgagaagcaattgcagcaggaattacttcttatccagcagcagcaacaaatccagaagcagcttctgatagcagagtttcagaaacagcatgagaacttgacacggcagcaccaggctcagcttcaggagcatatcaaggaacttctagccataaaacagcaacaagaactcctagaaaaggagcagaaactggagcagcagaggcaagaacaggaagtagagaggcatcgcagagaacagcagcttcctcctctcagaggcaaagatagaggacgagaaagggcagtggcaagtacagaagtaaagcagaagcttcaagagttcctactgagtaaatcagcaacgaaagacactccaactaatggaaaaaatcattccgtgagccgccatcccaagctctggtacacggctgcccaccacacatcattggatcaaagctctccaccccttagtggaacatctccatcctacaagtacacattaccaggagcacaagatgcaaaggatgatttcccccttcgaaaaactgcctctgagcccaacttgaaggtgcggtccaggttaaaacagaaagtggcagagaggagaagcagccccttactcaggcggaaggatggaaatgttgtcacttcattcaagaagcgaatgtttgaggtgacagaatcctcagtcagtagcagttctccaggctctggtcccagttcaccaaacaatgggccaactggaagtgttactgaaaatgagacttcggttttgccccctacccctcatgccgagcaaatggtttcacagcaacgcattctaattcatgaagattccatgaacctgctaagtctttatacctctccttctttgcccaacattaccttggggcttcccgcagtgccatcccagctcaatgcttcgaattcactcaaagaaaagcagaagtgtgagacgcagacgcttaggcaaggtgttcctctgcctgggcagtatggaggcagcatcccggcatcttccagccaccctcatgttactttagagggaaagccacccaacagcagccaccaggctctcctgcagcatttattattgaaagaacaaatgcgacagcaaaagcttcttgtagctggtggagttcccttacatcctcagtctcccttggcaacaaaagagagaatttcacctggcattagaggtacccacaaattgccccgtcacagacccctgaaccgaacccagtctgcacctttgcctcagagcacgttggctcagctggtcattcaacagcaacaccagcaattcttggagaagcagaagcaataccagcagcagatccacatgaacaaactgctttcgaaatctattgaacaactgaagcaaccaggcagtcaccttgaggaagcagaggaagagcttcagggggaccaggcgatgcaggaagacagagcgccctctagtggcaacagcactaggagcgacagcagtgcttgtgtggatgacacactgggacaagttggggctgtgaaggtcaaggaggaaccagtggacagtgatgaagatgctcagatccaggaaatggaatctggggagcaggctgcttttatgcaacaggtaataggcaaagatttagctccaggatttgtaattaaagtcattatctgaacatgaaatgcattgcaggtttggtaaatggatatgatttcctatcagtttatatttctctatgatttgagttcagtgtttaaggattctacctaatgcagatatatgtatatatctatatagaggtctttctatatactgatctctatatagatatcaatgtttcattgaaaatccactggtaaggaaatacctgttatactaaaattatgatacataatatctgagcagttaataggctttaaatttatcccaaagcctgctacaccaattacttctaaagaaaacaaattcactgttattttgagtttatgtgttgagatcagtgactgctggatagtctcccagtctgatcaatgaagcattcgattagtttttgattttttgcaacatctagaatttaattttcacatcactgtacataatgtatcatactatagtcttgaacactgttaaaggtagtctgccccttccttcctctctctttttttagttaagtagaaatgttctggtcaccatgccagtagtcctaggttattgtgtaggttgcaattgaacatattaggaatacaggtggttttaaatatatagatgcaaattgcagcactactttaaatattagattatgtctcacatagcactgctcattttacttttattttgtgtaatttgatgacactgtctatcaaaaaagagcaaatgaagcagatgcaaatgttagtgagaagtaatgtgcagcattatggtccaatcagatacaatattgtgtctacaattgcaaaaaacacagtaacaggatgaatattatctgatatcaagtcaaaatcagtttgaaaagaaggtgtatcatattttatattgtcactagaatctcttaagtataattccataatgacatgggcatataccgtaacattctggcaaataacaattagaaaagataggtttaacaaaaaaatttacttgtatataatgcaccttcaggaggactatgtcctttgatgctataaaatacaaacaactttgaaggcaacagaagacactgtttattcaagtcagttctttgtcaggttcctgctgttctcctacagaaaagtgattctgtgagggtgaacaggaaatgccttgtggaaacaggaagtccaagtgattcatgtactgaggaatgtaggaaaaaaaatctgaggatagtgctttactctttctgtttttaaagggcactctatgaattgatttattgtctaagaaaataacaccacaagtagggaaattgttacggaagcttttcactggaacatttccttcatattcccttttgatatgtttaccttgttttataggtttacttttgttaagctagttaaaggttcgttgtattaagacccctttaatatggataatccaaattgacctagaatctttgtgaggttttttctattaaaatatttatatttctaaatccgaggtatttcaaggtgtagtatcctatttcaaaggagatatagcagttttgccaaatgtagacattgttcaactgtatgttattggcacgtgttgtttacattttgctgtgacatttaaaaatatttctttaaaaatgttactgctaaagatacattatccttttttaaaaagtctccattcaaattaaattaacataactagaagttagaaagtttaaaagttttccacataatgaaagtccttctgataatttgacaaatagctataataggaacactccctatcaccaacatattttggttagtatattccttcatattaaaatgactttttgtcagttgttttgcattaaaaatatggcatgcctaagataaaattgtatattttttccatctcataaatattcattttcttcaaagtcttttttcaatctcataaaaaagggatagtgcatcttttaaaatacattttatttggggaggaacatgtggctgagcagacttttgtataatattacttcaaagatatgtaatcacaaacaaaaaaaactattttttataatgtcatttgagagagtttcatcagtacagttggtggacgttaattgtttgaatttgatagtctttgaatttaatcaagaaactacctggaaccagtgaaaaggaaagctggacttaaataatcttagaattaattgataaatgtctcttttaaaatctactgtatttattataatttacacccttgaaggtgatctcttgttttgtgttgtaaatatattgtttgtatgtttcccttcttgccttctgttataagtctcttcctttctcaaataaagttttttttaaaagaaaaaaccccaatccaccnccaacaaaaataaaaaaacccgcacgagcttcccggtgccctgagcttggcggcttgcattcgcccggggggagggaaggcaactcgaggataggca

SEQ ID NO: 74110 - DNA, 3095 bp, Homo sapiens
gccgctttcgccgcggtctcctcctctagcgcccgccgcggccggtaaatctcggctggaggagcagcggcggcccccgagtcaactttcattccctttttgcttctgcctcaccattctcttctcctcctcgaaagatggctgtttggagaagggggagaagttaagaggtcgccagcgcggagcgaaggagggcgcgatagcctcagcaggagcgggcggaggtttctcctctgccaacccctcctggaccattgtcagcagttgaacgacaaaggctgtgaatctgcatcctagtcttagcagtccctctgattctcatgatgagctcacctgcacagcctggagtacctggtaaaatgctgtggtgtatggagacagttatgagaaactggagggaggatgatagttgagatggggtggctggacgagagcagctcttggctcagcaaagaatgcacagtatgatcagctcagtggatgtgaagtcagaagttcctgtgggcctggagcccatctcacctttagacctaaggacagacctcaggatgatgatgcccgtggtggaccctgttgtccgtgagaagcaattgcagcaggaattacttcttatccagcagcagcaacaaatccagaagcagcttctgatagcagagtttcagaaacagcatgagaacttgacacggcagcaccaggctcagcttcaggagcatatcaaggaacttctagccataaaacagcaacaagaactcctagaaaaggagcagaaactggagcagcagaggcaagaacaggaagtagagaggcatcgcagagaacagcagcttcctcctctcagaggcaaagatagaggacgagaaagggcagtggcaagtacagaagtaaagcagaagcttcaagagttcctactgagtaaatcagcaacgaaagacactccaactaatggaaaaaatcattccgtgagccgccatcccaagctctggtacacggctgcccaccacacatcattggatcaaagctctccaccccttagtggaacatctccatcctacaagtacacattaccaggagcacaagatgcaaaggatgatttcccccttcgaaaaactgcctctgagcccaacttgaaggtgcggtccaggttaaaacagaaagtggcagagaggagaagcagccccttactcaggcggaaggatggaaatgttgtcacttcattcaagaagcgaatgtttgaggtgacagaatcctcagtcagtagcagttctccaggctctggtcccagttcaccaaacaatgggccaactggaagtgttactgaaaatgagacttcggttttgccccctacccctcatgccgagcaaatggtttcacagcaacgcattctaattcatgaagattccatgaacctgctaagtctttatacctctccttctttgcccaacattaccttggggcttcccgcagtgccatcccagctcaatgcttcgaattcactcaaagaaaagcagaagtgtgagacgcagacgcttaggcaaggtgttcctctgcctgggcagtatggaggcagcatcccggcatcttccagccaccctcatgttactttagagggaaagccacccaacagcagccaccaggctctcctgcagcatttattattgaaagaacaaatgcgacagcaaaagcttcttgtagctggtggagttcccttacatcctcagtctcccttggcaacaaaagagagaatttcacctggcattagaggtacccacaaattgccccgtcacagacccctgaaccgaacccagtctgcacctttgcctcagagcacgttggctcagctggtcattcaacagcaacaccagcaattcttggagaagcagaagcaataccagcagcagatccacatgaacaaactgctttcgaaatctattgaacaactgaagcaaccaggcagtcaccttgaggaagcagaggaagagcttcagggggaccaggcgatgcaggaagacagagcgccctctagtggcaacagcactaggagcgacagcagtgcttgtgtggatgacacactgggacaagttggggctgtgaaggtcaaggaggaaccagtggacagtgatgaagatgctcagatccaggaaatggaatctggggagcaggctgcttttatgcaacagcctttcctggaacccacgcacacacgtgcgctctctgtgcgccaagctccgctggctgcggttggcatggatggattagagaaacaccgtctcgtctccaggactcactcttcccctgctgcctctgttttacctcacccagcaatggaccgccccctccagcctggctctgcaactggaattgcctatgaccccttgatgctgaaacaccagtgcgtttgtggcaattccaccacccaccctgagcatgctggacgaatacagagtatctggtcacgactgcaagaaactgggctgctaaataaatgtgagcgaattcaaggtcgaaaagccagcctggaggaaatacagcttgttcattctgaacatcactcactgttgtatggcaccaaccccctggacggacagaagctggaccccaggatactcctaggtgatgactctcaaaagtttttttcctcattaccttgtggtggacttggggtggacagtgacaccatttggaatgagctacactcgtccggtgctgcacgcatggctgttggctgtgtcatcgagctggcttccaaagtggcctcaggagagctgaagaatgggtttgctgttgtgaggccccctggccatcacgctgaagaatccacagccatggggttctgcttttttaattcagttgcaattaccgccaaatacttgagagaccaactaaatataagcaagatattgattgtagatctggatgttcaccatggaaacggtacccagcaggccttttatgctgaccccagcatcctgtacatttcactccatcgctatgatgaagggaactttttccctggcagtggagccccaaatgaggttcggtttatttctttagagccccacttttatttgtatctttcaggtaattgcattgcatga

SEQ ID NO: 74111 - DNA, 3208 bp, Homo sapiens
  misc_feature (3111)..(3111): n is a, c, g, or t
ctcggtacccggcaagctatccggttcaatgcttcgaattcactcaaagaaaagcagaagtgtgagacgcagacgcttaggcaaggtgttcctctgcctgggcagtatggaggcagcatcccggcatcttccagccaccctcatgttactttagagggaaagccacccaacagcagccaccaggctctcctgcagcatttattattgaaagaacaaatgcgacagcaaaagcttcttgtagctggtggagttcccttacatcctcagtctcccttggcaacaaaagagagaatttcacctggcattagaggtacccacaaattgccccgtcacagacccctgaaccgaacccagtctgcacctttgcctcagagcacgttggctcagctggtcattcaacagcaacaccagcaattcttggagaagcagaagcaataccagcagcagatccacatgaacaaactgctttcgaaatctattgaacaactgaagcaaccaggcagtcaccttgaggaagcagaggaagagcttcagggggaccaggcgatgcaggaagacagagcgccctctagtggcaacagcactaggagcgacagcagtgcttgtgtggatgacacactgggacaagttggggctgtgaaggtcaaggaggaaccagtggacagtgatgaagatgctcagatccaggaaatggaatctggggagcaggctgcttttatgcaacaggtaataggcaaagatttagctccaggatttgtaattaaagtcattatctgaacatgaaatgcattgcaggtttggtaaatggatatgatttcctatcagtttatatttctctatgatttgagttcagtgtttaaggattctacctaatgcagatatatgtatatatctatatagaggtctttctatatactgatctctatatagatatcaatgtttcattgaaaatccactggtaaggaaatacctgttatactaaaattatgatacataatatctgagcagttaataggctttaaatttatcccaaagcctgctacaccaattacttctaaagaaaacaaattcactgttattttgagtttatgtgttgagatcagtgactgctggatagtctcccagtctgatcaatgaagcattcgattagtttttgattttttgcaacatctagaatttaattttcacatcactgtacataatgtatcatactatagtcttgaacactgttaaaggtagtctgccccttccttcctctctctttttttagttaagtagaaatgttctggtcaccatgccagtagtcctaggttattgtgtaggttgcaattgaacatattaggaatacaggtggttttaaatatatagatgcaaattgcagcactactttaaatattagattatgtctcacatagcactgctcattttacttttattttgtgtaatttgatgacactgtctatcaaaaaagagcaaatgaagcagatgcaaatgttagtgagaagtaatgtgcagcattatggtccaatcagatacaatattgtgtctacaattgcaaaaaacacagtaacaggatgaatattatctgatatcaagtcaaaatcagtttgaaaagaaggtgtatcatattttatattgtcactagaatctcttaagtataattccataatgacatgggcatataccgtaacattctggcaaataacaattagaaaagataggtttaacaaaaaaatttacttgtatataatgcaccttcaggaggactatgtcctttgatgctataaaatacaaacaactttgaaggcaacagaagacactgtttattcaagtcagttctttgtcaggttcctgctgttctcctacagaaaagtgattctgtgagggtgaacaggaaatgccttgtggaaacaggaagtccaagtgattcatgtactgaggaatgtaggaaaaaaaatctgaggatagtgctttactctttctgtttttaaagggcactctatgaattgatttattgtctaagaaaataacaccacaagtagggaaattgttacggaagcttttcactggaacatttccttcatattcccttttgatatgtttaccttgttttataggtttacttttgttaagctagttaaaggttcgttgtattaagacccctttaatatggataatccaaattgacctagaatctttgtgaggttttttctattaaaatatttatatttctaaatccgaggtatttcaaggtgtagtatcctatttcaaaggagatatagcagttttgccaaatgtagacattgttcaactgtatgttattggcacgtgttgtttacattttgctgtgacatttaaaaatatttctttaaaaatgttactgctaaagatacattatccttttttaaaaagtctccattcaaattaaattaacataactagaagttagaaagtttaaaagttttccacataatgaaagtccttctgataatttgacaaatagctataataggaacactccctatcaccaacatattttggttagtatattccttcatattaaaatgactttttgtcagttgttttgcattaaaaatatggcatgcctaagataaaattgtatattttttccatctcataaatattcattttcttcaaagtcttttttcaatctcataaaaaagggatagtgcatcttttaaaatacattttatttggggaggaacatgtggctgagcagacttttgtataatattacttcaaagatatgtaatcacaaacaaaaaaaactattttttataatgtcatttgagagagtttcatcagtacagttggtggacgttaattgtttgaatttgatagtctttgaatttaatcaagaaactacctggaaccagtgaaaaggaaagctggacttaaataatcttagaattaattgataaatgtctcttttaaaatctactgtatttattataatttacacccttgaaggtgatctcttgttttgtgttgtaaatatattgtttgtatgtttcccttcttgccttctgttataagtctcttcctttctcaaataaagttttttttaaaagaaaaaaccccaatccaccnccaacaaaaataaaaaaacccgcacgagcttcccggtgccctgagcttggcggcttgcattcgcccggggggagggaaggcaactcgaggataggca

SEQ ID NO: 74112 - DNA, 2942 bp, Homo sapiens
gtgggagaaccaggggaagactgtcagctacgattttctctagcctcaagaagactgagaccgagccaaactcctggccaacgtgctttgtggattcacagtgtagcttgagaaaaatgtggatgtgaagtcagaagttcctgtgggcctggagcccatctcacctttagacctaaggacagacctcaggatgatgatgcccgtggtggaccctgttgtccgtgagaagcaattgcagcaggaattacttcttatccagcagcagcaacaaatccagaagcagcttctgatagcagagtttcagaaacagcatgagaacttgacacggcagcaccaggctcagcttcaggagcatatcaaggaacttctagccataaaacagcaacaagaactcctagaaaaggagcagaaactggagcagcagaggcaagaacaggaagtagagaggcatcgcagagaacagcagcttcctcctctcagaggcaaagatagaggacgagaaagggcagtggcaagtacagaagtaaagcagaagcttcaagagttcctactgagtaaatcagcaacgaaagacactccaactaatggaaaaaatcattccgtgagccgccatcccaagctctggtacacggctgcccaccacacatcattggatcaaagctctccaccccttagtggaacatctccatcctacaagtacacattaccaggagcacaagatgcaaaggatgatttcccccttcgaaaaactgcctctgagcccaacttgaaggtgcggtccaggttaaaacagaaagtggcagagaggagaagcagccccttactcaggcggaaggatggaaatgttgtcacttcattcaagaagcgaatgtttgaggtgacagaatcctcagtcagtagcagttctccaggctctggtcccagttcaccaaacaatgggccaactggaagtgttactgaaaatgagacttcggttttgccccctacccctcatgccgagcaaatggtttcacagcaacgcattctaattcatgaagattccatgaacctgctaagtctttatacctctccttctttgcccaacattaccttggggcttcccgcagtgccatcccagctcaatgcttcgaattcactcaaagaaaagcagaagtgtgagacgcagacgcttaggcaaggtgttcctctgcctgggcagtatggaggcagcatcccggcatcttccagccaccctcatgttactttagagggaaagccacccaacagcagccaccaggctctcctgcagcatttattattgaaagaacaaatgcgacagcaaaagcttcttgtagctggtggagttcccttacatcctcagtctcccttggcaacaaaagagagaatttcacctggcattagaggtacccacaaattgccccgtcacagacccctgaaccgaacccagtctgcacctttgcctcagagcacgttggctcagctggtcattcaacagcaacaccagcaattcttggagaagcagaagcaataccagcagcagatccacatgaacaaacctttcctggaacccacgcacacacgtgcgctctctgtgcgccaagctccgctggctgcggttggcatggatggattagagaaacaccgtctcgtctccaggactcactcttcccctgctgcctctgttttacctcacccagcaatggaccgccccctccagcctggctctgcaactggaattgcctatgaccccttgatgctgaaacaccagtgcgtttgtggcaattccaccacccaccctgagcatgctggacgaatacagagtatctggtcacgactgcaagaaactgggctgctaaataaatgtgagcgaattcaaggtcgaaaagccagcctggaggaaatacagcttgttcattctgaacatcactcactgttgtatggcaccaaccccctggacggacagaagctggaccccaggatactcctaggtgatgactctcaaaagtttttttcctcattaccttgtggtggacttggggtggacagtgacaccatttggaatgagctacactcgtccggtgctgcacgcatggctgttggctgtgtcatcgagctggcttccaaagtggcctcaggagagctgaagaatgggtttgctgttgtgaggccccctggccatcacgctgaagaatccacagccatggggttctgcttttttaattcagttgcaattaccgccaaatacttgagagaccaactaaatataagcaagatattgattgtagatctggatgttcaccatggaaacggtacccagcaggccttttatgctgaccccagcatcctgtacatttcactccatcgctatgatgaagggaactttttccctggcagtggagccccaaatgaggttggaacaggccttggagaagggtacaatataaatattgcctggacaggtggccttgatcctcccatgggagatgttgagtaccttgaagcattcaggaccatcgtgaagcctgtggccaaagagtttgatccagacatggtcttagtatctgctggatttgatgcattggaaggccacacccctcctctaggagggtacaaagtgacggcaaaatgttttggtcatttgacgaagcaattgatgacattggctgatggacgtgtggtgttggctctagaaggaggacatgatctcacagccatctgtgatgcatcagaagcctgtgtaaatgcccttctaggaaatgagctggagccacttgcagaagatattctccaccaaagcccgaatatgaatgctgttatttctttacagaagatcattgaaattcaaagtatgtctttaaagttctcttaaaaattctaagcaggtaaaactaactaaaattatattgaaaattatagtacaaagaaacatttatttagagtta

SEQ ID NO: 74113 - DNA, 2724 bp, Homo sapiens
gtgggagaaccaggggaagactgtcagctacgattttctctagcctcaagaagactgagaccgagccaaactcctggccaacgtgctttgtggattcacagtgtagcttgagaaaaatgtggatgtgaagtcagaagttcctgtgggcctggagcccatctcacctttagacctaaggacagacctcaggatgatgatgcccgtggtggaccctgttgtccgtgagaagcaattgcagcaggaattacttcttatccagcagcagcaacaaatccagaagcagcttctgatagcagagtttcagaaacagcatgagaacttgacacggcagcaccaggctcagcttcaggagcatatcaaggaacttctagccataaaacagcaacaagaactcctagaaaaggagcagaaactggagcagcagaggcaagaacaggaagtagagaggcatcgcagagaacagcagcttcctcctctcagaggcaaagatagaggacgagaaagggcagtggcaagtacagaagtaaagcagaagcttcaagagttcctactgagtaaatcagcaacgaaagacactccaactaatggaaaaaatcattccgtgagccgccatcccaagctctggtacacggctgcccaccacacatcattggatcaaagctctccaccccttagtggaacatctccatcctacaagtacacattaccaggagcacaagatgcaaaggatgatttcccccttcgaaaaactgcctctgagcccaacttgaaggtgcggtccaggttaaaacagaaagtggcagagaggagaagcagccccttactcaggcggaaggatggaaatgttgtcacttcattcaagaagcgaatgtttgaggtgacagaatcctcagtcagtagcagttctccaggctctggtcccagttcaccaaacaatgggccaactggaagtgttactgaaaatgagacttcggttttgccccctacccctcatgccgagcaaatggtttcacagcaacgcattctaattcatgaagattccatgaacctgctaagtctttatacctctccttctttgcccaacattaccttggggcttcccgcagtgccatcccagctcaatgcttcgaattcactcaaagaaaagcagaagtgtgagacgcagacgcttaggcaaggtgttcctctgcctgggcagtatggaggcagcatcccggcatcttccagccaccctcatgttactttagagggaaagccacccaacagcagccaccaggctctcctgcagcatttattattgaaagaacaaatgcgacagcaaaagcttcttgtagctggtggagttcccttacatcctcagtctcccttggcaacaaaagagagaatttcacctggcattagaggtacccacaaattgccccgtcacagacccctgaaccgaacccagtctgcacctttgcctcagagcacgttggctcagctggtcattcaacagcaacaccagcaattcttggagaagcagaagcaataccagcagcagatccacatgaacaaacctttcctggaacccacgcacacacgtgcgctctctgtgcgccaagctccgctggctgcggttggcatggatggattagagaaacaccgtctcgtctccaggactcactcttcccctgctgcctctgttttacctcacccagcaatggaccgccccctccagcctggctctgcaactggaattgcctatgaccccttgatgctgaaacaccagtgcgtttgtggcaattccaccacccaccctgagcatgctggacgaatacagagtatctggtcacgactgcaagaaactgggctgctaaataaatgtgagcgaattcaaggtcgaaaagccagcctggaggaaatacagcttgttcattctgaacatcactcactgttgtatggcaccaaccccctggacggacagaagctggaccccaggatactcctaggtgatgactctcaaaagtttttttcctcattaccttgtggtggacttggggtggacagtgacaccatttggaatgagctacactcgtccggtgctgcacgcatggctgttggctgtgtcatcgagctggcttccaaagtggcctcaggagagctgaagaatgggtttgctgttgtgaggccccctggccatcacgctgaagaatccacagccatggggttctgcttttttaattcagttgcaattaccgccaaatacttgagagaccaactaaatataagcaagatattgattgtagatctggatgttcaccatggaaacggtacccagcaggccttttatgctgaccccagcatcctgtacatttcactccatcgctatgatgaagggaactttttccctggcagtggagccccaaatgaggttggaacaggccttggagaagggtacaatataaatattgcctggacaggtggccttgatcctcccatgggagatgttgagtaccttgaagcattcaggaccatcgtgaagcctgtggccaaagagtttgatccagacatggtcttagtatctgctggatttgatgcattggaaggccacacccctcctctaggagggtacaaagtgacggcaaaataaactcctgtgctggaggtacaacagtttggaagtatacttggggaaagagaaaacacaagatggaaggaagatctctcttttcacatcgggagcac

SEQ ID NO: 74114 - DNA, 1021 bp, Homo sapiens
gccgctttcgccgcggtctcctcctctagcgcccgccgcggccggtaaatctcggctggaggagcagcggcggcccccgagtcaactttcattccctttttgcttctgcctcaccattctcttctcctcctcgaaagatggctgtttggagaagggggagaagttaagaggtcgccagcgcggagcgaaggagggcgcgatagcctcagcaggagcgggcggaggtttctcctctgccaacccctcctggaccattgtcagcagttgaacgacaaaggctgtgaatctgcatcctagtcttagcagtccctctgattctcatgatgagctcacctgcacagcctgatatgacagctgcatagattcaacctactatgaaaagccaaaacatggaatattacactaattaaacggttacacaacagaacatggaatgtgcgacacttcatcttgggatgcaaatttttgtgctaaaaaaaactgagaaaaacaaaaagaaaaacatgtatttctgaggaacttgtttttatatctggcataaatgagaaaaagctaattaaaactattaattatcagaaaattgaagataaagttgaagagcctataccaaccaaagttgaataaatggcaaaatataatatagatgagttactctgaaataattttttatttcctactatctaacttaccaaacttcctgattttaattacataacaattttttggttattttaatattcatttggtacttatttccttttttattgttatagtattagatgaaatcataacatcaatttgctcctttgtaaaagaggatgttgagttagaagtgttctaaggtggctttcagcaataggctgccataccaattggaaaaatctagcatggtataaaagaatatttaagcagtaattatgactggaaaacatcagagtggaaatgaagtatggctgagaaacctttttgcttttagctttttttggagttcattacaataaaatgaaattatagaaactta

SEQ ID NO: 74115 - DNA, 1538 bp, Homo sapiens
taggaccctgtctcaaaaaaaaaaaaaaaagtttgatgctcattatgtttacaaaagcactgcattttttgaaaagtgtctcactgtgctattagctcatttcttgagatgtggttcttaggaaagagaagccttagtaacttagtttagagatggcttgggcactcgggagattttttcaatttcctgtggctatggagtgcaggagaatgatgccattaactaccagacccttgaggtcagcacagctctggcatcttcctgcaggcagaaccgtatactcctgaggatttgaatgctgtcctactgctgactcaaaggctaatcaatgcatgtgttaaactgcatggacatttagcagacatggtgatctgtatatagccatgccttatagtccacagtggagcatacatttcctgagagcgtaaatcagcattcgcctcctcctcctcctcttccttctcttctccctctctcctttctcgtcttcagtagttattgagcattcacctcagtgtcaggcaccatgagtactttcatgcatcatctcatttgatccctgcaacttcactagaatgtcagttccactgatgacagtgtattcagaattaattttctttaaggaaaacaaaaaggaatttcttgaggggctttctactgtccagtactcagtgaatatctgttgaattaatatactccaatcccatgagttagatatgattagtgatgagggacctgggattgagacattagtctaatgacactacattctagaccctgttgctaagcacttcttgtattgcatatcaactcatttactcctcacagcaatgtgagatacatactgtcctccctgttttataattgagggaactgaagcatagacaggttacatagctggtgactggcagatgaagtgacttatccgtggtcctgcaggtgatgagtggcagtactgtgctcttatcaccagctcttgagcgtgctgcatcctctcatttgtcgttggtctcccctagtgttcggtactgtgccttgcacgtgtttatactcagtagcttttgaatgaaagacagacttacattgcaaatacaacagatttccgtgtcttattagaaactgcttttcttgaattactacatgtaacttttaaatgaaagattggtgaatatttccagatgttgaaatacaaaaacaggtggctgaacttagaaaccaccaagtggcaggtgactttgcctgacatccgtgttcacagacctccacagcccctggtgaaaaccacttcttcatatcccatgtccgtctaattacatgtgttattttttgtcatttgcagagtcaacggttgcaggaaagtttgaagaaagtgaattacatcaaaatcttggtatagtatataatttcatctgttttcaaaatataactttttttgaacttcagcaacttagaatgattttagaactttagaatgattttctccacatttcagtggaattgtggcagctccagtaaaaaacaaaacaaaaaacaaaaac

SEQ ID NO: 74116 - DNA, 1177 bp, Homo sapiens
gaaaaatacgtaaatttatacctagaaaatatctgaaaggttatgtattaaactgttaacggggtggattggtggcttatagggtagggggctaggcattttcacttctaatacctgtgtttttttttgaggatttgttttacttgggtgtcacattcataatttttaatcctttaaggagaaaaatgtgcttattaaatttttggtctctgaatgctaccaagtcttagtcatacagaacaatatgctgcaactgtttacaattcctaaaactgtaaactcctcaaggacttggaggctaaacatgaagaatataaaattaagttgacaatcactgtctcctgcataacactgacttcacttctcttgagaaatgtgcatctgctaatccatatttattactttttaggggtgggtgaacccataaataagatactgttctttgaatgcctttagctggtgttatttaccagtaatgcttggagaaagaatccaaaattacccccactaaaatgctcacgacccagttgtttctgtgtttgtcaaagtgtttctggtatattctagaatataccaaagataattacttgaatcatttagaaaattttacattatatcctcttataaggcacttggaaattcaccctttttttttttcggcttggctttctaaatgtactttaacatcaatttataatattaagagttcctaaggagagagatttcttagaagaataatcgtggcttgtcttagagccacagcctttcacaatctgaagtgaatggtgcagagagctttcttgtcaagtcgtatgtttcttcctgcagctcggcttgcccttcccctgcttgtgccgtgtaccctgtaacactgtgtttggatcccagcatcagatggtgagttctacttttggtttgtaaaatcatgtgggattgtgtttggaaactgcctttcaagtgaagttctttttgctggcctccagataattagtaacttactgatgtattgcttggacccttgcattgtgtaatatatgcttctgttaatatgtgaatgtccatgaaggttggttggtatataggtcaggagcacctggcttttaaggagtcttgtaattactgtatcgcctgctttaagtagaaacatggcagctcaattaagcaccagaaatttctt

SEQ ID NO: 74117 - DNA, 682 bp, Homo sapiens
atactaggcacctcattttttaatgatttgttttggttccaggatgttgccttcctggagaaactgattaaagatgatatagagcgaggaagactgcccctgttgcttgtcgcaaatgcaggaacggcagcagtaggacacacagacaagattgggagattgaaagaactctgtgagcagtatggcatatggcttcatgtggagggtgtgaatctggcaacattggctctgggttatgtctcctcatcagtgctggctgcagccaaatgtgatagcatgacgatgactcctggcccgtggctgggtttgccagctgttcctgcggtgacactgtataaacacgatgaccctgccttgactttagttgctggtcttacatcaaataagcccacagacaaactccgtgccctgcctctgtggttatctttacaatacttgggacttgatgggtttgtggagaggatcaagcatgcctgtcaactgagtcaacggttgcaggaaagtttgaagaaagtgaattacatcaaaatcttggtatagtatataatttcatctgttttcaaaatataactttttttgaacttcagcaacttagaatgattttagaactttagaatgattttctccacatttcagtggaattgtggcagctccagtaaaaaacaaaacaaaaaacaaaaac

SEQ ID NO: 74118 - DNA, 759 bp, Homo sapiens
ctagcccacactaagtgggtagcaaatggtagctggttagttctattatgagattgcaatggctttgattaataaacctcttttggcttttttagactttagttgctggtcttacatcaaataagcccacagacaaactccgtgccctgcctctgtggttatctttacaatacttgggacttgatgggtttgtggagaggatcaagcatgcctgtcaactggtgagtagaagcctgacatttaaatgaaagactccttggccacagcagagacagaaaaacatctcatttctgtaccttccatccagagtggtgttgtctggattgactgtctcgtgagccagagactaatcgccctgcatgtaaatatttcttgttcaaagttctgggagaaagtgctgggttgtctgtcccagcatttgtgtgcagatgaaatcagatgaaaaggaacaccactgtcagcatgggatcagaaaagaagtcacagatgacttccaaggagtggagaagggtgcaaaaggtggaggggtggggagcgagtgttccccttgattgactgactacggtgagggaataggaaggttacaaggtggttatggagggcatggatattttaaaaaccagctggcttgggtttccaaattgcagggctcttggggacaattctaattctctctccattttaggtgtgttctaattgtgaaaaatatataattatgctatatttcagtgttttagagcattcagccttctataacaa

SEQ ID NO: 74119 - DNA, 1368 bp, Homo sapiens
gccgtgtacccaaggtcccttagcctctgagtagtggggaccacagcacataccaccacagccaggtaatttgtgtagtatttgtaaagacaggtctcactatgtgcctaggctggttttgcactcctggccgcaagcaatcctcctgtctcagcctcccatagcacagaagttacaggaatatgaaccacatctggccagcaccaagtattttgacaaagcacctattagggtaattccaagtaatctctggcaaacatggtttcagttaggcaagactacaagaaaccgcccacatctatttggtaaaaatctgtgctcccctttcctacttgagtagacacgctcacaaacagacacaaaggcagacccctccctctagtttttctaacataccagagccccctgcaaacacccgaggccctcaatgctgattttcactggaatctcatcacagttgggcttaagggacccttgggccaaggtcccttaagcccacagacaaactccgtgccctgcctctgtggttatctttacaatacttgggacttgatgggtttgtggagaggatcaagcatgcctgtcaactgagtcaacggttgcaggaaagtttgaagaaagtgaattacatcaaaatcttggtggaagatgagctcagctccccagtggtggtgttcagatttttccaggaattaccaggctcagatccggtgtttaaagccgtcccagtgcccaacatgacaccttcaggagtcggccgggagaggcactcgtgtgacgcgctgaatcgctggctgggagaacagctgaagcagctggtgcctgcaagcggcctcacagtcatggatctggaagctgagggcacgtgtttgcggttcagccctttgatgaccgcagcaggtatgatctcgtgaaaccttgagagaaactgaatgaggaatgaaactattgttcctgtttcacacagaagaaaactgaggttggcactcatgatgagcccctgttctcattctgcaaatggtgaagctctctatcgtcctgaccccacagttcctgtcccatgaccagggcccgctcaccaaggagctgcagcagcacgtaaagtcagtgacatgcccatgcgagtacctgaggaagacgatcctacacctgccacctccgatggatccactgcctctgtgcctgcctgtactgccgatgcttcagtggataactcagcatcccagccaaggcccaatgccactgaagatggacctgccccctggggacccaggagtcctaccactcagctgtccccaggagtgcccagaccctcattcttatccaggacctaggagccttacccctggccttccctcatcagccgta

SEQ ID NO: 74120 - DNA, 647 bp, Homo sapiens
gcctactactactactaaattcgcggccgcgtcgacaacagcccaatatctacaatcaaccaacaagtcattattaccctcactgtcaacccaacacaggcatgctcataaggaaaggttaaaaaaagtaaaaggaactcggcaaatcttaccccgcctgtttaccaaaaacatcacctctagcatcaccagtattagaggcaccgcccgcccctactaaaaatacaaaaaattagccaggcaccctgtccacagcccccacacagactcgaggggcccccatctcctgttctgaacccaacagggtggtcccactgtgggaccacaaccaggtatgactgtgtgagaagcaggctcactaccaggctaccagggagcacaggggagcaggcgccaccttgaggcataaacccagagaaacaagacctccaagacggccaggcactggggcacacgccggtaacacagcaccgtgggagctgagacggaaggatcgcctgagcccaggattttgaaaccaccctgggcaacacagtgagaccccgtatctacaaaaaaatacacattagccaggcatggtggcatgcgcctggggtcccaagtactcgggaggtagaggagagaaaaatcacttgagcccagagagg

SEQ ID NO: 74121 - DNA, 624 bp, Homo sapiens
cgggtctagaggagtccccatacatgctcgacattgctcaaataagaagctatatttcattgagttacatatgatattaaagcaatcctttttattttcagaaagacatttatattaatatatattttgtgaaatgaaggcatttattgaaattagatcccatagtttttatggtatcatgccttagagaggcgctggcagaaggactgaagagtgagtgtcgcatgtctttctgctgctgtgcttctgcttcctaagaattgctgtacttgtattcattaggtatttagttagttttctctttaattattttaaatttaatgttttgaaataagtaaaattgttctcttggttcaaaattcagacaataaaaaacgatatacaaagggaattttccttcctacctctatctccctaccgtgttttcttctctagagacagacattaccagtttcttgtgtattcttccagagagattttatatgtattatacaccagcaaaatgtctatgcccaccctctctaatacataattactacgcatatgctgtgcatcttgcattttttcacttatgtcttggagttcactgcatattaatgcacaggaactttctcctttgtcaga

SEQ ID NO: 74122 - DNA, 460 bp, Homo sapiens
atactaggcacctcattttttaatgatttgttttggttccaggatgttgccttcctggagaaactgattaaagatgatatagagcgaggaagactgcccctgttgcttgtcgcaaatgcaggtaggtagcatgatgctgaatctaccattttgaatatataggagcgaggctacatcctcagcctataaaagataaagtcttaagaaatgtgtgtgtaccacatgtttaattaagatagtccatgtccacattgtagcaaaaactgtaatagtaaggttggctcgttagatttttctttaatcgttggtttgttttggaagttattttatgtgtgtgtatactttttcatttagattgtaaatgcttctctatcttctccttcatgtacttcttttccctgttctaaactgaattttattttatttttttgagacagagtctcactctgttgcccaggct

SEQ ID NO: 74123 - DNA, 324 bp, Homo sapiens
aagggacagggcatcgtctgtggggatagtgggggtagtgggggtagtggtcagccagacttggtgactctacttgctcaccagacgatcctacacctgccacctccgatggatccactgcctctgtgcctgcctgtactgccgatgcttcagtggataactcagcatcccagccaaggcccaatgccactgaagatggacctgccccctggggacccaggagtcctaccactcagctgtccccaggagtgcccagacccccacagagagagcgtcccccacagagagagcgtccccacagaagagcgtcaccccacagagaga

SEQ ID NO: 74124 - DNA, 302 bp, Homo sapiens
ttggtgatatgagacttccattcttccaggtggaagatgagctcagctccccagtggtggtgttcagatttttccaggaattaccaggctcaggtgggtgaattttaaaagagggttattttcatatctgtgttaaaggctttgaatttgataccatttcaatttaaatatttcaaaatatttttattgctgacaatcttcagtcagcatttcagaaaaatgtaataattttcatgaaaacttcagtccgaaatgccttagcaatttgctgatagtttgcggtgattaaaccaggggttccc

SEQ ID NO: 74125 - DNA, 3986 bp, Homo sapiens
  misc_feature (2747)..(2747): n is a, c, g, or t
agcggagcgctacggggccccgccccgccgcctctcaaccatcaggttcggcagccggcggcgccgcctggcagctcctcctcttctccgccccgccggccgcgggcgcgggggacgtcagcgctgccagcgtggaaggagctgcggggcgcgggaggaggaagtagagcccgggaccgccaggccaccaccggccgcctcagccatggacgcgtccctggagaagatagcagaccccacgttagctgaaatgggaaaaaacttgaaggaggcagtgaagatgctggaggacagtcagagaagaacagaagaggaaaatggaaagaagctcatatccggagatattccaggcccactccagggcagtgggcaagatatggtgagcatcctccagttagttcagaatctcatgcatggagatgaagatgaggagccccagagccccagaatccaaaatattggagaacaaggtcatatggctttgttgggacatagtctgggagcttatatttcaactctggacaaagagaagctgagaaaacttacaactaggatactttcagataccaccttatggctatgcagaattttcagatatgaaaatgggtgtgcttatttccacgaagaggaaagagaaggacttgcaaagatatgtaggcttgccattcattctcgatatgaagacttcgtagtggatggcttcaatgtgttatataacaagaagcctgtcatatatcttagtgctgctgctagacctggcctgggccaatacctttgtaatcagctcggcttgcccttcccctgcttgtgccgtgtaccctgtaacactgtgtttggatcccagcatcagatggatgttgccttcctggagaaactgattaaagatgatatagagcgaggaagactgcccctgttgcttgtcgcaaatgcaggaacggcagcagtaggacacacagacaagattgggagattgaaagaactctgtgagcagtatggcatatggcttcatgtggagggtgtgaatctggcaacattggctctgggttatgtctcctcatcagtgctggctgcagccaaatgtgatagcatgacgatgactcctggcccgtggctgggtttgccagctgttcctgcggtgacactgtataaacacgatgaccctgccttgactttagttgctggtcttacatcaaataagcccacagacaaactccgtgccctgcctctgtggttatctttacaatacttgggacttgatgggtttgtggagaggatcaagcatgcctgtcaactgagtcaacggttgcaggaaagtttgaagaaagtgaattacatcaaaatcttggtggaagatgagctcagctccccagtggtggtgttcagatttttccaggaattaccaggctcagatccggtgtttaaagccgtcccagtgcccaacatgacaccttcaggagtcggccgggagaggcactcgtgtgacgcgctgaatcgctggctgggagaacagctgaagcagctggtgcctgcaagcggcctcacagtcatggatctggaagctgagggcacgtgtttgcggttcagccctttgatgaccgcagcagttttaggaactcggggagaggatgtggatcagctcgtagcctgcatagaaagcaaactgccagtgctgtgctgtacgctccagttgcgtgaagagttcaagcaggaagtggaagcaacagcaggtctcctatatgttgatgaccctaactggtctggaataggggttgtcaggtatgaacatgctaatgatgataagagcagtttgaaatcagatcccgaaggggaaaacatccatgctggactcctgaagaagttaaatgaactggaatctgacctaacctttaaaataggccctgagtataagagcatgaagagctgcctttatgtcggcatggcgagcgacaacgtcgatgctgctgagctcgtggagaccattgcggccacagcccgggagatagaggagaactcgaggcttctggaaaacatgacagaagtggttcggaaaggcattcaggaagctcaagtggagctgcagaaggcaagtgaagaacggcttctggaagagggggtgttgcggcagatccctgtagtgggctccgtgctgaattggttttctccggtccaggctttacagaagggaagaacttttaacttgacagcaggctctctggagtccacagaacccatatatgtctacaaagcacaaggtgcaggagtcacgctgcctccaacgccctcgggcagtcgcaccaagcagaggcttccaggccagaagccttttaaaaggtccctgcgaggttcagatgctttgagtgagaccagctcagtcagtcacattgaagacttagaaaaggtggagcgcctatccagtgggccggagcagatcaccctcgaggccagcagcactgagggacacccaggggctcccagccctcagcacaccgaccagaccgaggccttccagaaaggggtcccacacccagaagatgaccactcacaggtagaaggaccggagagcttaagatgagactcattgtgtggtttgagactgtactgagtattgtttcagggaagatgaagttctattggaaatgtgaactgtgccacatactaatataaattactgttgtttgtgcttcactgggattttggcacaaatatgtgcctgaaaggtaggctttctaggaggggagtcagcttgnctaacttcatgtacatgtagaaccacgtttgctgtcctactacgacttttccctaagttaccataaacacattttattcacaaaaaacacttcgaatttcaagtgtctaccagtagcacccttgctctttctaaacataagcctaagtatatgaggttgcccgtggcaactttttggtaaaacagcttttcattagcactctccaggttctctgcaacacttcacagaggcgagactggctgtatcctttgctgtcggtctttagtacgatcaagttgcaatatacagtgggactgctagacttgaaggagagcagtgattgtgggattgtaaataagagcatcagaagccctccccagctactgctcttcgtggagacttagtaaggactgtgtctacttgagctgtggcaaggctgctgtctgggactgtcctctgccacaaggccatttctcccattatataccgtttgtaaagagaaactgtaaagtctcctcctgaccatatatttttaaatactggcaaagcttttaaaattggcacacaagtacagactgtgctcatttctgtttagtatctgaaaacctgatagatgctacccttaagagcttgctcttccgtgtgctacgtagcacccacctggttaaaatctgaaaacaagtacccctttgacctgtctcccactgaagcttctactgccctggcagctcgcctgggcccaactcagaaacaggagccagcagagcactctctcacgctgatccagccgggcaccctgcttaagtcagtagaagctcgctggcactgcccgttcctacttttccgaagtactgcgtcactttgtcgtaagtaatggcccctgtgccttcttaatccagcagtcaagcttttgggagacctgaaaatgggaaaattcacactgggtttctggactgtagtattggaagccttagttatagtatattaagcctataattatactctgatttgatgggatttttgacatttacacttgtcaaaatgcagggggttttttttggtgcagatgattaaacagtcttccctatttggtgcaatgaagtatagcagataaaatgggggaggggtaaattatcaccttcaagaaaattacatgtttttatatatatttggaattgttaaattggttttgctgaaacatttcacccttgagatattatttgaatgttggtttcaataaaggttcttgaaattgttaaa

SEQ ID NO: 74126 - DNA, 3996 bp, Homo sapiens
  misc_feature (2757)..(2757): n is a, c, g, or t
ctggtacgcctccggattacgggatggggcccgcccgccgcctctcaaccatcaggttcggcagccggcggcgccgcctggcagctcctcctcttctccgccccgccggccgcgggcgcgggggacgtcagcgctgccagcgtggaaggagctgcggggcgcgggaggaggaagtagagcccgggaccgccaggccaccaccggccgcctcagccatggacgcgtccctggagaagatagcagaccccacgttagctgaaatgggaaaaaacttgaaggaggcagtgaagatgctggaggacagtcagagaagaacagaagaggaaaatggaaagaagctcatatccggagatattccaggcccactccagggcagtgggcaagatatggtgagcatcctccagttagttcagaatctcatgcatggagatgaagatgaggagccccagagccccagaatccaaaatattggagaacaaggtcatatggctttgttgggacatagtctgggagcttatatttcaactctggacaaagagaagctgagaaaacttacaactaggatactttcagataccaccttatggctatgcagaattttcagatatgaaaatgggtgtgcttatttccacgaagaggaaagagaaggacttgcaaagatatgtaggcttgccattcattctcgatatgaagacttcgtagtggatggcttcaatgtgttatataacaagaagcctgtcatatatcttagtgctgctgctagacctggcctgggccaatacctttgtaatcagctcggcttgcccttcccctgcttgtgccgtgtaccctgtaacactgtgtttggatcccagcatcagatggatgttgccttcctggagaaactgattaaagatgatatagagcgaggaagactgcccctgttgcttgtcgcaaatgcaggaacggcagcagtaggacacacagacaagattgggagattgaaagaactctgtgagcagtatggcatatggcttcatgtggagggtgtgaatctggcaacattggctctgggttatgtctcctcatcagtgctggctgcagccaaatgtgatagcatgacgatgactcctggcccgtggctgggtttgccagctgttcctgcggtgacactgtataaacacgatgaccctgccttgactttagttgctggtcttacatcaaataagcccacagacaaactccgtgccctgcctctgtggttatctttacaatacttgggacttgatgggtttgtggagaggatcaagcatgcctgtcaactgagtcaacggttgcaggaaagtttgaagaaagtgaattacatcaaaatcttggtggaagatgagctcagctccccagtggtggtgttcagatttttccaggaattaccaggctcagatccggtgtttaaagccgtcccagtgcccaacatgacaccttcaggagtcggccgggagaggcactcgtgtgacgcgctgaatcgctggctgggagaacagctgaagcagctggtgcctgcaagcggcctcacagtcatggatctggaagctgagggcacgtgtttgcggttcagccctttgatgaccgcagcagttttaggaactcggggagaggatgtggatcagctcgtagcctgcatagaaagcaaactgccagtgctgtgctgtacgctccagttgcgtgaagagttcaagcaggaagtggaagcaacagcaggtctcctatatgttgatgaccctaactggtctggaataggggttgtcaggtatgaacatgctaatgatgataagagcagtttgaaatcagatcccgaaggggaaaacatccatgctggactcctgaagaagttaaatgaactggaatctgacctaacctttaaaataggccctgagtataagagcatgaagagctgcctttatgtcggcatggcgagcgacaacgtcgatgctgctgagctcgtggagaccattgcggccacagcccgggagatagaggagaactcgaggcttctggaaaacatgacagaagtggttcggaaaggcattcaggaagctcaagtggagctgcagaaggcaagtgaagaacggcttctggaagagggggtgttgcggcagatccctgtagtgggctccgtgctgaattggttttctccggtccaggctttacagaagggaagaacttttaacttgacagcaggctctctggagtccacagaacccatatatgtctacaaagcacaaggtgcaggagtcacgctgcctccaacgccctcgggcagtcgcaccaagcagaggcttccaggccagaagccttttaaaaggtccctgcgaggttcagatgctttgagtgagaccagctcagtcagtcacattgaagacttagaaaaggtggagcgcctatccagtgggccggagcagatcaccctcgaggccagcagcactgagggacacccaggggctcccagccctcagcacaccgaccagaccgaggccttccagaaaggggtcccacacccagaagatgaccactcacaggtagaaggaccggagagcttaagatgagactcattgtgtggtttgagactgtactgagtattgtttcagggaagatgaagttctattggaaatgtgaactgtgccacatactaatataaattactgttgtttgtgcttcactgggattttggcacaaatatgtgcctgaaaggtaggctttctaggaggggagtcagcttgnctaacttcatgtacatgtagaaccacgtttgctgtcctactacgacttttccctaagttaccataaacacattttattcacaaaaaacacttcgaatttcaagtgtctaccagtagcacccttgctctttctaaacataagcctaagtatatgaggttgcccgtggcaactttttggtaaaacagcttttcattagcactctccaggttctctgcaacacttcacagaggcgagactggctgtatcctttgctgtcggtctttagtacgatcaagttgcaatatacagtgggactgctagacttgaaggagagcagtgattgtgggattgtaaataagagcatcagaagccctccccagctactgctcttcgtggagacttagtaaggactgtgtctacttgagctgtggcaaggctgctgtctgggactgtcctctgccacaaggccatttctcccattatataccgtttgtaaagagaaactgtaaagtctcctcctgaccatatatttttaaatactggcaaagcttttaaaattggcacacaagtacagactgtgctcatttctgtttagtatctgaaaacctgatagatgctacccttaagagcttgctcttccgtgtgctacgtagcacccacctggttaaaatctgaaaacaagtacccctttgacctgtctcccactgaagcttctactgccctggcagctcgcctgggcccaactcagaaacaggagccagcagagcactctctcacgctgatccagccgggcaccctgcttaagtcagtagaagctcgctggcactgcccgttcctacttttccgaagtactgcgtcactttgtcgtaagtaatggcccctgtgccttcttaatccagcagtcaagcttttgggagacctgaaaatgggaaaattcacactgggtttctggactgtagtattggaagccttagttatagtatattaagcctataattatactctgatttgatgggatttttgacatttacacttgtcaaaatgcagggggttttttttggtgcagatgattaaacagtcttccctatttggtgcaatgaagtatagcagataaaatgggggaggggtaaattatcaccttcaagaaaattacatgtttttatatatatttggaattgttaaattggttttgctgaaacatttcacccttgagatattatttgaatgttggtttcaataaaggttcttgaaattgttaaa

SEQ ID NO: 74127 - DNA, 5044 bp, Homo sapiens
  misc_feature (3805)..(3805): n is a, c, g, or t
agcggagcgctacggggccccgccccgccgcctctcaaccatcaggttcggcagccggcggcgccgcctggcagctcctcctcttctccgccccgccggccgcgggcgcgggggacgtcagcgctgccagcgtggaaggagctgcggggcgcgggaggaggaagtagagcccgggaccgccaggccaccaccggccgcctcagccatggacgcgtccctggagaagatagcagaccccacgttagctgaaatgggaaaaaacttgaaggaggcagtgaagatgctggaggacagtcagagaagaacagaagaggaaaatggaaagaagctcatatccggagatattccaggcccactccagggcagtgggcaagatatggtgagcatcctccagttagttcagaatctcatgcatggagatgaagatgaggagccccagagccccagaatccaaaatattggagaacaaggtcatatggctttgttgggacatagtctgggagcttatatttcaactctggacaaagagaagctgagaaaacttacaactaggatactttcagataccaccttatggctatgcagaattttcagatatgaaaatgggtgtgcttatttccacgaagaggaaagagaaggacttgcaaagatatgtaggcttgccattcattctcgatatgaagacttcgtagtggatggcttcaatgtgttatataacaagaagcctgtcatatatcttagtgctgctgctagacctggcctgggccaatacctttgtaatcagctcggcttgcccttcccctgcttgtgccgtgtaccctgtaacactgtgtttggatcccagcatcagatggatgttgccttcctggagaaactgattaaagatgatatagagcgaggaagactgcccctgttgcttgtcgcaaatgcaggaacggcagcagtaggacacacagacaagattgggagattgaaagaactctgtgagcagtatggcatatggcttcatgtggaggggtaagctggcggtgaggctggtggctccattcgggcctgcacagagtccttatgaggactggacatccaggctctcactttggtgacatttatcacgaagggctctttgggtcacagatcacaaaataacccaaattggcttaagcccaaagagatcttactggctcacataactacaaagagcagtgttatgactgcctcaggcacgacatcaaccaggatccagtgtgttactcccacctctgctcccccagtcacaggcactgggcttggtttcctctatctgtggacagatcttcctgttacagtgcaaagtagctgcagaaactccagccttctttccagcttcgtggtcagctggaagtcctaacagaagtctcgtattgaaccagccactgtggccagggagaagtaatcctctgatagttgaggttctttgctctcctctggagcagatagtggtgtctcctccccacaaagctcatgttctgctggaagaaatggagatggcgccctggaaggctattgtagggccattaagagaagcagggggaacggacgtgggcagccagagtagcccatatccaccacatcatacagggaggtttctttttgatccctaagtaaagaatgataactggaaaataagatccatgaaagagaataatactcccattatattaaatgagcggggatagttcctgagacacatttttattaaagtgcattttcaggattttccttcatatgtataaagcacaccttctgttgctgttaatgaaagctaataacattaaaaatatacttaagtgtcaacttgcaacagcacagcctttatttttttaagtacatggtgagtaagcaacattaaataattagttcttggactggtgttttttcttccagtgtgaatctggcaacattggctctgggttatgtctcctcatcagtgctggtatgttgttgatttactgaatattggtgtttttaagaatgaatttaaaatcactcaatccctcctggctcttcacagtttttatgaatggaggagggtgttaggtttgtgtattctgataatctaacaaagagttgttcttgttttggtaggctgcagccaaatgtgatagcatgacgatgactcctggcccgtggctgggtttgccagctgttcctgcggtgacactgtataaacacgatgaccctgccttgactttagttgctggtcttacatcaaataagcccacagacaaactccgtgccctgcctctgtggttatctttacaatacttgggacttgatgggtttgtggagaggatcaagcatgcctgtcaactgagtcaacggttgcaggaaagtttgaagaaagtgaattacatcaaaatcttggtggaagatgagctcagctccccagtggtggtgttcagatttttccaggaattaccaggctcagatccggtgtttaaagccgtcccagtgcccaacatgacaccttcaggagtcggccgggagaggcactcgtgtgacgcgctgaatcgctggctgggagaacagctgaagcagctggtgcctgcaagcggcctcacagtcatggatctggaagctgagggcacgtgtttgcggttcagccctttgatgaccgcagcagttttaggaactcggggagaggatgtggatcagctcgtagcctgcatagaaagcaaactgccagtgctgtgctgtacgctccagttgcgtgaagagttcaagcaggaagtggaagcaacagcaggtctcctatatgttgatgaccctaactggtctggaataggggttgtcaggtatgaacatgctaatgatgataagagcagtttgaaatcagatcccgaaggggaaaacatccatgctggactcctgaagaagttaaatgaactggaatctgacctaacctttaaaataggccctgagtataagagcatgaagagctgcctttatgtcggcatggcgagcgacaacgtcgatgctgctgagctcgtggagaccattgcggccacagcccgggagatagaggagaactcgaggcttctggaaaacatgacagaagtggttcggaaaggcattcaggaagctcaagtggagctgcagaaggcaagtgaagaacggcttctggaagagggggtgttgcggcagatccctgtagtgggctccgtgctgaattggttttctccggtccaggctttacagaagggaagaacttttaacttgacagcaggctctctggagtccacagaacccatatatgtctacaaagcacaaggtgcaggagtcacgctgcctccaacgccctcgggcagtcgcaccaagcagaggcttccaggccagaagccttttaaaaggtccctgcgaggttcagatgctttgagtgagaccagctcagtcagtcacattgaagacttagaaaaggtggagcgcctatccagtgggccggagcagatcaccctcgaggccagcagcactgagggacacccaggggctcccagccctcagcacaccgaccagaccgaggccttccagaaaggggtcccacacccagaagatgaccactcacaggtagaaggaccggagagcttaagatgagactcattgtgtggtttgagactgtactgagtattgtttcagggaagatgaagttctattggaaatgtgaactgtgccacatactaatataaattactgttgtttgtgcttcactgggattttggcacaaatatgtgcctgaaaggtaggctttctaggaggggagtcagcttgnctaacttcatgtacatgtagaaccacgtttgctgtcctactacgacttttccctaagttaccataaacacattttattcacaaaaaacacttcgaatttcaagtgtctaccagtagcacccttgctctttctaaacataagcctaagtatatgaggttgcccgtggcaactttttggtaaaacagcttttcattagcactctccaggttctctgcaacacttcacagaggcgagactggctgtatcctttgctgtcggtctttagtacgatcaagttgcaatatacagtgggactgctagacttgaaggagagcagtgattgtgggattgtaaataagagcatcagaagccctccccagctactgctcttcgtggagacttagtaaggactgtgtctacttgagctgtggcaaggctgctgtctgggactgtcctctgccacaaggccatttctcccattatataccgtttgtaaagagaaactgtaaagtctcctcctgaccatatatttttaaatactggcaaagcttttaaaattggcacacaagtacagactgtgctcatttctgtttagtatctgaaaacctgatagatgctacccttaagagcttgctcttccgtgtgctacgtagcacccacctggttaaaatctgaaaacaagtacccctttgacctgtctcccactgaagcttctactgccctggcagctcgcctgggcccaactcagaaacaggagccagcagagcactctctcacgctgatccagccgggcaccctgcttaagtcagtagaagctcgctggcactgcccgttcctacttttccgaagtactgcgtcactttgtcgtaagtaatggcccctgtgccttcttaatccagcagtcaagcttttgggagacctgaaaatgggaaaattcacactgggtttctggactgtagtattggaagccttagttatagtatattaagcctataattatactctgatttgatgggatttttgacatttacacttgtcaaaatgcagggggttttttttggtgcagatgattaaacagtcttccctatttggtgcaatgaagtatagcagataaaatgggggaggggtaaattatcaccttcaagaaaattacatgtttttatatatatttggaattgttaaattggttttgctgaaacatttcacccttgagatattatttgaatgttggtttcaataaaggttcttgaaattgttaaa

SEQ ID NO: 74128 - DNA, 2762 bp, Homo sapiens
agcggagcgctacggggccccgccccgccgcctctcaaccatcaggttcggcagccggcggcgccgcctggcagctcctcctcttctccgccccgccggccgcgggcgcgggggacgtcagcgctgccagcgtggaaggagctgcggggcgcgggaggaggaagtagagcccgggaccgccaggccaccaccggccgcctcagccatggacgcgtccctggagaagatagcagaccccacgttagctgaaatgggaaaaaacttgaaggaggcagtgaagatgctggaggacagtcagagaagaacagaagaggaaaatggaaagaagctcatatccggagatattccaggcccactccagggcagtgggcaagatatggtgagcatcctccagttagttcagaatctcatgcatggagatgaagatgaggagccccagagccccagaatccaaaatattggagaacaaggtcatatggctttgttgggacatagtctgggagcttatatttcaactctggacaaagagaagctgagaaaacttacaactaggatactttcagataccaccttatggctatgcagaattttcagatatgaaaatgggtgtgcttatttccacgaagaggaaagagaaggacttgcaaagatatgtaggcttgccattcattctcgatatgaagacttcgtagtggatggcttcaatgtgttatataacaagaagcctgtcatatatcttagtgctgctgctagacctggcctgggccaatacctttgtaatcagctcggcttgcccttcccctgcttgtgccgtgtaccctgtaacactgtgtttggatcccagcatcagatggatgttgccttcctggagaaactgattaaagatgatatagagcgaggaagactgcccctgttgcttgtcgcaaatgcaggaacggcagcagtaggacacacagacaagattgggagattgaaagaactctgtgagcagtatggcatatggcttcatgtggagggtgtgaatctggcaacattggctctgggttatgtctcctcatcagtgctggctgcagccaaatgtgatagcatgacgatgactcctggcccgtggctgggtttgccagctgttcctgcggtgacactgtataaacacgatgaccctgccttgactttagttgctggtcttacatcaaataagcccacagacaaactccgtgccctgcctctgtggttatctttacaatacttgggacttgatgggtttgtggagaggatcaagcatgcctgtcaactgagtcaacggttgcaggaaagtttgaagaaagtgaattacatcaaaatcttggtggaagatgagctcagctccccagtggtggtgttcagatttttccaggaattaccaggctcagatccggtgtttaaagccgtcccagtgcccaacatgacaccttcaggagtcggccgggagaggcactcgtgtgacgcgctgaatcgctggctgggagaacagctgaagcagctggtgcctgcaagcggcctcacagtcatggatctggaagctgagggcacgtgtttgcggttcagccctttgatgaccgcagcaggtatgatctcgtgaaaccttgagagaaactgaatgaggaatgaaactattgttcctgtttcacacagaagaaaactgaggttggcactcatgatgagcccctgttctcattctgcaaatggtgaagctctctatcgtcctgaccccacagttcctgtcccatgaccagggcccgctcaccaaggagctgcagcagcacgtaaagtcagtgacatgcccatgcgagtacctgaggaaggttatcaatactctggctgaccatcgtcatcgtgagactgactttggtggaagtccttggataattatcattattgtgtttctgggacgttacaaatttaccattctcttctgcacaatttacctttgtgtgcctttcctgaagactatcttctggtctcgaaatggacatgatagatccagggatgtacagcagagagctaggaggtccaaccgccgtagacaggaaggaattaaaattggcctggaagacatctgtactttatggaaacaggcggaaacaaaagttcaagctaaaatccgtaagatgaaggtcacaaagaaagtcaaccatcattacaaaatcaatggaaagaggaagaccgccaaagaacagaaaatgtttcaacgtgcgcaagagttgcggtggcgggcagaggactaccacaaatgcaaaatcaccccctctgcaagaaagcctctttgcaactgggtcagaatggcggcagcggagcatcgtcattcttcaggattgccctgctggccctacctcacagctgaaactttaaaaaacaggatgggccgccagccacctcctccaactcaacaacattctataactgataactccctgagcctcaagacacctcccgaatgtcttcttattccccttccaccctctcctcttccaccctccgtggatgataatctcaagactcctcccttagctactcaggaggccgaggcagaaaaatcactgaaacccaagaggcagaggttgagtaagctgagaacaggtcattgcactcaagcctgggcaataagaagaaatctgtgagtggaacaaaagaaaaaaatcaaaaaacaaaacaaaacccacactccaaaaacaaactaacaaagaataaataaataatataaaaataaaataaatactgcagtc

SEQ ID NO: 74129 - DNA, 3940 bp, Homo sapiens
  misc_feature (2701)..(2701): n is a, c, g, or t
agaggccagggacgcctctaaacatcctacgttgcacaggacagccccccacgctggagaattctctggcccaaaatgtcagcagtgttggggctgagaaatcctggtcaagatcatgtttataacaccagcagttgagtacaaaatgatgcaaagtggtgttatcaatttcctaagaagatagcagaccccacgttagctgaaatgggaaaaaacttgaaggaggcagtgaagatgctggaggacagtcagagaagaacagaagaggaaaatggaaagaagctcatatccggagatattccaggcccactccagggcagtgggcaagatatggtgagcatcctccagttagttcagaatctcatgcatggagatgaagatgaggagccccagagccccagaatccaaaatattggagaacaaggtcatatggctttgttgggacatagtctgggagcttatatttcaactctggacaaagagaagctgagaaaacttacaactaggatactttcagataccaccttatggctatgcagaattttcagatatgaaaatgggtgtgcttatttccacgaagaggaaagagaaggacttgcaaagatatgtaggcttgccattcattctcgatatgaagacttcgtagtggatggcttcaatgtgttatataacaagaagcctgtcatatatcttagtgctgctgctagacctggcctgggccaatacctttgtaatcagctcggcttgcccttcccctgcttgtgccgtgtaccctgtaacactgtgtttggatcccagcatcagatggatgttgccttcctggagaaactgattaaagatgatatagagcgaggaagactgcccctgttgcttgtcgcaaatgcaggaacggcagcagtaggacacacagacaagattgggagattgaaagaactctgtgagcagtatggcatatggcttcatgtggagggtgtgaatctggcaacattggctctgggttatgtctcctcatcagtgctggctgcagccaaatgtgatagcatgacgatgactcctggcccgtggctgggtttgccagctgttcctgcggtgacactgtataaacacgatgaccctgccttgactttagttgctggtcttacatcaaataagcccacagacaaactccgtgccctgcctctgtggttatctttacaatacttgggacttgatgggtttgtggagaggatcaagcatgcctgtcaactgagtcaacggttgcaggaaagtttgaagaaagtgaattacatcaaaatcttggtggaagatgagctcagctccccagtggtggtgttcagatttttccaggaattaccaggctcagatccggtgtttaaagccgtcccagtgcccaacatgacaccttcaggagtcggccgggagaggcactcgtgtgacgcgctgaatcgctggctgggagaacagctgaagcagctggtgcctgcaagcggcctcacagtcatggatctggaagctgagggcacgtgtttgcggttcagccctttgatgaccgcagcagttttaggaactcggggagaggatgtggatcagctcgtagcctgcatagaaagcaaactgccagtgctgtgctgtacgctccagttgcgtgaagagttcaagcaggaagtggaagcaacagcaggtctcctatatgttgatgaccctaactggtctggaataggggttgtcaggtatgaacatgctaatgatgataagagcagtttgaaatcagatcccgaaggggaaaacatccatgctggactcctgaagaagttaaatgaactggaatctgacctaacctttaaaataggccctgagtataagagcatgaagagctgcctttatgtcggcatggcgagcgacaacgtcgatgctgctgagctcgtggagaccattgcggccacagcccgggagatagaggagaactcgaggcttctggaaaacatgacagaagtggttcggaaaggcattcaggaagctcaagtggagctgcagaaggcaagtgaagaacggcttctggaagagggggtgttgcggcagatccctgtagtgggctccgtgctgaattggttttctccggtccaggctttacagaagggaagaacttttaacttgacagcaggctctctggagtccacagaacccatatatgtctacaaagcacaaggtgcaggagtcacgctgcctccaacgccctcgggcagtcgcaccaagcagaggcttccaggccagaagccttttaaaaggtccctgcgaggttcagatgctttgagtgagaccagctcagtcagtcacattgaagacttagaaaaggtggagcgcctatccagtgggccggagcagatcaccctcgaggccagcagcactgagggacacccaggggctcccagccctcagcacaccgaccagaccgaggccttccagaaaggggtcccacacccagaagatgaccactcacaggtagaaggaccggagagcttaagatgagactcattgtgtggtttgagactgtactgagtattgtttcagggaagatgaagttctattggaaatgtgaactgtgccacatactaatataaattactgttgtttgtgcttcactgggattttggcacaaatatgtgcctgaaaggtaggctttctaggaggggagtcagcttgnctaacttcatgtacatgtagaaccacgtttgctgtcctactacgacttttccctaagttaccataaacacattttattcacaaaaaacacttcgaatttcaagtgtctaccagtagcacccttgctctttctaaacataagcctaagtatatgaggttgcccgtggcaactttttggtaaaacagcttttcattagcactctccaggttctctgcaacacttcacagaggcgagactggctgtatcctttgctgtcggtctttagtacgatcaagttgcaatatacagtgggactgctagacttgaaggagagcagtgattgtgggattgtaaataagagcatcagaagccctccccagctactgctcttcgtggagacttagtaaggactgtgtctacttgagctgtggcaaggctgctgtctgggactgtcctctgccacaaggccatttctcccattatataccgtttgtaaagagaaactgtaaagtctcctcctgaccatatatttttaaatactggcaaagcttttaaaattggcacacaagtacagactgtgctcatttctgtttagtatctgaaaacctgatagatgctacccttaagagcttgctcttccgtgtgctacgtagcacccacctggttaaaatctgaaaacaagtacccctttgacctgtctcccactgaagcttctactgccctggcagctcgcctgggcccaactcagaaacaggagccagcagagcactctctcacgctgatccagccgggcaccctgcttaagtcagtagaagctcgctggcactgcccgttcctacttttccgaagtactgcgtcactttgtcgtaagtaatggcccctgtgccttcttaatccagcagtcaagcttttgggagacctgaaaatgggaaaattcacactgggtttctggactgtagtattggaagccttagttatagtatattaagcctataattatactctgatttgatgggatttttgacatttacacttgtcaaaatgcagggggttttttttggtgcagatgattaaacagtcttccctatttggtgcaatgaagtatagcagataaaatgggggaggggtaaattatcaccttcaagaaaattacatgtttttatatatatttggaattgttaaattggttttgctgaaacatttcacccttgagatattatttgaatgttggtttcaataaaggttcttgaaattgttaaa

SEQ ID NO: 74130 - DNA, 4112 bp, Homo sapiens
  misc_feature (2873)..(2873): n is a, c, g, or t
ctggtacgcctccggattacgggatggggcccgcccgccgcctctcaaccatcaggttcggcagccggcggcgccgcctggcagctcctcctcttctccgccccgccggccgcgggcgcgggggacgtcagcgctgccagcgtggaaggagctgcggggcgcgggaggaggaagtagagcccgggaccgccaggccaccaccggccgcctcagccatggacgcgtccctggagaagatagcagaccccacgttagctgaaatgggaaaaaacttgaaggaggcagtgaagatgctggaggacagtcagagaagaacagaagaggaaaatggaaagaagctcatatccggagatattccaggcccactccagggcagttgcttaagaaaaaaaaaaaacttgaagcaacgccagttgaatgagggaagtagcgggagagtggcgggggatgtgtgctgttcccatcagcccatcaactcttttcattctgcagtgggcaagatatggtgagcatcctccagttagttcagaatctcatgcatggagatgaagatgaggagccccagagccccagaatccaaaatattggagaacaaggtcatatggctttgttgggacatagtctgggagcttatatttcaactctggacaaagagaagctgagaaaacttacaactaggatactttcagataccaccttatggctatgcagaattttcagatatgaaaatgggtgtgcttatttccacgaagaggaaagagaaggacttgcaaagatatgtaggcttgccattcattctcgatatgaagacttcgtagtggatggcttcaatgtgttatataacaagaagcctgtcatatatcttagtgctgctgctagacctggcctgggccaatacctttgtaatcagctcggcttgcccttcccctgcttgtgccgtgtaccctgtaacactgtgtttggatcccagcatcagatggatgttgccttcctggagaaactgattaaagatgatatagagcgaggaagactgcccctgttgcttgtcgcaaatgcaggaacggcagcagtaggacacacagacaagattgggagattgaaagaactctgtgagcagtatggcatatggcttcatgtggagggtgtgaatctggcaacattggctctgggttatgtctcctcatcagtgctggctgcagccaaatgtgatagcatgacgatgactcctggcccgtggctgggtttgccagctgttcctgcggtgacactgtataaacacgatgaccctgccttgactttagttgctggtcttacatcaaataagcccacagacaaactccgtgccctgcctctgtggttatctttacaatacttgggacttgatgggtttgtggagaggatcaagcatgcctgtcaactgagtcaacggttgcaggaaagtttgaagaaagtgaattacatcaaaatcttggtggaagatgagctcagctccccagtggtggtgttcagatttttccaggaattaccaggctcagatccggtgtttaaagccgtcccagtgcccaacatgacaccttcaggagtcggccgggagaggcactcgtgtgacgcgctgaatcgctggctgggagaacagctgaagcagctggtgcctgcaagcggcctcacagtcatggatctggaagctgagggcacgtgtttgcggttcagccctttgatgaccgcagcagttttaggaactcggggagaggatgtggatcagctcgtagcctgcatagaaagcaaactgccagtgctgtgctgtacgctccagttgcgtgaagagttcaagcaggaagtggaagcaacagcaggtctcctatatgttgatgaccctaactggtctggaataggggttgtcaggtatgaacatgctaatgatgataagagcagtttgaaatcagatcccgaaggggaaaacatccatgctggactcctgaagaagttaaatgaactggaatctgacctaacctttaaaataggccctgagtataagagcatgaagagctgcctttatgtcggcatggcgagcgacaacgtcgatgctgctgagctcgtggagaccattgcggccacagcccgggagatagaggagaactcgaggcttctggaaaacatgacagaagtggttcggaaaggcattcaggaagctcaagtggagctgcagaaggcaagtgaagaacggcttctggaagagggggtgttgcggcagatccctgtagtgggctccgtgctgaattggttttctccggtccaggctttacagaagggaagaacttttaacttgacagcaggctctctggagtccacagaacccatatatgtctacaaagcacaaggtgcaggagtcacgctgcctccaacgccctcgggcagtcgcaccaagcagaggcttccaggccagaagccttttaaaaggtccctgcgaggttcagatgctttgagtgagaccagctcagtcagtcacattgaagacttagaaaaggtggagcgcctatccagtgggccggagcagatcaccctcgaggccagcagcactgagggacacccaggggctcccagccctcagcacaccgaccagaccgaggccttccagaaaggggtcccacacccagaagatgaccactcacaggtagaaggaccggagagcttaagatgagactcattgtgtggtttgagactgtactgagtattgtttcagggaagatgaagttctattggaaatgtgaactgtgccacatactaatataaattactgttgtttgtgcttcactgggattttggcacaaatatgtgcctgaaaggtaggctttctaggaggggagtcagcttgnctaacttcatgtacatgtagaaccacgtttgctgtcctactacgacttttccctaagttaccataaacacattttattcacaaaaaacacttcgaatttcaagtgtctaccagtagcacccttgctctttctaaacataagcctaagtatatgaggttgcccgtggcaactttttggtaaaacagcttttcattagcactctccaggttctctgcaacacttcacagaggcgagactggctgtatcctttgctgtcggtctttagtacgatcaagttgcaatatacagtgggactgctagacttgaaggagagcagtgattgtgggattgtaaataagagcatcagaagccctccccagctactgctcttcgtggagacttagtaaggactgtgtctacttgagctgtggcaaggctgctgtctgggactgtcctctgccacaaggccatttctcccattatataccgtttgtaaagagaaactgtaaagtctcctcctgaccatatatttttaaatactggcaaagcttttaaaattggcacacaagtacagactgtgctcatttctgtttagtatctgaaaacctgatagatgctacccttaagagcttgctcttccgtgtgctacgtagcacccacctggttaaaatctgaaaacaagtacccctttgacctgtctcccactgaagcttctactgccctggcagctcgcctgggcccaactcagaaacaggagccagcagagcactctctcacgctgatccagccgggcaccctgcttaagtcagtagaagctcgctggcactgcccgttcctacttttccgaagtactgcgtcactttgtcgtaagtaatggcccctgtgccttcttaatccagcagtcaagcttttgggagacctgaaaatgggaaaattcacactgggtttctggactgtagtattggaagccttagttatagtatattaagcctataattatactctgatttgatgggatttttgacatttacacttgtcaaaatgcagggggttttttttggtgcagatgattaaacagtcttccctatttggtgcaatgaagtatagcagataaaatgggggaggggtaaattatcaccttcaagaaaattacatgtttttatatatatttggaattgttaaattggttttgctgaaacatttcacccttgagatattatttgaatgttggtttcaataaaggttcttgaaattgttaaa

SEQ ID NO: 74131 - DNA, 4975 bp, Homo sapiens
  misc_feature (3736)..(3736): n is a, c, g, or t
agcggagcgctacggggccccgccccgccgcctctcaaccatcaggttcggcagccggcggcgccgcctggcagctcctcctcttctccgccccgccggccgcgggcgcgggggacgtcagcgctgccagcgtggaaggagctgcggggcgcgggaggaggaagtagagcccgggaccgccaggccaccaccggccgcctcagccatggacgcgtccctggagaagatagcagaccccacgttagctgaaatgggaaaaaacttgaaggaggcagtgaagatgctggaggacagtcagagaagaacagaagaggaaaatggaaagaagctcatatccggagatattccaggcccactccagggcagtgggcaagatatggtgagcatcctccagttagttcagaatctcatgcatggagatgaagatgaggagccccagagccccagaatccaaaatattggagaacaaggtcatatggctttgttgggacatagtctgggagcttatatttcaactctggacaaagagaagctgagaaaacttacaactaggatactttcagataccaccttatggctatgcagaattttcagatatgaaaatgggtgtgcttatttccacgaagaggaaagagaaggacttgcaaagatatgtaggcttgccattcattctcgatatgaagacttcgtagtggatggcttcaatgtgttatataacaagaagcctgtcatatatcttagtgctgctgctagacctggcctgggccaatacctttgtaatcaggatgttgccttcctggagaaactgattaaagatgatatagagcgaggaagactgcccctgttgcttgtcgcaaatgcaggaacggcagcagtaggacacacagacaagattgggagattgaaagaactctgtgagcagtatggcatatggcttcatgtggaggggtaagctggcggtgaggctggtggctccattcgggcctgcacagagtccttatgaggactggacatccaggctctcactttggtgacatttatcacgaagggctctttgggtcacagatcacaaaataacccaaattggcttaagcccaaagagatcttactggctcacataactacaaagagcagtgttatgactgcctcaggcacgacatcaaccaggatccagtgtgttactcccacctctgctcccccagtcacaggcactgggcttggtttcctctatctgtggacagatcttcctgttacagtgcaaagtagctgcagaaactccagccttctttccagcttcgtggtcagctggaagtcctaacagaagtctcgtattgaaccagccactgtggccagggagaagtaatcctctgatagttgaggttctttgctctcctctggagcagatagtggtgtctcctccccacaaagctcatgttctgctggaagaaatggagatggcgccctggaaggctattgtagggccattaagagaagcagggggaacggacgtgggcagccagagtagcccatatccaccacatcatacagggaggtttctttttgatccctaagtaaagaatgataactggaaaataagatccatgaaagagaataatactcccattatattaaatgagcggggatagttcctgagacacatttttattaaagtgcattttcaggattttccttcatatgtataaagcacaccttctgttgctgttaatgaaagctaataacattaaaaatatacttaagtgtcaacttgcaacagcacagcctttatttttttaagtacatggtgagtaagcaacattaaataattagttcttggactggtgttttttcttccagtgtgaatctggcaacattggctctgggttatgtctcctcatcagtgctggtatgttgttgatttactgaatattggtgtttttaagaatgaatttaaaatcactcaatccctcctggctcttcacagtttttatgaatggaggagggtgttaggtttgtgtattctgataatctaacaaagagttgttcttgttttggtaggctgcagccaaatgtgatagcatgacgatgactcctggcccgtggctgggtttgccagctgttcctgcggtgacactgtataaacacgatgaccctgccttgactttagttgctggtcttacatcaaataagcccacagacaaactccgtgccctgcctctgtggttatctttacaatacttgggacttgatgggtttgtggagaggatcaagcatgcctgtcaactgagtcaacggttgcaggaaagtttgaagaaagtgaattacatcaaaatcttggtggaagatgagctcagctccccagtggtggtgttcagatttttccaggaattaccaggctcagatccggtgtttaaagccgtcccagtgcccaacatgacaccttcaggagtcggccgggagaggcactcgtgtgacgcgctgaatcgctggctgggagaacagctgaagcagctggtgcctgcaagcggcctcacagtcatggatctggaagctgagggcacgtgtttgcggttcagccctttgatgaccgcagcagttttaggaactcggggagaggatgtggatcagctcgtagcctgcatagaaagcaaactgccagtgctgtgctgtacgctccagttgcgtgaagagttcaagcaggaagtggaagcaacagcaggtctcctatatgttgatgaccctaactggtctggaataggggttgtcaggtatgaacatgctaatgatgataagagcagtttgaaatcagatcccgaaggggaaaacatccatgctggactcctgaagaagttaaatgaactggaatctgacctaacctttaaaataggccctgagtataagagcatgaagagctgcctttatgtcggcatggcgagcgacaacgtcgatgctgctgagctcgtggagaccattgcggccacagcccgggagatagaggagaactcgaggcttctggaaaacatgacagaagtggttcggaaaggcattcaggaagctcaagtggagctgcagaaggcaagtgaagaacggcttctggaagagggggtgttgcggcagatccctgtagtgggctccgtgctgaattggttttctccggtccaggctttacagaagggaagaacttttaacttgacagcaggctctctggagtccacagaacccatatatgtctacaaagcacaaggtgcaggagtcacgctgcctccaacgccctcgggcagtcgcaccaagcagaggcttccaggccagaagccttttaaaaggtccctgcgaggttcagatgctttgagtgagaccagctcagtcagtcacattgaagacttagaaaaggtggagcgcctatccagtgggccggagcagatcaccctcgaggccagcagcactgagggacacccaggggctcccagccctcagcacaccgaccagaccgaggccttccagaaaggggtcccacacccagaagatgaccactcacaggtagaaggaccggagagcttaagatgagactcattgtgtggtttgagactgtactgagtattgtttcagggaagatgaagttctattggaaatgtgaactgtgccacatactaatataaattactgttgtttgtgcttcactgggattttggcacaaatatgtgcctgaaaggtaggctttctaggaggggagtcagcttgnctaacttcatgtacatgtagaaccacgtttgctgtcctactacgacttttccctaagttaccataaacacattttattcacaaaaaacacttcgaatttcaagtgtctaccagtagcacccttgctctttctaaacataagcctaagtatatgaggttgcccgtggcaactttttggtaaaacagcttttcattagcactctccaggttctctgcaacacttcacagaggcgagactggctgtatcctttgctgtcggtctttagtacgatcaagttgcaatatacagtgggactgctagacttgaaggagagcagtgattgtgggattgtaaataagagcatcagaagccctccccagctactgctcttcgtggagacttagtaaggactgtgtctacttgagctgtggcaaggctgctgtctgggactgtcctctgccacaaggccatttctcccattatataccgtttgtaaagagaaactgtaaagtctcctcctgaccatatatttttaaatactggcaaagcttttaaaattggcacacaagtacagactgtgctcatttctgtttagtatctgaaaacctgatagatgctacccttaagagcttgctcttccgtgtgctacgtagcacccacctggttaaaatctgaaaacaagtacccctttgacctgtctcccactgaagcttctactgccctggcagctcgcctgggcccaactcagaaacaggagccagcagagcactctctcacgctgatccagccgggcaccctgcttaagtcagtagaagctcgctggcactgcccgttcctacttttccgaagtactgcgtcactttgtcgtaagtaatggcccctgtgccttcttaatccagcagtcaagcttttgggagacctgaaaatgggaaaattcacactgggtttctggactgtagtattggaagccttagttatagtatattaagcctataattatactctgatttgatgggatttttgacatttacacttgtcaaaatgcagggggttttttttggtgcagatgattaaacagtcttccctatttggtgcaatgaagtatagcagataaaatgggggaggggtaaattatcaccttcaagaaaattacatgtttttatatatatttggaattgttaaattggttttgctgaaacatttcacccttgagatattatttgaatgttggtttcaataaaggttcttgaaattgttaaa

SEQ ID NO: 74132 - DNA, 2009 bp, Homo sapiens
  misc_feature (2004)..(2004): n is a, c, g, or t
agcggagcgctacggggccccgccccgccgcctctcaaccatcaggttcggcagccggcggcgccgcctggcagctcctcctcttctccgccccgccggccgcgggcgcgggggacgtcagcgctgccagcgtggaaggagctgcggggcgcgggaggaggaagtagagcccgggaccgccaggccaccaccggccgcctcagccatggacgcgtccctggagaagatagcagaccccacgttagctgaaatgggaaaaaacttgaaggaggcagtgaagatgctggaggacagtcagagaagaacagaagaggaaaatggaaagaagctcatatccggagatattccaggcccactccagggcagtgggcaagatatggtgagcatcctccagttagttcagaatctcatgcatggagatgaagatgaggagccccagagccccagaatccaaaatattggagaacaaggtcatatggctttgttgggacatagtctgggagcttatatttcaactctggacaaagagaagctgagaaaacttacaactaggatactttcagataccaccttatggctatgcagaattttcagatatgaaaatgggtgtgcttatttccacgaagaggaaagagaaggacttgcaaagatatgtaggcttgccattcattctcgatatgaagacttcgtagtggatggcttcaatgtgttatataacaagaagcctgtcatatatcttagtgctgctgctagacctggcctgggccaatacctttgtaatcagctcggcttgcccttcccctgcttgtgccgtgtaccctgtaacactgtgtttggatcccagcatcagatggatgttgccttcctggagaaactgattaaagatgatatagagcgaggaagactgcccctgttgcttgtcgcaaatgcaggaacggcagcagtaggacacacagacaagattgggagattgaaagaactctgtgagcagtatggcatatggcttcatgtggagggtgtgaatctggcaacattggctctgggttatgtctcctcatcagtgctggctgcagccaaatgtgatagcatgacgatgactcctggcccgtggctgggtttgccagctgttcctgcggtgacactgtataaacacgatgaccctgccttgactttagttgctggtcttacatcaaataagcccacagacaaactccgtgccctgcctctgtggttatctttacaatacttgggacttgatgggtttgtggagaggatcaagcatgcctgtcaactgagtcaacggttgcaggaaagtttgaagaaagtgaattacatcaaaatcttggtggaagatgagctcagctccccagtggtggtgttcagatttttccaggaattaccaggctcagatccggtgtttaaagccgtcccagtgcccaacatgacaccttcaggagtcggccgggagaggcactcgtgtgacgcgctgaatcgctggctgggagaacagctgaagcagctggtgcctgcaagcggcctcacagtcatggatctggaagctgagggcacgtgtttgcggttcagccctttgatgaccgcagcagttttaggaactcggggagaggatgtggatcagctcgtagcctgcatagaaagcaaactgccagtgctgtgctgtacgctccagttgcgtgaagagttcaagcaggaagtggaagcaacagcaggtctcctatatgttgatgaccctaactggtctggaataggggttgtcaggtaaagtcttggcctgccgcttgatgttggagacttttctgtataaagaacatgagtgggtcattttctgaaccaccttagaaatccaagatgaacgtgtagtcacaatatgcttaacgaaaatgcaactcggttttctgggcattaacaacagcacagtgcaagcaggcaatttggccagcgagacgctcagggaggggagttgctgaatgttctgtctgttgggtnccggc

SEQ ID NO: 74133 - DNA, 2710 bp, Homo sapiens
agcggagcgctacggggccccgccccgccgcctctcaaccatcaggttcggcagccggcggcgccgcctggcagctcctcctcttctccgccccgccggccgcgggcgcgggggacgtcagcgctgccagcgtggaaggagctgcggggcgcgggaggaggaagtagagcccgggaccgccaggccaccaccggccgcctcagccatggacgcgtccctggagaagatagcagaccccacgttagctgaaatgggaaaaaacttgaaggaggcagtgaagatgctggaggacagtcagagaagaacagaagaggaaaatggaaagaagctcatatccggagatattccaggcccactccagggcagtgggcaagatatggtgagcatcctccagttagttcagaatctcatgcatggagatgaagatgaggagccccagagccccagaatccaaaatattggagaacaaggtcatatggctttgttgggacatagtctgggagcttatatttcaactctggacaaagagaagctgagaaaacttacaactaggatactttcagataccaccttatggctatgcagaattttcagatatgaaaatgggtgtgcttatttccacgaagaggaaagagaaggacttgcaaagatatgtaggcttgccattcattctcgatatgaagacttcgtagtggatggcttcaatgtgttatataacaagaagcctgtcatatatcttagtgctgctgctagacctggcctgggccaatacctttgtaatcagctcggcttgcccttcccctgcttgtgccgtgtaccctgtaacactgtgtttggatcccagcatcagatggatgttgccttcctggagaaactgattaaagatgatatagagcgaggaagactgcccctgttgcttgtcgcaaatgcaggaacggcagcagtaggacacacagacaagattgggagattgaaagaactctgtgagcagtatggcatatggcttcatgtggagggtgtgaatctggcaacattggctctgggttatgtctcctcatcagtgctggctgcagccaaatgtgatagcatgacgatgactcctggcccgtggctgggtttgccagctgttcctgcggtgacactgtataaacacgatgaccctgccttgactttagttgctggtcttacatcaaataagcccacagacaaactccgtgccctgcctctgtggttatctttacaatacttgggacttgatgggtttgtggagaggatcaagcatgcctgtcaactgagtcaacggttgcaggaaagtttgaagaaagtgaattacatcaaaatcttggtggaagatgagctcagctccccagtggtggtgttcagatttttccaggaattaccaggctcagatccggtgtttaaagccgtcccagtgcccaacatgacaccttcaggagtcggccgggagaggcactcgtgtgacgcgctgaatcgctggctgggagaacagctgaagcagctggtgcctgcaagcggcctcacagtcatggatctggaagctgagggcacgtgtttgcggttcagccctttgatgaccgcagcaggtatgatctcgtgaaaccttgagagaaactgaatgaggaatgaaactattgttcctgtttcacacagaagaaaactgaggttggcactcatgatgagcccctgttctcattctgcaaatggtgaagctctctatcgtcctgaccccacagttcctgtcccatgaccagggcccgctcaccaaggagctgcagcagcacgtaaagtcagtgacatgcccatgcgagtacctgaggaaggttatcaatactctggctgaccatcgtcatcgtgagactgactttggtggaagtccttggataattatcattattgtgtttctgggacgttacaaatttaccattctcttctgcacaatttacctttgtgtgcctttcctgaagactatcttctggtctcgaaatggacatgatagatccagggatgtacagcagagagctaggaggtccaaccgccgtagacaggaaggaattaaaattggcctggaagacatctgtactttatggaaacaggcggaaacaaaagttcaagctaaaatccgtaagatgaaggtcacaaagaaagtcaaccatcattacaaaatcaatggaaagaggaagaccgccaaagaacagaaaatgtttcaacgtgcgcaagagttgcggtggcgggcagaggactaccacaaatgcaaaatcaccccctctgcaagaaagcctctttgcaactggctctgtgctcaagccctgcagagggagatggcagagaggaaggctgcctacaagcatcacagtcccatccctgttggtaaccgtgttgtgcaaaaacaccttcatccccacccagtggggcccctgatctaatattcaaagtgtcagaggttccatatttgtaatagcaaatgggccctgactgtaaattagtgaagagtgaatgtaacttattacccacagggacaattccaaatgaaggccttaaatgatgctcagctaagctggttcttgtgtggcctctgtaccttcaaaagctgccgagtcctatgattacacgtgatgggacttgtacacttgaagtgaaacagttttaaaacttgctttgtttagaattcccacctcatttttccatggac

SEQ ID NO: 74134 - DNA, 3346 bp, Homo sapiens
agcggagcgctacggggccccgccccgccgcctctcaaccatcaggttcggcagccggcggcgccgcctggcagctcctcctcttctccgccccgccggccgcgggcgcgggggacgtcagcgctgccagcgtggaaggagctgcggggcgcgggaggaggaagtagagcccgggaccgccaggccaccaccggccgcctcagccatggacgcgtccctggagaagatagcagaccccacgttagctgaaatgggaaaaaacttgaaggaggcagtgaagatgctggaggacagtcagagaagaacagaagaggaaaatggaaagaagctcatatccggagatattccaggcccactccagggcagtgggcaagatatggtgagcatcctccagttagttcagaatctcatgcatggagatgaagatgaggagccccagagccccagaatccaaaatattggagaacaaggtcatatggctttgttgggacatagtctgggagcttatatttcaactctggacaaagagaagctgagaaaacttacaactaggatactttcagataccaccttatggctatgcagaattttcagatatgaaaatgggtgtgcttatttccacgaagaggaaagagaaggacttgcaaagatatgtaggcttgccattcattctcgatatgaagacttcgtagtggatggcttcaatgtgttatataacaagaagcctgtcatatatcttagtgctgctgctagacctggcctgggccaatacctttgtaatcagctcggcttgcccttcccctgcttgtgccgtgtaccctgtaacactgtgtttggatcccagcatcagatggatgttgccttcctggagaaactgattaaagatgatatagagcgaggaagactgcccctgttgcttgtcgcaaatgcaggaacggcagcagtaggacacacagacaagattgggagattgaaagaactctgtgagcagtatggcatatggcttcatgtggagggtgtgaatctggcaacattggctctgggttatgtctcctcatcagtgctggctgcagccaaatgtgatagcatgacgatgactcctggcccgtggctgggtttgccagctgttcctgcggtgacactgtataaacacgatgaccctgccttgactttagttgctggtcttacatcaaataagcccacagacaaactccgtgccctgcctctgtggttatctttacaatacttgggacttgatgggtttgtggagaggatcaagcatgcctgtcaactgagtcaacggttgcaggaaagtttgaagaaagtgaattacatcaaaatcttggtggaagatgagctcagctccccagtggtggtgttcagatttttccaggaattaccaggctcagatccggtgtttaaagccgtcccagtgcccaacatgacaccttcaggagtcggccgggagaggcactcgtgtgacgcgctgaatcgctgggtgagaatggcagtcacccccctttcctttcaggtccccgtccatcaccatccgacctgctggtgagggtgacgcgtgctcgtgtatgggaactgaggcccacaggaggagccgccctgccagtgctgggcctgctctggagttctgttccccattgccgttaccacctcacgaagctgggtcacctctggcaagtccttcctggcattgctccctcactttccttgctgctgtataaggctgtgagacaacaggcaaaaggtgggctgcagggcagctgcagtgggttctggtgagcctgggcagcacagccgggagccccaggcagagtctgccgagcatctgcagctggcagtgtggagccaggcctgcactttgatagcgttttgggcactgaatagcagctctaggatttgagtctgaagggtcttgtgaacagtgtgggatggcggcagcagcggttctagccaatgctggacacgcccagcctagcagggttggcagataagtcctggtacatccatgctggggctcagcacagctgtgagagaccacagagctgagtgtctcaagcagaaaggaactggtcataaacgaaatgaatcaatgcaggttactaagcagtgtcaagtagcatgttttatgacaacaactacaactccctgcccgccactaggagaaaagacgctgggggcagaccacatgtcagcagtgggtgtcgcttagtaatatattgtgggtcattgttattttcttctttttgtttacttgtatttcctaaatttttctacaatgaacttgtattaataagaaaaaaccataaaatttactgtttttaaaaagctgctctaagtaatcagacagtcaaaagagcaggaatcagctctccaggaggctctttggtctggggccgaggggatgagggtgggtcctgaagacgtctgagtcccttgttacaggagggtgttcattgtgtcctcctcacagctgggagaacagctgaagcagctggtgcctgcaagcggcctcacagtcatggatctggaagctgagggcacgtgtttgcggttcagccctttgatgaccgcagcaggtaaaccaggcttggtggacatcccttgcttttgttctggggctgctgggtagattagcttgcccttatgatactccattctcctagagttattagcagctctttttggaggggcattttcttttcttttgggctaaatttaggtagattagcattcccatgtaacttaccagaatcagaatgagaattcagaagtcacctgaattggccgggcatggtggctcacacctgtaatcccagcaccttgggaggccaaggcaggcagatcatctgaggtcaggagttcgagaccagcctggccaacatagtgaaatcccgcccctactaaaaatacaaaaaattagccaggcaccctgtccacagcccccacacagactcgaggggcccccatctcctgttctgaacccaacagggtggtcccactgtgggaccacaaccaggtatgactgtgtgagaagcaggctcactaccaggctaccagggagcacaggggagcaggcgccaccttgaggcataaacccagagaaacaagacctccaagacggccaggcactggggcacacgccggtaacacagcaccgtgggagctgagacggaaggatcgcctgagcccaggattttgaaaccaccctgggcaacacagtgagaccccgtatctacaaaaaaatacacattagccaggcatggtggcatgcgcctggggtcccaagtactcgggaggtagaggagagaaaaatcacttgagcccagagagg

SEQ ID NO: 74135 - DNA, 2342 bp, Homo sapiens
agcggagcgctacggggccccgccccgccgcctctcaaccatcaggttcggcagccggcggcgccgcctggcagctcctcctcttctccgccccgccggccgcgggcgcgggggacgtcagcgctgccagcgtggaaggagctgcggggcgcgggaggaggaagtagagcccgggaccgccaggccaccaccggccgcctcagccatggacgcgtccctggagaagatagcagaccccacgttagctgaaatgggaaaaaacttgaaggaggcagtgaagatgctggaggacagtcagagaagaacagaagaggaaaatggaaagaagctcatatccggagatattccaggcccactccagggcagtgggcaagatatggtgagcatcctccagttagttcagaatctcatgcatggagatgaagatgaggagccccagagccccagaatccaaaatattggagaacaaggtcatatggctttgttgggacatagtctgggagcttatatttcaactctggacaaagagaagctgagaaaacttacaactaggatactttcagataccaccttatggctatgcagaattttcagatatgaaaatgggtgtgcttatttccacgaagaggaaagagaaggacttgcaaagatatgtaggcttgccattcattctcgatatgaagacttcgtagtggatggcttcaatgtgttatataacaagaagcctgtcatatatcttagtgctgctgctagacctggcctgggccaatacctttgtaatcagctcggcttgcccttcccctgcttgtgccgtgtaccctgtaacactgtgtttggatcccagcatcagatggatgttgccttcctggagaaactgattaaagatgatatagagcgaggaagactgcccctgttgcttgtcgcaaatgcaggaacggcagcagtaggacacacagacaagattgggagattgaaagaactctgtgagcagtatggcatatggcttcatgtggagggtgtgaatctggcaacattggctctgggttatgtctcctcatcagtgctggctgcagccaaatgtgatagcatgacgatgactcctggcccgtggctgggtttgccagctgttcctgcggtgacactgtataaacacgatgaccctgccttgactttagttgctggtcttacatcaaataagcccacagacaaactccgtgccctgcctctgtggttatctttacaatacttgggacttgatgggtttgtggagaggatcaagcatgcctgtcaactgagtcaacggttgcaggaaagtttgaagaaagtgaattacatcaaaatcttggtggaagatgagctcagctccccagtggtggtgttcagatttttccaggaattaccaggctcagatccggtgtttaaagccgtcccagtgcccaacatgacaccttcaggagtcggccgggagaggcactcgtgtgacgcgctgaatcgctggctgggagaacagctgaagcagctggtgcctgcaagcggcctcacagtcatggatctggaagctgagggcacgtgtttgcggttcagccctttgatgaccgcagcaggtatgatctcgtgaaaccttgagagaaactgaatgaggaatgaaactattgttcctgtttcacacagaagaaaactgaggttggcactcatgatgagcccctgttctcattctgcaaatggtgaagctctctatcgtcctgaccccacagttcctgtcccatgaccagggcccgctcaccaaggagctgcagcagcacgtaaagtcagtgacatgcccatgcgagtacctgaggaaggttatcaatactctggctgaccatcgtcatcgtgagactgactttggtggaagtccttggataattatcattattgtgtttctgggacgttacaaatttaccattctcttctgcacaatttacctttgtgtgcctttcctgaagactatcttctggtctcgaaatggacatgatagatccagggatgtacagcagagagctaggaggtccaaccgccgtagacaggaaggaattaaaattggcctggaagacatctgtactttatggaaacaggcggaaacaaaagttcaagctaaaatccgtaagatgaaggtcacaaagaaagtcaaccatcattacaaaatcaatggaaagaggaagaccgccaaagaacagaaaatgtttcaacgtgcgcaagagttgcggtggcgggcagaggactaccacaaatgcaaaatcaccccctctgcaagaaagcctctttgcaactgggtaagtttgtttgttttccttgcttttgga

SEQ ID NO: 74136 - DNA, 3915 bp, Homo sapiens
  misc_feature (2676)..(2676): n is a, c, g, or t
ctggtacgcctccggattacgggatggggcccgcccgccgcctctcaaccatcaggttcggcagccggcggcgccgcctggcagctcctcctcttctccgccccgccggccgcgggcgcgggggacgtcagcgctgccagcgtggaaggagctgcggggcgcgggaggaggaagtagagcccgggaccgccaggccaccaccggccgcctcagccatggacgcgtccctggagaagatagcagaccccacgttagctgaaatgggaaaaaacttgaaggaggcagtgaagatgctggaggacagtcagagaagaacagaagaggaaaatggaaagaagctcatatccggagatattccaggcccactccagggcagaatccaaaatattggagaacaaggtcatatggctttgttgggacatagtctgggagcttatatttcaactctggacaaagagaagctgagaaaacttacaactaggatactttcagataccaccttatggctatgcagaattttcagatatgaaaatgggtgtgcttatttccacgaagaggaaagagaaggacttgcaaagatatgtaggcttgccattcattctcgatatgaagacttcgtagtggatggcttcaatgtgttatataacaagaagcctgtcatatatcttagtgctgctgctagacctggcctgggccaatacctttgtaatcagctcggcttgcccttcccctgcttgtgccgtgtaccctgtaacactgtgtttggatcccagcatcagatggatgttgccttcctggagaaactgattaaagatgatatagagcgaggaagactgcccctgttgcttgtcgcaaatgcaggaacggcagcagtaggacacacagacaagattgggagattgaaagaactctgtgagcagtatggcatatggcttcatgtggagggtgtgaatctggcaacattggctctgggttatgtctcctcatcagtgctggctgcagccaaatgtgatagcatgacgatgactcctggcccgtggctgggtttgccagctgttcctgcggtgacactgtataaacacgatgaccctgccttgactttagttgctggtcttacatcaaataagcccacagacaaactccgtgccctgcctctgtggttatctttacaatacttgggacttgatgggtttgtggagaggatcaagcatgcctgtcaactgagtcaacggttgcaggaaagtttgaagaaagtgaattacatcaaaatcttggtggaagatgagctcagctccccagtggtggtgttcagatttttccaggaattaccaggctcagatccggtgtttaaagccgtcccagtgcccaacatgacaccttcaggagtcggccgggagaggcactcgtgtgacgcgctgaatcgctggctgggagaacagctgaagcagctggtgcctgcaagcggcctcacagtcatggatctggaagctgagggcacgtgtttgcggttcagccctttgatgaccgcagcagttttaggaactcggggagaggatgtggatcagctcgtagcctgcatagaaagcaaactgccagtgctgtgctgtacgctccagttgcgtgaagagttcaagcaggaagtggaagcaacagcaggtctcctatatgttgatgaccctaactggtctggaataggggttgtcaggtatgaacatgctaatgatgataagagcagtttgaaatcagatcccgaaggggaaaacatccatgctggactcctgaagaagttaaatgaactggaatctgacctaacctttaaaataggccctgagtataagagcatgaagagctgcctttatgtcggcatggcgagcgacaacgtcgatgctgctgagctcgtggagaccattgcggccacagcccgggagatagaggagaactcgaggcttctggaaaacatgacagaagtggttcggaaaggcattcaggaagctcaagtggagctgcagaaggcaagtgaagaacggcttctggaagagggggtgttgcggcagatccctgtagtgggctccgtgctgaattggttttctccggtccaggctttacagaagggaagaacttttaacttgacagcaggctctctggagtccacagaacccatatatgtctacaaagcacaaggtgcaggagtcacgctgcctccaacgccctcgggcagtcgcaccaagcagaggcttccaggccagaagccttttaaaaggtccctgcgaggttcagatgctttgagtgagaccagctcagtcagtcacattgaagacttagaaaaggtggagcgcctatccagtgggccggagcagatcaccctcgaggccagcagcactgagggacacccaggggctcccagccctcagcacaccgaccagaccgaggccttccagaaaggggtcccacacccagaagatgaccactcacaggtagaaggaccggagagcttaagatgagactcattgtgtggtttgagactgtactgagtattgtttcagggaagatgaagttctattggaaatgtgaactgtgccacatactaatataaattactgttgtttgtgcttcactgggattttggcacaaatatgtgcctgaaaggtaggctttctaggaggggagtcagcttgnctaacttcatgtacatgtagaaccacgtttgctgtcctactacgacttttccctaagttaccataaacacattttattcacaaaaaacacttcgaatttcaagtgtctaccagtagcacccttgctctttctaaacataagcctaagtatatgaggttgcccgtggcaactttttggtaaaacagcttttcattagcactctccaggttctctgcaacacttcacagaggcgagactggctgtatcctttgctgtcggtctttagtacgatcaagttgcaatatacagtgggactgctagacttgaaggagagcagtgattgtgggattgtaaataagagcatcagaagccctccccagctactgctcttcgtggagacttagtaaggactgtgtctacttgagctgtggcaaggctgctgtctgggactgtcctctgccacaaggccatttctcccattatataccgtttgtaaagagaaactgtaaagtctcctcctgaccatatatttttaaatactggcaaagcttttaaaattggcacacaagtacagactgtgctcatttctgtttagtatctgaaaacctgatagatgctacccttaagagcttgctcttccgtgtgctacgtagcacccacctggttaaaatctgaaaacaagtacccctttgacctgtctcccactgaagcttctactgccctggcagctcgcctgggcccaactcagaaacaggagccagcagagcactctctcacgctgatccagccgggcaccctgcttaagtcagtagaagctcgctggcactgcccgttcctacttttccgaagtactgcgtcactttgtcgtaagtaatggcccctgtgccttcttaatccagcagtcaagcttttgggagacctgaaaatgggaaaattcacactgggtttctggactgtagtattggaagccttagttatagtatattaagcctataattatactctgatttgatgggatttttgacatttacacttgtcaaaatgcagggggttttttttggtgcagatgattaaacagtcttccctatttggtgcaatgaagtatagcagataaaatgggggaggggtaaattatcaccttcaagaaaattacatgtttttatatatatttggaattgttaaattggttttgctgaaacatttcacccttgagatattatttgaatgttggtttcaataaaggttcttgaaattgttaaa

SEQ ID NO: 74137 - DNA, 2394 bp, Homo sapiens
agcggagcgctacggggccccgccccgccgcctctcaaccatcaggttcggcagccggcggcgccgcctggcagctcctcctcttctccgccccgccggccgcgggcgcgggggacgtcagcgctgccagcgtggaaggagctgcggggcgcgggaggaggaagtagagcccgggaccgccaggccaccaccggccgcctcagccatggacgcgtccctggagaagatagcagaccccacgttagctgaaatgggaaaaaacttgaaggaggcagtgaagatgctggaggacagtcagagaagaacagaagaggaaaatggaaagaagctcatatccggagatattccaggcccactccagggcagtgggcaagatatggtgagcatcctccagttagttcagaatctcatgcatggagatgaagatgaggagccccagagccccagaatccaaaatattggagaacaaggtcatatggctttgttgggacatagtctgggagcttatatttcaactctggacaaagagaagctgagaaaacttacaactaggatactttcagataccaccttatggctatgcagaattttcagatatgaaaatgggtgtgcttatttccacgaagaggaaagagaaggacttgcaaagatatgtaggcttgccattcattctcgatatgaagacttcgtagtggatggcttcaatgtgttatataacaagaagcctgtcatatatcttagtgctgctgctagacctggcctgggccaatacctttgtaatcagctcggcttgcccttcccctgcttgtgccgtgtaccctgtaacactgtgtttggatcccagcatcagatggatgttgccttcctggagaaactgattaaagatgatatagagcgaggaagactgcccctgttgcttgtcgcaaatgcaggaacggcagcagtaggacacacagacaagattgggagattgaaagaactctgtgagcagtatggcatatggcttcatgtggagggtgtgaatctggcaacattggctctgggttatgtctcctcatcagtgctggctgcagccaaatgtgatagcatgacaatttctccttcctctggtaacctctgttttcttagatttggagcagggtggtcacactgaccttgcagagttccgagaatcagagacagaacataaaaggcctggaaaacattctccaaaaagaagctgcaacatgtgtggacaatgggcttttcatgcctctcttactgtctgttgacctggtgcaagaaacatgctctggtgatggctgtgagggaggaatgaggatagacatagacactcctgtgtctcaaacatgcctctttattactctgttatgactctgtcttccctggggcaggaccccagcctgcctacatttgcagacagacacagtggcatgtggagacaacagtgtgtcccaatgacttttctttactccccagctgtcggcagtactcagtggaagggtgatattatgacactgatactgctattttgaaacctggaggatggaaaggtgcaaaaatctatcaccagcaacagaaggtgcagaccgtgttggtggcggtaattttgtccatcaaatgaatatgtgtgaaaacattcccttcttcggccctacaggtcagaatggcggcagcggagcatcgtcattcttcaggattgccctgctggccctacctcacagctgaaactttaaaaaacaggatgggccgccagccacctcctccaactcaacaacattctataactgataactccctgagcctcaagacacctcccgaatgtctcctacatccccttccaccctcagtggatgataatatcaaggagtgtcctcttgctcctcttccaccctcagtggatgataatctgaaggagtgtctcctggtccctcttccaccctctcctcttccaccctcagtggatgataatctgaaggactgtctcttattccccttccaccctctcctcttccaccctccgtggatgataatctcaagactcctcccttagctactcaggaggccgaggcagaaaaaccacccaaacccaagaggtggagggtggatgaggtggaacaatcaccgaaacccaagaggcggagggcggatgaggtggaacaatcgcccaagcccaagaggcagagggaggccgaggcacaacaatcactgaaacccaagaggcagaggttgagtaagctgagaacaggtcattgcactcaagcctgggcaataagaagaaatctgtgagtggaacaaaagaaaaaaatcaaaaaacaaaacaaaacccacactccaaaaacaaactaacaaagaataaataaataatataaaaataaaataaatactgcagtc

SEQ ID NO: 74138 - DNA, 1980 bp, Homo sapiens
  misc_feature (1641)..(1641): n is a, c, g, or t
  misc_feature (1670)..(1670): n is a, c, g, or t
  misc_feature (1685)..(1686): n is a, c, g, or t
  misc_feature (1708)..(1708): n is a, c, g, or t
  misc_feature (1719)..(1719): n is a, c, g, or t
  misc_feature (1722)..(1722): n is a, c, g, or t
  misc_feature (1737)..(1737): n is a, c, g, or t
  misc_feature (1739)..(1739): n is a, c, g, or t
  misc_feature (1747)..(1747): n is a, c, g, or t
  misc_feature (1759)..(1759): n is a, c, g, or t
  misc_feature (1769)..(1769): n is a, c, g, or t
  misc_feature (1773)..(1773): n is a, c, g, or t
  misc_feature (1776)..(1776): n is a, c, g, or t
  misc_feature (1798)..(1798): n is a, c, g, or t
  misc_feature (1818)..(1818): n is a, c, g, or t
  misc_feature (1829)..(1829): n is a, c, g, or t
  misc_feature (1847)..(1847): n is a, c, g, or t
  misc_feature (1910)..(1910): n is a, c, g, or t
  misc_feature (1912)..(1912): n is a, c, g, or t
  misc_feature (1917)..(1917): n is a, c, g, or t
  misc_feature (1946)..(1946): n is a, c, g, or t
  misc_feature (1950)..(1950): n is a, c, g, or t
  misc_feature (1955)..(1955): n is a, c, g, or t
  misc_feature (1975)..(1975): n is a, c, g, or t
agcggagcgctacggggccccgccccgccgcctctcaaccatcaggttcggcagccggcggcgccgcctggcagctcctcctcttctccgccccgccggccgcgggcgcgggggacgtcagcgctgccagcgtggaaggagctgcggggcgcgggaggaggaagtagagcccgggaccgccaggccaccaccggccgcctcagccatggacgcgtccctggagaagatagcagaccccacgttagctgaaatgggaaaaaacttgaaggaggcagtgaagatgctggaggacagtcagagaagaacagaagaggaaaatggaaagaagctcatatccggagatattccaggcccactccagggcagtgggcaagatatggtgagcatcctccagttagttcagaatctcatgcatggagatgaagatgaggagccccagagccccagaatccaaaatattggagaacaaggtcatatggctttgttgggacatagtctgggagcttatatttcaactctggacaaagagaagctgagaaaacttacaactaggatactttcagataccaccttatggctatgcagaattttcagatatgaaaatgggtgtgcttatttccacgaagaggaaagagaaggacttgcaaagatatgtaggcttgccattcattctcgatatgaagacttcgtagtggatggcttcaatgtgttatataacaagaagcctgtcatatatcttagtgctgctgctagacctggcctgggccaatacctttgtaatcagctcggcttgcccttcccctgcttgtgccgtgtaccctgtaacactgtgtttggatcccagcatcagatggatgttgccttcctggagaaactgattaaagatgatatagagcgaggaagactgcccctgttgcttgtcgcaaatgcaggaacggcagcagtaggacacacagacaagattgggagattgaaagaactctgtgagcagtatggcatatggcttcatgtggagggtgtgaatctggcaacattggctctgggttatgtctcctcatcagtgctggctgcagccaaatgtgatagcatgacgatgactcctggcccgtggctgggtttgccagctgttcctgcggtgacactgtataaacacgatgaccctgccttgactttagttgctggtcttacatcaaataagcccacagacaaactccgtgccctgcctctgtggttatctttacaatacttgggacttgatgggtttgtggagaggatcaagcatgcctgtcaactgagtcaacggttgcaggaaagtttgaagaaagtgaattacatcaaaatcttggtggaagatgagctcagctccccagtggtggtgttcagatttttccaggaattaccaggctcagatccggtgtttaaagccgtcccagtgcccaacatgacaccttcaggagtcggccgggagaggcactcgtgtgacgcgctgaatcgctggctgggagaacagctgaagcagctggtgcctgcaagcggcctcacagtcatggatctggaagctgagggcacgtgtttgcggttcagccctttgatgaccgcagcaggataccacatggagcattttgaggagtgctggccagnatcgacattttttcaagaagcctggttcnttttactggagattnnttttttttggagaacagagacntgggcaccagnggnggatcagaggacttntntcctgagnttgccagaaaantgttgaacanaaanttntacacaaccgaacaggcccaantttcaaatggactgagaatnacccacacaanttccaccgaggccaaggntgacctgcagccagcgacagggaaagactgccacttactggcggcctccggaactggaaggantntactnacaattttttttttcgcaagcttttaacntttntaccntcaataaaaaccccattaanattta

SEQ ID NO: 74139 - DNA, 2114 bp, Homo sapiens
  misc_feature (1775)..(1775): n is a, c, g, or t
  misc_feature (1804)..(1804): n is a, c, g, or t
  misc_feature (1819)..(1820): n is a, c, g, or t
  misc_feature (1842)..(1842): n is a, c, g, or t
  misc_feature (1853)..(1853): n is a, c, g, or t
  misc_feature (1856)..(1856): n is a, c, g, or t
  misc_feature (1871)..(1871): n is a, c, g, or t
  misc_feature (1873)..(1873): n is a, c, g, or t
  misc_feature (1881)..(1881): n is a, c, g, or t
  misc_feature (1893)..(1893): n is a, c, g, or t
  misc_feature (1903)..(1903): n is a, c, g, or t
  misc_feature (1907)..(1907): n is a, c, g, or t
  misc_feature (1910)..(1910): n is a, c, g, or t
  misc_feature (1932)..(1932): n is a, c, g, or t
  misc_feature (1952)..(1952): n is a, c, g, or t
  misc_feature (1963)..(1963): n is a, c, g, or t
  misc_feature (1981)..(1981): n is a, c, g, or t
  misc_feature (2044)..(2044): n is a, c, g, or t
  misc_feature (2046)..(2046): n is a, c, g, or t
  misc_feature (2051)..(2051): n is a, c, g, or t
  misc_feature (2080)..(2080): n is a, c, g, or t
  misc_feature (2084)..(2084): n is a, c, g, or t
  misc_feature (2089)..(2089): n is a, c, g, or t
  misc_feature (2109)..(2109): n is a, c, g, or t
agcggagcgctacggggccccgccccgccgcctctcaaccatcaggttcggcagccggcggcgccgcctggcagctcctcctcttctccgccccgccggccgcgggcgcgggggacgtcagcgctgccagcgtggaaggagctgcggggcgcgggaggaggaagtagagcccgggaccgccaggccaccaccggccgcctcagccatggacgcgtccctggagaagatagcagaccccacgttagctgaaatgggaaaaaacttgaaggaggcagtgaagatgctggaggacagtcagagaagaacagaagaggaaaatggaaagaagctcatatccggagatattccaggcccactccagggcagtgggcaagatatggtgagcatcctccagttagttcagaatctcatgcatggagatgaagatgaggagccccagagccccagaatccaaaatattggagaacaaggtcatatggctttgttgggacatagtctgggagcttatatttcaactctggacaaagagaagctgagaaaacttacaactaggatactttcagataccaccttatggctatgcagaattttcagatatgaaaatgggtgtgcttatttccacgaagaggaaagagaaggacttgcaaagatatgtaggcttgccattcattctcgatatgaagacttcgtagtggatggcttcaatgtgttatataacaagaagcctgtcatatatcttagtgctgctgctagacctggcctgggccaatacctttgtaatcagctcggcttgcccttcccctgcttgtgccgtgtaccctgtaacactgtgtttggatcccagcatcagatggatgttgccttcctggagaaactgattaaagatgatatagagcgaggaagactgcccctgttgcttgtcgcaaatgcaggaacggcagcagtaggacacacagacaagattgggagattgaaagaactctgtgagcagtatggcatatggcttcatgtggagggtgtgaatctggcaacattggctctgggttatgtctcctcatcagtgctggctgcagccaaatgtgatagcatgacgatgactcctggcccgtggctgggtttgccagctgttcctgcggtgacactgtataaacacgatgaccctgccttgactttagttgctggtcttacatcaaataagcccacagacaaactccgtgccctgcctctgtggttatctttacaatacttgggacttgatgggtttgtggagaggatcaagcatgcctgtcaactgagtcaacggttgcaggaaagtttgaagaaagtgaattacatcaaaatcttggtggaagatgagctcagctccccagtggtggtgttcagatttttccaggaattaccaggctcagatccggtgtttaaagccgtcccagtgcccaacatgacaccttcaggagtcggccgggagaggcactcgtgtgacgcgctgaatcgctggctgggagaacagctgaagcagctggtgcctgcaagcggcctcacagtcatggatctggaagctgagggcacgtgtttgcggttcagccctttgatgaccgcagcagctcccgaggggctgctctcatggacaccatcaggtgctgggaagcaggaaccaccaggacctggacagagtccccagtgaccggcctggcagacagaggagccctcagctacagcatcacaaacaacgggtggggataccacatggagcattttgaggagtgctggccagnatcgacattttttcaagaagcctggttcnttttactggagattnnttttttttggagaacagagacntgggcaccagnggnggatcagaggacttntntcctgagnttgccagaaaantgttgaacanaaanttntacacaaccgaacaggcccaantttcaaatggactgagaatnacccacacaanttccaccgaggccaaggntgacctgcagccagcgacagggaaagactgccacttactggcggcctccggaactggaaggantntactnacaattttttttttcgcaagcttttaacntttntaccntcaataaaaaccccattaanattta

SEQ ID NO: 74140 - DNA, 3806 bp, Homo sapiens
  misc_feature (2567)..(2567): n is a, c, g, or t
ctggtacgcctccggattacgggatggggcccgcccgccgcctctcaaccatcaggttcggcagccggcggcgccgcctggcagctcctcctcttctccgccccgccggccgcgggcgcgggggacgtcagcgctgccagcgtggaaggagctgcggggcgcgggaggaggaagtagagcccgggaccgccaggccaccaccggccgcctcagccatggacgcgtccctggagaagatagcagaccccacgttagctgaaatgggaaaaaacttgaaggaggcagtgaagatgctggaggacagtcagagaagaacagaagaggaaaatggaaagaagctcatatccggagatattccaggcccactccagggcagtgggcaagatatggtgagcatcctccagttagttcagaatctcatgcatggagatgaagatgaggagccccagagccccagaatccaaaatattggagaacaaggtcatatggctttgttgggacatagtctgggagcttatatttcaactctggacaaagagaagctgagaaaacttacaactaggatactttcagataccaccttatggctatgcagaattttcagctcggcttgcccttcccctgcttgtgccgtgtaccctgtaacactgtgtttggatcccagcatcagatggatgttgccttcctggagaaactgattaaagatgatatagagcgaggaagactgcccctgttgcttgtcgcaaatgcaggaacggcagcagtaggacacacagacaagattgggagattgaaagaactctgtgagcagtatggcatatggcttcatgtggagggtgtgaatctggcaacattggctctgggttatgtctcctcatcagtgctggctgcagccaaatgtgatagcatgacgatgactcctggcccgtggctgggtttgccagctgttcctgcggtgacactgtataaacacgatgaccctgccttgactttagttgctggtcttacatcaaataagcccacagacaaactccgtgccctgcctctgtggttatctttacaatacttgggacttgatgggtttgtggagaggatcaagcatgcctgtcaactgagtcaacggttgcaggaaagtttgaagaaagtgaattacatcaaaatcttggtggaagatgagctcagctccccagtggtggtgttcagatttttccaggaattaccaggctcagatccggtgtttaaagccgtcccagtgcccaacatgacaccttcaggagtcggccgggagaggcactcgtgtgacgcgctgaatcgctggctgggagaacagctgaagcagctggtgcctgcaagcggcctcacagtcatggatctggaagctgagggcacgtgtttgcggttcagccctttgatgaccgcagcagttttaggaactcggggagaggatgtggatcagctcgtagcctgcatagaaagcaaactgccagtgctgtgctgtacgctccagttgcgtgaagagttcaagcaggaagtggaagcaacagcaggtctcctatatgttgatgaccctaactggtctggaataggggttgtcaggtatgaacatgctaatgatgataagagcagtttgaaatcagatcccgaaggggaaaacatccatgctggactcctgaagaagttaaatgaactggaatctgacctaacctttaaaataggccctgagtataagagcatgaagagctgcctttatgtcggcatggcgagcgacaacgtcgatgctgctgagctcgtggagaccattgcggccacagcccgggagatagaggagaactcgaggcttctggaaaacatgacagaagtggttcggaaaggcattcaggaagctcaagtggagctgcagaaggcaagtgaagaacggcttctggaagagggggtgttgcggcagatccctgtagtgggctccgtgctgaattggttttctccggtccaggctttacagaagggaagaacttttaacttgacagcaggctctctggagtccacagaacccatatatgtctacaaagcacaaggtgcaggagtcacgctgcctccaacgccctcgggcagtcgcaccaagcagaggcttccaggccagaagccttttaaaaggtccctgcgaggttcagatgctttgagtgagaccagctcagtcagtcacattgaagacttagaaaaggtggagcgcctatccagtgggccggagcagatcaccctcgaggccagcagcactgagggacacccaggggctcccagccctcagcacaccgaccagaccgaggccttccagaaaggggtcccacacccagaagatgaccactcacaggtagaaggaccggagagcttaagatgagactcattgtgtggtttgagactgtactgagtattgtttcagggaagatgaagttctattggaaatgtgaactgtgccacatactaatataaattactgttgtttgtgcttcactgggattttggcacaaatatgtgcctgaaaggtaggctttctaggaggggagtcagcttgnctaacttcatgtacatgtagaaccacgtttgctgtcctactacgacttttccctaagttaccataaacacattttattcacaaaaaacacttcgaatttcaagtgtctaccagtagcacccttgctctttctaaacataagcctaagtatatgaggttgcccgtggcaactttttggtaaaacagcttttcattagcactctccaggttctctgcaacacttcacagaggcgagactggctgtatcctttgctgtcggtctttagtacgatcaagttgcaatatacagtgggactgctagacttgaaggagagcagtgattgtgggattgtaaataagagcatcagaagccctccccagctactgctcttcgtggagacttagtaaggactgtgtctacttgagctgtggcaaggctgctgtctgggactgtcctctgccacaaggccatttctcccattatataccgtttgtaaagagaaactgtaaagtctcctcctgaccatatatttttaaatactggcaaagcttttaaaattggcacacaagtacagactgtgctcatttctgtttagtatctgaaaacctgatagatgctacccttaagagcttgctcttccgtgtgctacgtagcacccacctggttaaaatctgaaaacaagtacccctttgacctgtctcccactgaagcttctactgccctggcagctcgcctgggcccaactcagaaacaggagccagcagagcactctctcacgctgatccagccgggcaccctgcttaagtcagtagaagctcgctggcactgcccgttcctacttttccgaagtactgcgtcactttgtcgtaagtaatggcccctgtgccttcttaatccagcagtcaagcttttgggagacctgaaaatgggaaaattcacactgggtttctggactgtagtattggaagccttagttatagtatattaagcctataattatactctgatttgatgggatttttgacatttacacttgtcaaaatgcagggggttttttttggtgcagatgattaaacagtcttccctatttggtgcaatgaagtatagcagataaaatgggggaggggtaaattatcaccttcaagaaaattacatgtttttatatatatttggaattgttaaattggttttgctgaaacatttcacccttgagatattatttgaatgttggtttcaataaaggttcttgaaattgttaaa

SEQ ID NO: 74141 - DNA, 4030 bp, Homo sapiens
  misc_feature (2791)..(2791): n is a, c, g, or t
gaaaaatacgtaaatttatacctagaaaatatctgaaaggttatgtattaaactgttaacggggtggattggtggcttatagggtagggggctaggcattttcacttctaatacctgtgtttttttttgaggatttgttttacttgggtgtcacattcataatttttaatcctttaaggagaaaaatgtgcttattaaatttttggtctctgaatgctaccaagtcttagtcatacagaacaatatgctgcaactgtttacaattcctaaaactgtaaactcctcaaggacttggaggctaaacatgaagaatataaaattaagttgacaatcactgtctcctgcataacactgacttcacttctcttgagaaatgtgcatctgctaatccatatttattactttttaggggtgggtgaacccataaataagatactgttctttgaatgcctttagctggtgttatttaccagtaatgcttggagaaagaatccaaaattacccccactaaaatgctcacgacccagttgtttctgtgtttgtcaaagtgtttctggtatattctagaatataccaaagataattacttgaatcatttagaaaattttacattatatcctcttataaggcacttggaaattcaccctttttttttttcggcttggctttctaaatgtactttaacatcaatttataatattaagagttcctaaggagagagatttcttagaagaataatcgtggcttgtcttagagccacagcctttcacaatctgaagtgaatggtgcagagagctttcttgtcaagtcgtatgtttcttcctgcagctcggcttgcccttcccctgcttgtgccgtgtaccctgtaacactgtgtttggatcccagcatcagatggatgttgccttcctggagaaactgattaaagatgatatagagcgaggaagactgcccctgttgcttgtcgcaaatgcaggaacggcagcagtaggacacacagacaagattgggagattgaaagaactctgtgagcagtatggcatatggcttcatgtggagggtgtgaatctggcaacattggctctgggttatgtctcctcatcagtgctggctgcagccaaatgtgatagcatgacgatgactcctggcccgtggctgggtttgccagctgttcctgcggtgacactgtataaacacgatgaccctgccttgactttagttgctggtcttacatcaaataagcccacagacaaactccgtgccctgcctctgtggttatctttacaatacttgggacttgatgggtttgtggagaggatcaagcatgcctgtcaactgagtcaacggttgcaggaaagtttgaagaaagtgaattacatcaaaatcttggtggaagatgagctcagctccccagtggtggtgttcagatttttccaggaattaccaggctcagatccggtgtttaaagccgtcccagtgcccaacatgacaccttcaggagtcggccgggagaggcactcgtgtgacgcgctgaatcgctggctgggagaacagctgaagcagctggtgcctgcaagcggcctcacagtcatggatctggaagctgagggcacgtgtttgcggttcagccctttgatgaccgcagcagttttaggaactcggggagaggatgtggatcagctcgtagcctgcatagaaagcaaactgccagtgctgtgctgtacgctccagttgcgtgaagagttcaagcaggaagtggaagcaacagcaggtctcctatatgttgatgaccctaactggtctggaataggggttgtcaggtatgaacatgctaatgatgataagagcagtttgaaatcagatcccgaaggggaaaacatccatgctggactcctgaagaagttaaatgaactggaatctgacctaacctttaaaataggccctgagtataagagcatgaagagctgcctttatgtcggcatggcgagcgacaacgtcgatgctgctgagctcgtggagaccattgcggccacagcccgggagatagaggagaactcgaggcttctggaaaacatgacagaagtggttcggaaaggcattcaggaagctcaagtggagctgcagaaggcaagtgaagaacggcttctggaagagggggtgttgcggcagatccctgtagtgggctccgtgctgaattggttttctccggtccaggctttacagaagggaagaacttttaacttgacagcaggctctctggagtccacagaacccatatatgtctacaaagcacaaggtgcaggagtcacgctgcctccaacgccctcgggcagtcgcaccaagcagaggcttccaggccagaagccttttaaaaggtccctgcgaggttcagatgctttgagtgagaccagctcagtcagtcacattgaagacttagaaaaggtggagcgcctatccagtgggccggagcagatcaccctcgaggccagcagcactgagggacacccaggggctcccagccctcagcacaccgaccagaccgaggccttccagaaaggggtcccacacccagaagatgaccactcacaggtagaaggaccggagagcttaagatgagactcattgtgtggtttgagactgtactgagtattgtttcagggaagatgaagttctattggaaatgtgaactgtgccacatactaatataaattactgttgtttgtgcttcactgggattttggcacaaatatgtgcctgaaaggtaggctttctaggaggggagtcagcttgnctaacttcatgtacatgtagaaccacgtttgctgtcctactacgacttttccctaagttaccataaacacattttattcacaaaaaacacttcgaatttcaagtgtctaccagtagcacccttgctctttctaaacataagcctaagtatatgaggttgcccgtggcaactttttggtaaaacagcttttcattagcactctccaggttctctgcaacacttcacagaggcgagactggctgtatcctttgctgtcggtctttagtacgatcaagttgcaatatacagtgggactgctagacttgaaggagagcagtgattgtgggattgtaaataagagcatcagaagccctccccagctactgctcttcgtggagacttagtaaggactgtgtctacttgagctgtggcaaggctgctgtctgggactgtcctctgccacaaggccatttctcccattatataccgtttgtaaagagaaactgtaaagtctcctcctgaccatatatttttaaatactggcaaagcttttaaaattggcacacaagtacagactgtgctcatttctgtttagtatctgaaaacctgatagatgctacccttaagagcttgctcttccgtgtgctacgtagcacccacctggttaaaatctgaaaacaagtacccctttgacctgtctcccactgaagcttctactgccctggcagctcgcctgggcccaactcagaaacaggagccagcagagcactctctcacgctgatccagccgggcaccctgcttaagtcagtagaagctcgctggcactgcccgttcctacttttccgaagtactgcgtcactttgtcgtaagtaatggcccctgtgccttcttaatccagcagtcaagcttttgggagacctgaaaatgggaaaattcacactgggtttctggactgtagtattggaagccttagttatagtatattaagcctataattatactctgatttgatgggatttttgacatttacacttgtcaaaatgcagggggttttttttggtgcagatgattaaacagtcttccctatttggtgcaatgaagtatagcagataaaatgggggaggggtaaattatcaccttcaagaaaattacatgtttttatatatatttggaattgttaaattggttttgctgaaacatttcacccttgagatattatttgaatgttggtttcaataaaggttcttgaaattgttaaa

SEQ ID NO: 74142 - DNA, 3175 bp, Homo sapiens
  misc_feature (1936)..(1936): n is a, c, g, or t
atactaggcacctcattttttaatgatttgttttggttccaggatgttgccttcctggagaaactgattaaagatgatatagagcgaggaagactgcccctgttgcttgtcgcaaatgcaggaacggcagcagtaggacacacagacaagattgggagattgaaagaactctgtgagcagtatggcatatggcttcatgtggagggtgtgaatctggcaacattggctctgggttatgtctcctcatcagtgctggctgcagccaaatgtgatagcatgacgatgactcctggcccgtggctgggtttgccagctgttcctgcggtgacactgtataaacacgatgaccctgccttgactttagttgctggtcttacatcaaataagcccacagacaaactccgtgccctgcctctgtggttatctttacaatacttgggacttgatgggtttgtggagaggatcaagcatgcctgtcaactgagtcaacggttgcaggaaagtttgaagaaagtgaattacatcaaaatcttggtggaagatgagctcagctccccagtggtggtgttcagatttttccaggaattaccaggctcagatccggtgtttaaagccgtcccagtgcccaacatgacaccttcaggagtcggccgggagaggcactcgtgtgacgcgctgaatcgctggctgggagaacagctgaagcagctggtgcctgcaagcggcctcacagtcatggatctggaagctgagggcacgtgtttgcggttcagccctttgatgaccgcagcagttttaggaactcggggagaggatgtggatcagctcgtagcctgcatagaaagcaaactgccagtgctgtgctgtacgctccagttgcgtgaagagttcaagcaggaagtggaagcaacagcaggtctcctatatgttgatgaccctaactggtctggaataggggttgtcaggtatgaacatgctaatgatgataagagcagtttgaaatcagatcccgaaggggaaaacatccatgctggactcctgaagaagttaaatgaactggaatctgacctaacctttaaaataggccctgagtataagagcatgaagagctgcctttatgtcggcatggcgagcgacaacgtcgatgctgctgagctcgtggagaccattgcggccacagcccgggagatagaggagaactcgaggcttctggaaaacatgacagaagtggttcggaaaggcattcaggaagctcaagtggagctgcagaaggcaagtgaagaacggcttctggaagagggggtgttgcggcagatccctgtagtgggctccgtgctgaattggttttctccggtccaggctttacagaagggaagaacttttaacttgacagcaggctctctggagtccacagaacccatatatgtctacaaagcacaaggtgcaggagtcacgctgcctccaacgccctcgggcagtcgcaccaagcagaggcttccaggccagaagccttttaaaaggtccctgcgaggttcagatgctttgagtgagaccagctcagtcagtcacattgaagacttagaaaaggtggagcgcctatccagtgggccggagcagatcaccctcgaggccagcagcactgagggacacccaggggctcccagccctcagcacaccgaccagaccgaggccttccagaaaggggtcccacacccagaagatgaccactcacaggtagaaggaccggagagcttaagatgagactcattgtgtggtttgagactgtactgagtattgtttcagggaagatgaagttctattggaaatgtgaactgtgccacatactaatataaattactgttgtttgtgcttcactgggattttggcacaaatatgtgcctgaaaggtaggctttctaggaggggagtcagcttgnctaacttcatgtacatgtagaaccacgtttgctgtcctactacgacttttccctaagttaccataaacacattttattcacaaaaaacacttcgaatttcaagtgtctaccagtagcacccttgctctttctaaacataagcctaagtatatgaggttgcccgtggcaactttttggtaaaacagcttttcattagcactctccaggttctctgcaacacttcacagaggcgagactggctgtatcctttgctgtcggtctttagtacgatcaagttgcaatatacagtgggactgctagacttgaaggagagcagtgattgtgggattgtaaataagagcatcagaagccctccccagctactgctcttcgtggagacttagtaaggactgtgtctacttgagctgtggcaaggctgctgtctgggactgtcctctgccacaaggccatttctcccattatataccgtttgtaaagagaaactgtaaagtctcctcctgaccatatatttttaaatactggcaaagcttttaaaattggcacacaagtacagactgtgctcatttctgtttagtatctgaaaacctgatagatgctacccttaagagcttgctcttccgtgtgctacgtagcacccacctggttaaaatctgaaaacaagtacccctttgacctgtctcccactgaagcttctactgccctggcagctcgcctgggcccaactcagaaacaggagccagcagagcactctctcacgctgatccagccgggcaccctgcttaagtcagtagaagctcgctggcactgcccgttcctacttttccgaagtactgcgtcactttgtcgtaagtaatggcccctgtgccttcttaatccagcagtcaagcttttgggagacctgaaaatgggaaaattcacactgggtttctggactgtagtattggaagccttagttatagtatattaagcctataattatactctgatttgatgggatttttgacatttacacttgtcaaaatgcagggggttttttttggtgcagatgattaaacagtcttccctatttggtgcaatgaagtatagcagataaaatgggggaggggtaaattatcaccttcaagaaaattacatgtttttatatatatttggaattgttaaattggttttgctgaaacatttcacccttgagatattatttgaatgttggtttcaataaaggttcttgaaattgttaaa

SEQ ID NO: 74143 - DNA, 2551 bp, Homo sapiens
agcggagcgctacggggccccgccccgccgcctctcaaccatcaggttcggcagccggcggcgccgcctggcagctcctcctcttctccgccccgccggccgcgggcgcgggggacgtcagcgctgccagcgtggaaggagctgcggggcgcgggaggaggaagtagagcccgggaccgccaggccaccaccggccgcctcagccatggacgcgtccctggagaagatagcagaccccacgttagctgaaatgggaaaaaacttgaaggaggcagtgaagatgctggaggacagtcagagaagaacagaagaggaaaatggaaagaagctcatatccggagatattccaggcccactccagggcagtgggcaagatatggtgagcatcctccagttagttcagaatctcatgcatggagatgaagatgaggagccccagagccccagaatccaaaatattggagaacaaggtcatatggctttgttgggacatagtctgggagcttatatttcaactctggacaaagagaagctgagaaaacttacaactaggatactttcagataccaccttatggctatgcagaattttcagatatgaaaatgggtgtgcttatttccacgaagaggaaagagaaggacttgcaaagatatgtaggcttgccattcattctcgatatgaagacttcgtagtggatggcttcaatgtgttatataacaagaagcctgtcatatatcttagtgctgctgctagacctggcctgggccaatacctttgtaatcagctcggcttgcccttcccctgcttgtgccgtgtaccctgtaacactgtgtttggatcccagcatcagatggatgttgccttcctggagaaactgattaaagatgatatagagcgaggaagactgcccctgttgcttgtcgcaaatgcaggaacggcagcagtaggacacacagacaagattgggagattgaaagaactctgtgagcagtatggcatatggcttcatgtggaggggtaagctggcggtgaggctggtggctccattcgggcctgcacagagtccttatgaggactggacatccaggctctcactttggtgacatttatcacgaagggctctttgggtcacagatcacaaaataacccaaattggcttaagcccaaagagatcttactggctcacataactacaaagagcagtgttatgactgcctcaggcacgacatcaaccaggatccagtgtgttactcccacctctgctcccccagtcacaggcactgggcttggtttcctctatctgtggacagatcttcctgttacagtgcaaagtagctgcagaaactccagccttctttccagcttcgtggtcagctggaagtcctaacagaagtctcgtattgaaccagccactgtggccagggagaagtaatcctctgatagttgaggttctttgctctcctctggagcagatagtggtgtctcctccccacaaagctcatgttctgctggaagaaatggagatggcgccctggaaggctattgtagggccattaagagaagcagggggaacggacgtgggcagccagagtagcccatatccaccacatcatacagggaggtttctttttgatccctaagtaaagaatgataactggaaaataagatccatgaaagagaataatactcccattatattaaatgagcggggatagttcctgagacacatttttattaaagtgcattttcaggattttccttcatatgtataaagcacaccttctgttgctgttaatgaaagctaataacattaaaaatatacttaagtgtcaacttgcaacagcacagcctttatttttttaagtacatggtgagtaagcaacattaaataattagttcttggactggtgttttttcttccagtgtgaatctggcaacattggctctgggttatgtctcctcatcagtgctggtatgttgttgatttactgaatattggtgtttttaagaatgaatttaaaatcactcaatccctcctggctcttcacagtttttatgaatggaggagggtgttaggtttgtgtattctgataatctaacaaagagttgttcttgttttggtaggctgcagccaaatgtgatagcatgacgatgactcctggcccgtggctgggtttgccagctgttcctgcggtgacactgtataaacacgatgaccctgccttgactttagttgctggtcttacatcaaataagcccacagacaaactccgtgccctgcctctgtggttatctttacaatacttgggacttgatgggtttgtggagaggatcaagcatgcctgtcaactgagtcaacggttgcaggaaagtttgaagaaagtgaattacatcaaaatcttggtatagtatataatttcatctgttttcaaaatataactttttttgaacttcagcaacttagaatgattttagaactttagaatgattttctccacatttcagtggaattgtggcagctccagtaaaaaacaaaacaaaaaacaaaaac

SEQ ID NO: 74144 - DNA, 3045 bp, Homo sapiens
  misc_feature (1806)..(1806): n is a, c, g, or t
tccctttaaagagtagcggaggctgggtggcgaaagaactctgtgagcagtatggcatatggcttcatgtggagggtgtgaatctggcaacattggctctgggttatgtctcctcatcagtgctggctgcagccaaatgtgatagcatgacgatgactcctggcccgtggctgggtttgccagctgttcctgcggtgacactgtataaacacgatgaccctgccttgactttagttgctggtcttacatcaaataagcccacagacaaactccgtgccctgcctctgtggttatctttacaatacttgggacttgatgggtttgtggagaggatcaagcatgcctgtcaactgagtcaacggttgcaggaaagtttgaagaaagtgaattacatcaaaatcttggtggaagatgagctcagctccccagtggtggtgttcagatttttccaggaattaccaggctcagatccggtgtttaaagccgtcccagtgcccaacatgacaccttcaggagtcggccgggagaggcactcgtgtgacgcgctgaatcgctggctgggagaacagctgaagcagctggtgcctgcaagcggcctcacagtcatggatctggaagctgagggcacgtgtttgcggttcagccctttgatgaccgcagcagttttaggaactcggggagaggatgtggatcagctcgtagcctgcatagaaagcaaactgccagtgctgtgctgtacgctccagttgcgtgaagagttcaagcaggaagtggaagcaacagcaggtctcctatatgttgatgaccctaactggtctggaataggggttgtcaggtatgaacatgctaatgatgataagagcagtttgaaatcagatcccgaaggggaaaacatccatgctggactcctgaagaagttaaatgaactggaatctgacctaacctttaaaataggccctgagtataagagcatgaagagctgcctttatgtcggcatggcgagcgacaacgtcgatgctgctgagctcgtggagaccattgcggccacagcccgggagatagaggagaactcgaggcttctggaaaacatgacagaagtggttcggaaaggcattcaggaagctcaagtggagctgcagaaggcaagtgaagaacggcttctggaagagggggtgttgcggcagatccctgtagtgggctccgtgctgaattggttttctccggtccaggctttacagaagggaagaacttttaacttgacagcaggctctctggagtccacagaacccatatatgtctacaaagcacaaggtgcaggagtcacgctgcctccaacgccctcgggcagtcgcaccaagcagaggcttccaggccagaagccttttaaaaggtccctgcgaggttcagatgctttgagtgagaccagctcagtcagtcacattgaagacttagaaaaggtggagcgcctatccagtgggccggagcagatcaccctcgaggccagcagcactgagggacacccaggggctcccagccctcagcacaccgaccagaccgaggccttccagaaaggggtcccacacccagaagatgaccactcacaggtagaaggaccggagagcttaagatgagactcattgtgtggtttgagactgtactgagtattgtttcagggaagatgaagttctattggaaatgtgaactgtgccacatactaatataaattactgttgtttgtgcttcactgggattttggcacaaatatgtgcctgaaaggtaggctttctaggaggggagtcagcttgnctaacttcatgtacatgtagaaccacgtttgctgtcctactacgacttttccctaagttaccataaacacattttattcacaaaaaacacttcgaatttcaagtgtctaccagtagcacccttgctctttctaaacataagcctaagtatatgaggttgcccgtggcaactttttggtaaaacagcttttcattagcactctccaggttctctgcaacacttcacagaggcgagactggctgtatcctttgctgtcggtctttagtacgatcaagttgcaatatacagtgggactgctagacttgaaggagagcagtgattgtgggattgtaaataagagcatcagaagccctccccagctactgctcttcgtggagacttagtaaggactgtgtctacttgagctgtggcaaggctgctgtctgggactgtcctctgccacaaggccatttctcccattatataccgtttgtaaagagaaactgtaaagtctcctcctgaccatatatttttaaatactggcaaagcttttaaaattggcacacaagtacagactgtgctcatttctgtttagtatctgaaaacctgatagatgctacccttaagagcttgctcttccgtgtgctacgtagcacccacctggttaaaatctgaaaacaagtacccctttgacctgtctcccactgaagcttctactgccctggcagctcgcctgggcccaactcagaaacaggagccagcagagcactctctcacgctgatccagccgggcaccctgcttaagtcagtagaagctcgctggcactgcccgttcctacttttccgaagtactgcgtcactttgtcgtaagtaatggcccctgtgccttcttaatccagcagtcaagcttttgggagacctgaaaatgggaaaattcacactgggtttctggactgtagtattggaagccttagttatagtatattaagcctataattatactctgatttgatgggatttttgacatttacacttgtcaaaatgcagggggttttttttggtgcagatgattaaacagtcttccctatttggtgcaatgaagtatagcagataaaatgggggaggggtaaattatcaccttcaagaaaattacatgtttttatatatatttggaattgttaaattggttttgctgaaacatttcacccttgagatattatttgaatgttggtttcaataaaggttcttgaaattgttaaa

SEQ ID NO: 74145 - DNA, 2890 bp, Homo sapiens
agcggagcgctacggggccccgccccgccgcctctcaaccatcaggttcggcagccggcggcgccgcctggcagctcctcctcttctccgccccgccggccgcgggcgcgggggacgtcagcgctgccagcgtggaaggagctgcggggcgcgggaggaggaagtagagcccgggaccgccaggccaccaccggccgcctcagccatggacgcgtccctggagaagatagcagaccccacgttagctgaaatgggaaaaaacttgaaggaggcagtgaagatgctggaggacagtcagagaagaacagaagaggaaaatggaaagaagctcatatccggagatattccaggcccactccagggcagtgggcaagatatggtgagcatcctccagttagttcagaatctcatgcatggagatgaagatgaggagccccagagccccagaatccaaaatattggagaacaaggtcatatggctttgttgggacatagtctgggagcttatatttcaactctggacaaagagaagctgagaaaacttacaactaggatactttcagataccaccttatggctatgcagaattttcagatatgaaaatgggtgtgcttatttccacgaagaggaaagagaaggacttgcaaagatatgtaggcttgccattcattctcgatatgaagacttcgtagtggatggcttcaatgtgttatataacaagaagcctgtcatatatcttagtgctgctgctagacctggcctgggccaatacctttgtaatcagctcggcttgcccttcccctgcttgtgccgtgtaccctgtaacactgtgtttggatcccagcatcagatggatgttgccttcctggagaaactgattaaagatgatatagagcgaggaagactgcccctgttgcttgtcgcaaatgcaggaacggcagcagtaggacacacagacaagattgggagattgaaagaactctgtgagcagtatggcatatggcttcatgtggaggggtaagctggcggtgaggctggtggctccattcgggcctgcacagagtccttatgaggactggacatccaggctctcactttggtgacatttatcacgaagggctctttgggtcacagatcacaaaataacccaaattggcttaagcccaaagagatcttactggctcacataactacaaagagcagtgttatgactgcctcaggcacgacatcaaccaggatccagtgtgttactcccacctctgctcccccagtcacaggcactgggcttggtttcctctatctgtggacagatcttcctgttacagtgcaaagtagctgcagaaactccagccttctttccagcttcgtggtcagctggaagtcctaacagaagtctcgtattgaaccagccactgtggccagggagaagtaatcctctgatagttgaggttctttgctctcctctggagcagatagtggtgtctcctccccacaaagctcatgttctgctggaagaaatggagatggcgccctggaaggctattgtagggccattaagagaagcagggggaacggacgtgggcagccagagtagcccatatccaccacatcatacagggaggtttctttttgatccctaagtaaagaatgataactggaaaataagatccatgaaagagaataatactcccattatattaaatgagcggggatagttcctgagacacatttttattaaagtgcattttcaggattttccttcatatgtataaagcacaccttctgttgctgttaatgaaagctaataacattaaaaatatacttaagtgtcaacttgcaacagcacagcctttatttttttaagtacatggtgagtaagcaacattaaataattagttcttggactggtgttttttcttccagtgtgaatctggcaacattggctctgggttatgtctcctcatcagtgctggtatgttgttgatttactgaatattggtgtttttaagaatgaatttaaaatcactcaatccctcctggctcttcacagtttttatgaatggaggagggtgttaggtttgtgtattctgataatctaacaaagagttgttcttgttttggtaggctgcagccaaatgtgatagcatgacgatgactcctggcccgtggctgggtttgccagctgttcctgcggtgacactgtataaacacgatgaccctgccttgactttagttgctggtcttacatcaaataagcccacagacaaactccgtgccctgcctctgtggttatctttacaatacttgggacttgatgggtttgtggagaggatcaagcatgcctgtcaactggtgagtagaagcctgacatttaaatgaaagactccttggccacagcagagacagaaaaacatctcatttctgtaccttccatccagagtggtgttgtctggattgactgtctcgtgagccagagactaatcgccctgcatgtaaatatttcttgttcaaagttctgggagaaagtgctgggttgtctgtcccagcatttgtgtgcagatgaaatcagatgaaaaggaacaccactgtcagcatgggatcagaaaagaagtcacagatgacttccaaggagtggagaagggtgcaaaaggtggaggggtggggagcgagtgttccccttgattgactgactacggtgagggaataggaaggttacaaggtggttatggagggcatggatattttaaaaaccagctggcttgggtttccaaattgcagggctcttggggacaattctaattctctctccattttaggtgtgttctaattgtgaaaaatatataattatgctatatttcagtgttttagagcattcagccttctataacaa

SEQ ID NO: 74146 - DNA, 2367 bp, Homo sapiens
agcggagcgctacggggccccgccccgccgcctctcaaccatcaggttcggcagccggcggcgccgcctggcagctcctcctcttctccgccccgccggccgcgggcgcgggggacgtcagcgctgccagcgtggaaggagctgcggggcgcgggaggaggaagtagagcccgggaccgccaggccaccaccggccgcctcagccatggacgcgtccctggagaagatagcagaccccacgttagctgaaatgggaaaaaacttgaaggaggcagtgaagatgctggaggacagtcagagaagaacagaagaggaaaatggaaagaagctcatatccggagatattccaggcccactccagggcagtgggcaagatatggtgagcatcctccagttagttcagaatctcatgcatggagatgaagatgaggagccccagagccccagaatccaaaatattggagaacaaggtcatatggctttgttgggacatagtctgggagcttatatttcaactctggacaaagagaagctgagaaaacttacaactaggatactttcagataccaccttatggctatgcagaattttcagatatgaaaatgggtgtgcttatttccacgaagaggaaagagaaggacttgcaaagatatgtaggcttgccattcattctcgatatgaagacttcgtagtggatggcttcaatgtgttatataacaagaagcctgtcatatatcttagtgctgctgctagacctggcctgggccaatacctttgtaatcagctcggcttgcccttcccctgcttgtgccgtgtaccctgtaacactgtgtttggatcccagcatcagatggatgttgccttcctggagaaactgattaaagatgatatagagcgaggaagactgcccctgttgcttgtcgcaaatgcaggaacggcagcagtaggacacacagacaagattgggagattgaaagaactctgtgagcagtatggcatatggcttcatgtggaggggtaagctggcggtgaggctggtggctccattcgggcctgcacagagtccttatgaggactggacatccaggctctcactttggtgacatttatcacgaagggctctttgggtcacagatcacaaaataacccaaattggcttaagcccaaagagatcttactggctcacataactacaaagagcagtgttatgactgcctcaggcacgacatcaaccaggatccagtgtgttactcccacctctgctcccccagtcacaggcactgggcttggtttcctctatctgtggacagatcttcctgttacagtgcaaagtagctgcagaaactccagccttctttccagcttcgtggtcagctggaagtcctaacagaagtctcgtattgaaccagccactgtggccagggagaagtaatcctctgatagttgaggttctttgctctcctctggagcagatagtggtgtctcctccccacaaagctcatgttctgctggaagaaatggagatggcgccctggaaggctattgtagggccattaagagaagcagggggaacggacgtgggcagccagagtagcccatatccaccacatcatacagggaggtttctttttgatccctaagtaaagaatgataactggaaaataagatccatgaaagagaataatactcccattatattaaatgagcggggatagttcctgagacacatttttattaaagtgcattttcaggattttccttcatatgtataaagcacaccttctgttgctgttaatgaaagctaataacattaaaaatatacttaagtgtcaacttgcaacagcacagcctttatttttttaagtacatggtgagtaagcaacattaaataattagttcttggactggtgttttttcttccagtgtgaatctggcaacattggctctgggttatgtctcctcatcagtgctggtatgttgttgatttactgaatattggtgtttttaagaatgaatttaaaatcactcaatccctcctggctcttcacagtttttatgaatggaggagggtgttaggtttgtgtattctgataatctaacaaagagttgttcttgttttggtaggctgcagccaaatgtgatagcatgacgatgactcctggcccgtggctgggtttgccagctgttcctgcggtgacactgtataaacacgatgaccctgccttggtaagtttcccctcactgcggagggagtgggtgtggctaatacacattattggctttgggggcaaaatccagaaaaatacaggaaaaagtgaaaaatacccataatttcacttctatttcatttttttaaagagaaacttg

SEQ ID NO: 74147 - DNA, 3282 bp, Homo sapiens
  misc_feature (2043)..(2043): n is a, c, g, or t
gccgtgtacccaaggtcccttagcctctgagtagtggggaccacagcacataccaccacagccaggtaatttgtgtagtatttgtaaagacaggtctcactatgtgcctaggctggttttgcactcctggccgcaagcaatcctcctgtctcagcctcccatagcacagaagttacaggaatatgaaccacatctggccagcaccaagtattttgacaaagcacctattagggtaattccaagtaatctctggcaaacatggtttcagttaggcaagactacaagaaaccgcccacatctatttggtaaaaatctgtgctcccctttcctacttgagtagacacgctcacaaacagacacaaaggcagacccctccctctagtttttctaacataccagagccccctgcaaacacccgaggccctcaatgctgattttcactggaatctcatcacagttgggcttaagggacccttgggccaaggtcccttaagcccacagacaaactccgtgccctgcctctgtggttatctttacaatacttgggacttgatgggtttgtggagaggatcaagcatgcctgtcaactgagtcaacggttgcaggaaagtttgaagaaagtgaattacatcaaaatcttggtggaagatgagctcagctccccagtggtggtgttcagatttttccaggaattaccaggctcagatccggtgtttaaagccgtcccagtgcccaacatgacaccttcaggagtcggccgggagaggcactcgtgtgacgcgctgaatcgctggctgggagaacagctgaagcagctggtgcctgcaagcggcctcacagtcatggatctggaagctgagggcacgtgtttgcggttcagccctttgatgaccgcagcagttttaggaactcggggagaggatgtggatcagctcgtagcctgcatagaaagcaaactgccagtgctgtgctgtacgctccagttgcgtgaagagttcaagcaggaagtggaagcaacagcaggtctcctatatgttgatgaccctaactggtctggaataggggttgtcaggtatgaacatgctaatgatgataagagcagtttgaaatcagatcccgaaggggaaaacatccatgctggactcctgaagaagttaaatgaactggaatctgacctaacctttaaaataggccctgagtataagagcatgaagagctgcctttatgtcggcatggcgagcgacaacgtcgatgctgctgagctcgtggagaccattgcggccacagcccgggagatagaggagaactcgaggcttctggaaaacatgacagaagtggttcggaaaggcattcaggaagctcaagtggagctgcagaaggcaagtgaagaacggcttctggaagagggggtgttgcggcagatccctgtagtgggctccgtgctgaattggttttctccggtccaggctttacagaagggaagaacttttaacttgacagcaggctctctggagtccacagaacccatatatgtctacaaagcacaaggtgcaggagtcacgctgcctccaacgccctcgggcagtcgcaccaagcagaggcttccaggccagaagccttttaaaaggtccctgcgaggttcagatgctttgagtgagaccagctcagtcagtcacattgaagacttagaaaaggtggagcgcctatccagtgggccggagcagatcaccctcgaggccagcagcactgagggacacccaggggctcccagccctcagcacaccgaccagaccgaggccttccagaaaggggtcccacacccagaagatgaccactcacaggtagaaggaccggagagcttaagatgagactcattgtgtggtttgagactgtactgagtattgtttcagggaagatgaagttctattggaaatgtgaactgtgccacatactaatataaattactgttgtttgtgcttcactgggattttggcacaaatatgtgcctgaaaggtaggctttctaggaggggagtcagcttgnctaacttcatgtacatgtagaaccacgtttgctgtcctactacgacttttccctaagttaccataaacacattttattcacaaaaaacacttcgaatttcaagtgtctaccagtagcacccttgctctttctaaacataagcctaagtatatgaggttgcccgtggcaactttttggtaaaacagcttttcattagcactctccaggttctctgcaacacttcacagaggcgagactggctgtatcctttgctgtcggtctttagtacgatcaagttgcaatatacagtgggactgctagacttgaaggagagcagtgattgtgggattgtaaataagagcatcagaagccctccccagctactgctcttcgtggagacttagtaaggactgtgtctacttgagctgtggcaaggctgctgtctgggactgtcctctgccacaaggccatttctcccattatataccgtttgtaaagagaaactgtaaagtctcctcctgaccatatatttttaaatactggcaaagcttttaaaattggcacacaagtacagactgtgctcatttctgtttagtatctgaaaacctgatagatgctacccttaagagcttgctcttccgtgtgctacgtagcacccacctggttaaaatctgaaaacaagtacccctttgacctgtctcccactgaagcttctactgccctggcagctcgcctgggcccaactcagaaacaggagccagcagagcactctctcacgctgatccagccgggcaccctgcttaagtcagtagaagctcgctggcactgcccgttcctacttttccgaagtactgcgtcactttgtcgtaagtaatggcccctgtgccttcttaatccagcagtcaagcttttgggagacctgaaaatgggaaaattcacactgggtttctggactgtagtattggaagccttagttatagtatattaagcctataattatactctgatttgatgggatttttgacatttacacttgtcaaaatgcagggggttttttttggtgcagatgattaaacagtcttccctatttggtgcaatgaagtatagcagataaaatgggggaggggtaaattatcaccttcaagaaaattacatgtttttatatatatttggaattgttaaattggttttgctgaaacatttcacccttgagatattatttgaatgttggtttcaataaaggttcttgaaattgttaaa

SEQ ID NO: 74148 - DNA, 1065 bp, Homo sapiens
agcggagcgctacggggccccgccccgccgcctctcaaccatcaggttcggcagccggcggcgccgcctggcagctcctcctcttctccgccccgccggccgcgggcgcgggggacgtcagcgctgccagcgtggaaggagctgcggggcgcgggaggaggaagtagagcccgggaccgccaggccaccaccggccgcctcagccatggacgcgtccctggagaagatagcagaccccacgttagctgaaatgggaaaaaacttgaaggaggcagtgaagatgctggaggacagtcagagaagaacagaagaggaaaatggaaagaagctcatatccggagatattccaggcccactccagggcagtgggcaagatatggtgagcatcctccagttagttcagaatctcatgcatggagatgaagatgaggagccccagagccccagaatccaaaatattggagaacaaggtcatatggctttgttgggacatagtctgggagcttatatttcaactctggacaaagagaagctgagaaaacttacaactaggatactttcagataccaccttatggctatgcagaattttcagatatgaaaatgggtgtgcttatttccacgaagaggaaagagaaggacttgcaaagatatgtaggcttgccattcattctcgatatgaagacttcgtagtggatggcttcaatgtgttatataacaagaagcctgtcatatatcttagtgctgctgctagacctggcctgggccaatacctttgtaatcagctcggcttgcccttcccctgcttgtgccgtgtaccctgtaacactgtgtttggatcccagcatcagatggggttttttttggtgcagatgattaaacagtcttccctatttggtgcaatgaagtatagcagataaaatgggggaggggtaaattatcaccttcaagaaaattacatgtttttatatatatttggaattgttaaattggttttgctgaaacatttcacccttgagatattatttgaatgttggtttcaataaaggttcttgaaattgttaaa

SEQ ID NO: 74149 - DNA, 2484 bp, Homo sapiens
tgcctatcctgcctgaggggactccatcattttctatcagagcccccagcttcacttgtgacactaacaaccacatggagtgattttctttctttatggtctgtttcctcaactaaaatgtaagctccaagatgacagaaaccttacctgccttctgtcccaagtgtcaggctctgtgcctggcacgggtgggcacccactgtgaggcctagttagatgatcgtggcactcacagacctcgcacggtgcttggtaaactagttagtaacttaaaacaattgctgtttccccttgaaatcccttgaaagcaaaccttttcaaaaatgaaattaataattctgtcttatgtgaatgtattcaagtgttacatagatcacgaggagaaagaaatgtagcccttctgtcagataatacatgagaattcagtaatacgagtcagtgccctggggctaatattgggatgggaatgatgtggggtttggagggtgttttttttttggtcagccgtgtttctgggagtgactccctttctgtgttttggtgtcagatccggtgtttaaagccgtcccagtgcccaacatgacaccttcaggagtcggccgggagaggcactcgtgtgacgcgctgaatcgctgggtgagaatggcagtcacccccctttcctttcaggtccccgtccatcaccatccgacctgctggtgagggtgacgcgtgctcgtgtatgggaactgaggcccacaggaggagccgccctgccagtgctgggcctgctctggagttctgttccccattgccgttaccacctcacgaagctgggtcacctctggcaagtccttcctggcattgctccctcactttccttgctgctgtataaggctgtgagacaacaggcaaaaggtgggctgcagggcagctgcagtgggttctggtgagcctgggcagcacagccgggagccccaggcagagtctgccgagcatctgcagctggcagtgtggagccaggcctgcactttgatagcgttttgggcactgaatagcagctctaggatttgagtctgaagggtcttgtgaacagtgtgggatggcggcagcagcggttctagccaatgctggacacgcccagcctagcagggttggcagataagtcctggtacatccatgctggggctcagcacagctgtgagagaccacagagctgagtgtctcaagcagaaaggaactggtcataaacgaaatgaatcaatgcaggttactaagcagtgtcaagtagcatgttttatgacaacaactacaactccctgcccgccactaggagaaaagacgctgggggcagaccacatgtcagcagtgggtgtcgcttagtaatatattgtgggtcattgttattttcttctttttgtttacttgtatttcctaaatttttctacaatgaacttgtattaataagaaaaaaccataaaatttactgtttttaaaaagctgctctaagtaatcagacagtcaaaagagcaggaatcagctctccaggaggctctttggtctggggccgaggggatgagggtgggtcctgaagacgtctgagtcccttgttacaggagggtgttcattgtgtcctcctcacagctgggagaacagctgaagcagctggtgcctgcaagcggcctcacagtcatggatctggaagctgagggcacgtgtttgcggttcagccctttgatgaccgcagcaggtaaaccaggcttggtggacatcccttgcttttgttctggggctgctgggtagattagcttgcccttatgatactccattctcctagagttattagcagctctttttggaggggcattttcttttcttttgggctaaatttaggtagattagcattcccatgtaacttaccagaatcagaatgagaattcagaagtcacctgaattggccgggcatggtggctcacacctgtaatcccagcaccttgggaggccaaggcaggcagatcatctgaggtcaggagttcgagaccagcctggccaacatagtgaaatcccgcccctactaaaaatacaaaaaattagccaggcaccctgtccacagcccccacacagactcgaggggcccccatctcctgttctgaacccaacagggtggtcccactgtgggaccacaaccaggtatgactgtgtgagaagcaggctcactaccaggctaccagggagcacaggggagcaggcgccaccttgaggcataaacccagagaaacaagacctccaagacggccaggcactggggcacacgccggtaacacagcaccgtgggagctgagacggaaggatcgcctgagcccaggattttgaaaccaccctgggcaacacagtgagaccccgtatctacaaaaaaatacacattagccaggcatggtggcatgcgcctggggtcccaagtactcgggaggtagaggagagaaaaatcacttgagcccagagagg

SEQ ID NO: 74150 - DNA, 1046 bp, Homo sapiens
agcggagcgctacggggccccgccccgccgcctctcaaccatcaggttcggcagccggcggcgccgcctggcagctcctcctcttctccgccccgccggccgcgggcgcgggggacgtcagcgctgccagcgtggaaggagctgcggggcgcgggaggaggaagtagagcccgggaccgccaggccaccaccggccgcctcagccatggacgcgtccctggagaagatagcagaccccacgttagctgaaatgggaaaaaacttgaaggaggcagtgaagatgctggaggacagtcagagaagaacagaagaggaaaatggaaagaagctcatatccggagatattccaggcccactccagggcagtgggcaagatatggtgagcatcctccagttagttcagaatctcatgcatggagatgaagatgaggagccccagagccccagaatccaaaatattggagaacaaggtcatatggctttgttgggacatagtctgggagcttatatttcaactctggacaaagagaagctgagaaaacttacaactaggatactttcagataccaccttatggctatgcagaattttcagatatgaaaatgggtgtgcttatttccacgaagaggaaagagaaggacttgcaaagatatgtaggcttgccattcattctcgatatgaagacttcgtagtggatggcttcaatgtgttatataacaagaagcctgtcatatatcttagtgctgctgctagacctggcctgggccaatacctttgtaatcaggtaatgtggtatcaggtggctattttaaagaaataatgtcttattttgttctgaaagttttaaagttgacccgtttgtctagttgctgttcttgttgagtgaaaagaaagatggtcttatatgcttttgtcatatttgtaaaaattactgaatttagaaataaggaatatgtgatagattacccaagggcatccacagtcaacattttctcttttttcccagactttaatcgaagggggtgtgtttgtgtttatatggttgt

SEQ ID NO: 74151 - DNA, 1062 bp, Homo sapiens
aagtcagcaggcagtaagcaagaggaggaatcaatatagcaacagtttggatcagactgtacagtttttttttgtttttctgagatggagtctcgctgtgtcacccaggctggagtgcaatgacgtgatcctggctcactgcaacctccgcctcccaggttcaagtgattcccctgcctcagcctcccgagtagctgggattacaggtgcctgccaccacgcccggctaattttttgtatttttagtagagacggggtttcaccgtattagccaggatggtctcaatctcctgacctcgtgatccatctgcctcgccctcccagagtgctgggactacaggcgtcagccaccgcgaccagctcagactgtactcttatagccctctgaaatacgttttctaggtagagatagattgtgtaagggtacagttatgaggataacagaaacgtggcagattatttaaaatcatcctgaaagtggtgctttatctgatgaaagtgattgtaatccataggaaaatgtttcaacgtgcgcaagagttgcggtggcgggcagaggactaccacaaatgcaaaatcaccccctctgcaagaaagcctctttgcaactgggtcagaatggcggcagcggagcatcgtcattcttcaggattgccctgctggccctacctcacagctgaaactttaaaaaacaggatgggccgccagccacctcctccaactcaacaacattctataactgataactccctgagcctcaagacacctcccgaatgtcttcttattccccttccaccctctcctcttccaccctccgtggatgataatctcaagactcctcccttagctactcaggaggccgaggcagaaaaatcactgaaacccaagaggcagaggttgagtaagctgagaacaggtcattgcactcaagcctgggcaataagaagaaatctgtgagtggaacaaaagaaaaaaatcaaaaaacaaaacaaaacccacactccaaaaacaaactaacaaagaataaataaataatataaaaataaaataaatactgcagtc

SEQ ID NO: 74152 - DNA, 1112 bp, Homo sapiens
ggcaagcagttcaagaccacacctgagcaacatagcgagacctcatctctacaaaaactaattttaaaaaatagagctgtgtgaccccgggcacaatttctccttcctctggtaacctctgttttcttagatttggagcagggtggtcacactgaccttgcagagttccgagaatcagagacagaacataaaaggcctggaaaacattctccaaaaagaagctgcaacatgtgtggacaatgggcttttcatgcctctcttactgtctgttgacctggtgcaagaaacatgctctggtgatggctgtgagggaggaatgaggatagacatagacactcctgtgtctcaaacatgcctctttattactctgttatgactctgtcttccctggggcaggaccccagcctgcctacatttgcagacagacacagtggcatgtggagacaacagtgtgtcccaatgacttttctttactccccagctgtcggcagtactcagtggaagggtgatattatgacactgatactgctattttgaaacctggaggatggaaaggtgcaaaaatctatcaccagcaacagaaggtgcagaccgtgttggtggcggtaattttgtccatcaaatgaatatgtgtgaaaacattcccttcttcggccctacaggtcagaatggcggcagcggagcatcgtcattcttcaggattgccctgctggccctacctcacagctgaaactttaaaaaacaggatgggccgccagccacctcctccaactcaacaacattctataactgataactccctgagcctcaagacacctcccgaatgtcttcttattccccttccaccctctcctcttccaccctccgtggatgataatctcaagactcctcccttagctactcaggaggccgaggcagaaaaatcactgaaacccaagaggcagaggttgagtaagctgagaacaggtcattgcactcaagcctgggcaataagaagaaatctgtgagtggaacaaaagaaaaaaatcaaaaaacaaaacaaaacccacactccaaaaacaaactaacaaagaataaataaataatataaaaataaaataaatactgcagtc

SEQ ID NO: 74153 - DNA, 660 bp, Homo sapiens
  misc_feature (655)..(655): n is a, c, g, or t
tatgtgtggtgatctagaggatcccacaaggctgactcttccaggaattaccaggctcagatccggtgtttaaagccgtcccagtgcccaacatgacaccttcaggagtcggccgggagaggcactcgtgtgacgcgctgaatcgctggctgggagaacagctgaagcagctggtgcctgcaagcggcctcacagtcatggatctggaagctgagggcacgtgtttgcggttcagccctttgatgaccgcagcagttttaggaactcggggagaggatgtggatcagctcgtagcctgcatagaaagcaaactgccagtgctgtgctgtacgctccagttgcgtgaagagttcaagcaggaagtggaagcaacagcaggtctcctatatgttgatgaccctaactggtctggaataggggttgtcaggtaaagtcttggcctgccgcttgatgttggagacttttctgtataaagaacatgagtgggtcattttctgaaccaccttagaaatccaagatgaacgtgtagtcacaatatgcttaacgaaaatgcaactcggttttctgggcattaacaacagcacagtgcaagcaggcaatttggccagcgagacgctcagggaggggagttgctgaatgttctgtctgttgggtnccggc

SEQ ID NO: 74154 - DNA, 776 bp, Homo sapiens
aggatactttcagataccaccttatggctatgcagaattttcaggtaaagacatgatgagtttccagtgaagacttttatgagtcgggtatagactgaaagatcttttttctggagctgtactacttgggttcagatttccttctccttgaaaggggtgtttaacctctcaatgtctgtttcatcatctgttagatggggatagtattaatacctatttcatagaagcgttgtgaggattaaatgagctaatggactaacgcatgtgaagggtggagaatagaagcacatatgtgtttgatagggtcagcagttatttatttgtggggtatctaattggcacatgtcagtagaagatagagcaatgatctagattcaaatacagttgtcccttatccttgggtgtccttgggggattggttcttgacctcccatcctcaccctatggataaaaaaattcatggatgctcaaatcccttatataaaatagcacagtattttcatgtaactgaggcacatcttcccatatactttaatctcgttgacttacatataatacctaatacgatgtaaatgctgtgtaaatagttgttacactgtattgtttagggaataatgacaagcaaaaaagtctgtagatattcagtacagaggcacccatctttttaaatttctgaagattttttactcatgcttggtttaatccacagatgcagaacccacaggttcagagggccagctgtgctttgaaaatattagcttgcgttttattagaaa

SEQ ID NO: 74155 - DNA, 432 bp, Homo sapiens
gtaagtttatatcagaattcattttataatttgagctttgttttttaaaaagcataaactatataccacgttctttctcttatagttgcttaagaaaaaaaaaaaacttgaagcaacgccagttgaatgagggaagtagcgggagagtggcgggggatgtgtgctgttcccatcagcccatcaactcttttcattctgcagtgggcaagatatggtgagcatcctccagttagttcagaatctcatgcatggagatgaagatgaggagccccagagccccaggtaatgaacctggcagcttctcttttcaagtgcatgtgttcttgatttcagtagtgattgcgctctgacaagttgctcaaataagaagctatatttcattgagttacatatgatattaaagcaatcctttttattttcagaaagacattt

SEQ ID NO: 74156 - DNA, 4424 bp, Homo sapiens
  misc_feature (3185)..(3185): n is a, c, g, or t
aaaccacaattttggtgggagatttgaatatatttctcatgagtcagcagatcaagtagatagaaaataagtatataaaagaattcaatgacacaattagatacatgtaatagagattacatactcttcaaagcttgtaataagtcaactcacaaacactgattttaagtccttccacaaagaaaatctcaataaaatagggatataataagtcacttccctcctagggcgataatgtgtataaaagtgtttaaggtataaagccttagaaaacatttgttccttttaatgccctgatgtgttttatcctaggaacggcagcagtaggacacacagacaagattgggagattgaaagaactctgtgagcagtatggcatatggcttcatgtggaggggtaagctggcggtgaggctggtggctccattcgggcctgcacagagtccttatgaggactggacatccaggctctcactttggtgacatttatcacgaagggctctttgggtcacagatcacaaaataacccaaattggcttaagcccaaagagatcttactggctcacataactacaaagagcagtgttatgactgcctcaggcacgacatcaaccaggatccagtgtgttactcccacctctgctcccccagtcacaggcactgggcttggtttcctctatctgtggacagatcttcctgttacagtgcaaagtagctgcagaaactccagccttctttccagcttcgtggtcagctggaagtcctaacagaagtctcgtattgaaccagccactgtggccagggagaagtaatcctctgatagttgaggttctttgctctcctctggagcagatagtggtgtctcctccccacaaagctcatgttctgctggaagaaatggagatggcgccctggaaggctattgtagggccattaagagaagcagggggaacggacgtgggcagccagagtagcccatatccaccacatcatacagggaggtttctttttgatccctaagtaaagaatgataactggaaaataagatccatgaaagagaataatactcccattatattaaatgagcggggatagttcctgagacacatttttattaaagtgcattttcaggattttccttcatatgtataaagcacaccttctgttgctgttaatgaaagctaataacattaaaaatatacttaagtgtcaacttgcaacagcacagcctttatttttttaagtacatggtgagtaagcaacattaaataattagttcttggactggtgttttttcttccagtgtgaatctggcaacattggctctgggttatgtctcctcatcagtgctggtatgttgttgatttactgaatattggtgtttttaagaatgaatttaaaatcactcaatccctcctggctcttcacagtttttatgaatggaggagggtgttaggtttgtgtattctgataatctaacaaagagttgttcttgttttggtaggctgcagccaaatgtgatagcatgacgatgactcctggcccgtggctgggtttgccagctgttcctgcggtgacactgtataaacacgatgaccctgccttgactttagttgctggtcttacatcaaataagcccacagacaaactccgtgccctgcctctgtggttatctttacaatacttgggacttgatgggtttgtggagaggatcaagcatgcctgtcaactgagtcaacggttgcaggaaagtttgaagaaagtgaattacatcaaaatcttggtggaagatgagctcagctccccagtggtggtgttcagatttttccaggaattaccaggctcagatccggtgtttaaagccgtcccagtgcccaacatgacaccttcaggagtcggccgggagaggcactcgtgtgacgcgctgaatcgctggctgggagaacagctgaagcagctggtgcctgcaagcggcctcacagtcatggatctggaagctgagggcacgtgtttgcggttcagccctttgatgaccgcagcagttttaggaactcggggagaggatgtggatcagctcgtagcctgcatagaaagcaaactgccagtgctgtgctgtacgctccagttgcgtgaagagttcaagcaggaagtggaagcaacagcaggtctcctatatgttgatgaccctaactggtctggaataggggttgtcaggtatgaacatgctaatgatgataagagcagtttgaaatcagatcccgaaggggaaaacatccatgctggactcctgaagaagttaaatgaactggaatctgacctaacctttaaaataggccctgagtataagagcatgaagagctgcctttatgtcggcatggcgagcgacaacgtcgatgctgctgagctcgtggagaccattgcggccacagcccgggagatagaggagaactcgaggcttctggaaaacatgacagaagtggttcggaaaggcattcaggaagctcaagtggagctgcagaaggcaagtgaagaacggcttctggaagagggggtgttgcggcagatccctgtagtgggctccgtgctgaattggttttctccggtccaggctttacagaagggaagaacttttaacttgacagcaggctctctggagtccacagaacccatatatgtctacaaagcacaaggtgcaggagtcacgctgcctccaacgccctcgggcagtcgcaccaagcagaggcttccaggccagaagccttttaaaaggtccctgcgaggttcagatgctttgagtgagaccagctcagtcagtcacattgaagacttagaaaaggtggagcgcctatccagtgggccggagcagatcaccctcgaggccagcagcactgagggacacccaggggctcccagccctcagcacaccgaccagaccgaggccttccagaaaggggtcccacacccagaagatgaccactcacaggtagaaggaccggagagcttaagatgagactcattgtgtggtttgagactgtactgagtattgtttcagggaagatgaagttctattggaaatgtgaactgtgccacatactaatataaattactgttgtttgtgcttcactgggattttggcacaaatatgtgcctgaaaggtaggctttctaggaggggagtcagcttgnctaacttcatgtacatgtagaaccacgtttgctgtcctactacgacttttccctaagttaccataaacacattttattcacaaaaaacacttcgaatttcaagtgtctaccagtagcacccttgctctttctaaacataagcctaagtatatgaggttgcccgtggcaactttttggtaaaacagcttttcattagcactctccaggttctctgcaacacttcacagaggcgagactggctgtatcctttgctgtcggtctttagtacgatcaagttgcaatatacagtgggactgctagacttgaaggagagcagtgattgtgggattgtaaataagagcatcagaagccctccccagctactgctcttcgtggagacttagtaaggactgtgtctacttgagctgtggcaaggctgctgtctgggactgtcctctgccacaaggccatttctcccattatataccgtttgtaaagagaaactgtaaagtctcctcctgaccatatatttttaaatactggcaaagcttttaaaattggcacacaagtacagactgtgctcatttctgtttagtatctgaaaacctgatagatgctacccttaagagcttgctcttccgtgtgctacgtagcacccacctggttaaaatctgaaaacaagtacccctttgacctgtctcccactgaagcttctactgccctggcagctcgcctgggcccaactcagaaacaggagccagcagagcactctctcacgctgatccagccgggcaccctgcttaagtcagtagaagctcgctggcactgcccgttcctacttttccgaagtactgcgtcactttgtcgtaagtaatggcccctgtgccttcttaatccagcagtcaagcttttgggagacctgaaaatgggaaaattcacactgggtttctggactgtagtattggaagccttagttatagtatattaagcctataattatactctgatttgatgggatttttgacatttacacttgtcaaaatgcagggggttttttttggtgcagatgattaaacagtcttccctatttggtgcaatgaagtatagcagataaaatgggggaggggtaaattatcaccttcaagaaaattacatgtttttatatatatttggaattgttaaattggttttgctgaaacatttcacccttgagatattatttgaatgttggtttcaataaaggttcttgaaattgttaaa

SEQ ID NO: 74157 - DNA, 1493 bp, Homo sapiens
agcggagcgctacggggccccgccccgccgcctctcaaccatcaggttcggcagccggcggcgccgcctggcagctcctcctcttctccgccccgccggccgcgggcgcgggggacgtcagcgctgccagcgtggaaggagctgcggggcgcgggaggaggaagtagagcccgggaccgccaggccaccaccggccgcctcagccatggacgcgtccctggagaagatagcagaccccacgttagctgaaatgggaaaaaacttgaaggaggcagtgaagatgctggaggacagtcagagaagaacagaagaggaaaatggaaagaagctcatatccggagatattccaggcccactccagggcagtgggcaagatatggtgagcatcctccagttagttcagaatctcatgcatggagatgaagatgaggagccccagagccccagaatccaaaatattggagaacaaggtcatatggctttgttgggacatagtctgggagcttatatttcaactctggacaaagagaagctgagaaaacttacaactaggatactttcagataccaccttatggctatgcagaattttcagatatgaaaatgggtgtgcttatttccacgaagaggaaagagaaggacttgcaaagatatgtaggcttgccattcattctcgatatgaagacttcgtagtggatggcttcaatgtgttatataacaagaagcctgtcatatatcttagtgctgctgctagacctggcctgggccaatacctttgtaatcagctcggcttgcccttcccctgcttgtgccgtgtaccctgtaacactgtgtttggatcccagcatcagatggatgttgccttcctggagaaactgattaaagatgatatagagcgaggaagactgcccctgttgcttgtcgcaaatgcaggaacggcagcagtaggacacacagacaagattgggagattgaaagaactctgtgagcagtatggcatatggcttcatgtggagggtgtgaatctggcaacattggctctgggttatgtctcctcatcagtgctggctgcagccaaatgtgatagcatgacgatgactcctggcccgtggctgggtttgccagctgttcctgcggtgacactgtataaacacgatgaccctgccttgactttagttgctggtcttacatcaaataagcccacagacaaactccgtgccctgcctctgtggttatctttacaatacttgggacttgatgggtttgtggagaggatcaagcatgcctgtcaactgagtcaacggttgcaggaaagtttgaagaaagtgaattacatcaaaatcttggtatagtatataatttcatctgttttcaaaatataactttttttgaacttcagcaacttagaatgattttagaactttagaatgattttctccacatttcagtggaattgtggcagctccagtaaaaaacaaaacaaaaaacaaaaac

SEQ ID NO: 74158 - DNA, 3981 bp, Homo sapiens
  misc_feature (74)..(74): n is a, c, g, or t
  misc_feature (2742)..(2742): n is a, c, g, or t
ttattttccaagttatcattctttacttagggacccaaaaagaaaccctccctgtatgatgtggtggatatggnctactctggctgcccacgtccgttccccctgcttctcttaatggccctacaatagccttccagggcgccatctccatttcttccagcagaacatgagctttgtggggaggagacaccactctctgctcccccagtcacaggcactgggcttggtttcctctatctgtggacagatcttcctgttacagtgcaaagtagctgcagaaactccagccttctttccagcttcgtggtcagctggaagtcctaacagaagtctcgtattgaaccagccactgtggccagggagaagtaatcctctgatagttgaggttctttgctctcctctggagcagatagtggtgtctcctccccacaaagctcatgttctgctggaagaaatggagatggcgccctggaaggctattgtagggccattaagagaagcagggggaacggacgtgggcagccagagtagcccatatccaccacatcatacagggaggtttctttttgatccctaagtaaagaatgataactggaaaataagatccatgaaagagaataatactcccattatattaaatgagcggggatagttcctgagacacatttttattaaagtgcattttcaggattttccttcatatgtataaagcacaccttctgttgctgttaatgaaagctaataacattaaaaatatacttaagtgtcaacttgcaacagcacagcctttatttttttaagtacatggtgagtaagcaacattaaataattagttcttggactggtgttttttcttccagtgtgaatctggcaacattggctctgggttatgtctcctcatcagtgctggtatgttgttgatttactgaatattggtgtttttaagaatgaatttaaaatcactcaatccctcctggctcttcacagtttttatgaatggaggagggtgttaggtttgtgtattctgataatctaacaaagagttgttcttgttttggtaggctgcagccaaatgtgatagcatgacgatgactcctggcccgtggctgggtttgccagctgttcctgcggtgacactgtataaacacgatgaccctgccttgactttagttgctggtcttacatcaaataagcccacagacaaactccgtgccctgcctctgtggttatctttacaatacttgggacttgatgggtttgtggagaggatcaagcatgcctgtcaactgagtcaacggttgcaggaaagtttgaagaaagtgaattacatcaaaatcttggtggaagatgagctcagctccccagtggtggtgttcagatttttccaggaattaccaggctcagatccggtgtttaaagccgtcccagtgcccaacatgacaccttcaggagtcggccgggagaggcactcgtgtgacgcgctgaatcgctggctgggagaacagctgaagcagctggtgcctgcaagcggcctcacagtcatggatctggaagctgagggcacgtgtttgcggttcagccctttgatgaccgcagcagttttaggaactcggggagaggatgtggatcagctcgtagcctgcatagaaagcaaactgccagtgctgtgctgtacgctccagttgcgtgaagagttcaagcaggaagtggaagcaacagcaggtctcctatatgttgatgaccctaactggtctggaataggggttgtcaggtatgaacatgctaatgatgataagagcagtttgaaatcagatcccgaaggggaaaacatccatgctggactcctgaagaagttaaatgaactggaatctgacctaacctttaaaataggccctgagtataagagcatgaagagctgcctttatgtcggcatggcgagcgacaacgtcgatgctgctgagctcgtggagaccattgcggccacagcccgggagatagaggagaactcgaggcttctggaaaacatgacagaagtggttcggaaaggcattcaggaagctcaagtggagctgcagaaggcaagtgaagaacggcttctggaagagggggtgttgcggcagatccctgtagtgggctccgtgctgaattggttttctccggtccaggctttacagaagggaagaacttttaacttgacagcaggctctctggagtccacagaacccatatatgtctacaaagcacaaggtgcaggagtcacgctgcctccaacgccctcgggcagtcgcaccaagcagaggcttccaggccagaagccttttaaaaggtccctgcgaggttcagatgctttgagtgagaccagctcagtcagtcacattgaagacttagaaaaggtggagcgcctatccagtgggccggagcagatcaccctcgaggccagcagcactgagggacacccaggggctcccagccctcagcacaccgaccagaccgaggccttccagaaaggggtcccacacccagaagatgaccactcacaggtagaaggaccggagagcttaagatgagactcattgtgtggtttgagactgtactgagtattgtttcagggaagatgaagttctattggaaatgtgaactgtgccacatactaatataaattactgttgtttgtgcttcactgggattttggcacaaatatgtgcctgaaaggtaggctttctaggaggggagtcagcttgnctaacttcatgtacatgtagaaccacgtttgctgtcctactacgacttttccctaagttaccataaacacattttattcacaaaaaacacttcgaatttcaagtgtctaccagtagcacccttgctctttctaaacataagcctaagtatatgaggttgcccgtggcaactttttggtaaaacagcttttcattagcactctccaggttctctgcaacacttcacagaggcgagactggctgtatcctttgctgtcggtctttagtacgatcaagttgcaatatacagtgggactgctagacttgaaggagagcagtgattgtgggattgtaaataagagcatcagaagccctccccagctactgctcttcgtggagacttagtaaggactgtgtctacttgagctgtggcaaggctgctgtctgggactgtcctctgccacaaggccatttctcccattatataccgtttgtaaagagaaactgtaaagtctcctcctgaccatatatttttaaatactggcaaagcttttaaaattggcacacaagtacagactgtgctcatttctgtttagtatctgaaaacctgatagatgctacccttaagagcttgctcttccgtgtgctacgtagcacccacctggttaaaatctgaaaacaagtacccctttgacctgtctcccactgaagcttctactgccctggcagctcgcctgggcccaactcagaaacaggagccagcagagcactctctcacgctgatccagccgggcaccctgcttaagtcagtagaagctcgctggcactgcccgttcctacttttccgaagtactgcgtcactttgtcgtaagtaatggcccctgtgccttcttaatccagcagtcaagcttttgggagacctgaaaatgggaaaattcacactgggtttctggactgtagtattggaagccttagttatagtatattaagcctataattatactctgatttgatgggatttttgacatttacacttgtcaaaatgcagggggttttttttggtgcagatgattaaacagtcttccctatttggtgcaatgaagtatagcagataaaatgggggaggggtaaattatcaccttcaagaaaattacatgtttttatatatatttggaattgttaaattggttttgctgaaacatttcacccttgagatattatttgaatgttggtttcaataaaggttcttgaaattgttaaa

SEQ ID NO: 74159 - DNA, 3168 bp, Homo sapiens
agcggagcgctacggggccccgccccgccgcctctcaaccatcaggttcggcagccggcggcgccgcctggcagctcctcctcttctccgccccgccggccgcgggcgcgggggacgtcagcgctgccagcgtggaaggagctgcggggcgcgggaggaggaagtagagcccgggaccgccaggccaccaccggccgcctcagccatggacgcgtccctggagaagatagcagaccccacgttagctgaaatgggaaaaaacttgaaggaggcagtgaagatgctggaggacagtcagagaagaacagaagaggaaaatggaaagaagctcatatccggagatattccaggcccactccagggcagtgggcaagatatggtgagcatcctccagttagttcagaatctcatgcatggagatgaagatgaggagccccagagccccagaatccaaaatattggagaacaaggtcatatggctttgttgggacatagtctgggagcttatatttcaactctggacaaagagaagctgagaaaacttacaactaggatactttcagataccaccttatggctatgcagaattttcagatatgaaaatgggtgtgcttatttccacgaagaggaaagagaaggacttgcaaagatatgtaggcttgccattcattctcgatatgaagacttcgtagtggatggcttcaatgtgttatataacaagaagcctgtcatatatcttagtgctgctgctagacctggcctgggccaatacctttgtaatcagctcggcttgcccttcccctgcttgtgccgtgtaccctgtaacactgtgtttggatcccagcatcagatggatgttgccttcctggagaaactgattaaagatgatatagagcgaggaagactgcccctgttgcttgtcgcaaatgcaggaacggcagcagtaggacacacagacaagattgggagattgaaagaactctgtgagcagtatggcatatggcttcatgtggaggggtaagctggcggtgaggctggtggctccattcgggcctgcacagagtccttatgaggactggacatccaggctctcactttggtgacatttatcacgaagggctctttgggtcacagatcacaaaataacccaaattggcttaagcccaaagagatcttactggctcacataactacaaagagcagtgttatgactgcctcaggcacgacatcaaccaggatccagtgtgttactcccacctctgctcccccagtcacaggcactgggcttggtttcctctatctgtggacagatcttcctgttacagtgcaaagtagctgcagaaactccagccttctttccagcttcgtggtcagctggaagtcctaacagaagtctcgtattgaaccagccactgtggccagggagaagtaatcctctgatagttgaggttctttgctctcctctggagcagatagtggtgtctcctccccacaaagctcatgttctgctggaagaaatggagatggcgccctggaaggctattgtagggccattaagagaagcagggggaacggacgtgggcagccagagtagcccatatccaccacatcatacagggaggtttctttttgatccctaagtaaagaatgataactggaaaataagatccatgaaagagaataatactcccattatattaaatgagcggggatagttcctgagacacatttttattaaagtgcattttcaggattttccttcatatgtataaagcacaccttctgttgctgttaatgaaagctaataacattaaaaatatacttaagtgtcaacttgcaacagcacagcctttatttttttaagtacatggtgagtaagcaacattaaataattagttcttggactggtgttttttcttccagtgtgaatctggcaacattggctctgggttatgtctcctcatcagtgctggtatgttgttgatttactgaatattggtgtttttaagaatgaatttaaaatcactcaatccctcctggctcttcacagtttttatgaatggaggagggtgttaggtttgtgtattctgataatctaacaaagagttgttcttgttttggtaggctgcagccaaatgtgatagcatgacaatttctccttcctctggtaacctctgttttcttagatttggagcagggtggtcacactgaccttgcagagttccgagaatcagagacagaacataaaaggcctggaaaacattctccaaaaagaagctgcaacatgtgtggacaatgggcttttcatgcctctcttactgtctgttgacctggtgcaagaaacatgctctggtgatggctgtgagggaggaatgaggatagacatagacactcctgtgtctcaaacatgcctctttattactctgttatgactctgtcttccctggggcaggaccccagcctgcctacatttgcagacagacacagtggcatgtggagacaacagtgtgtcccaatgacttttctttactccccagctgtcggcagtactcagtggaagggtgatattatgacactgatactgctattttgaaacctggaggatggaaaggtgcaaaaatctatcaccagcaacagaaggtgcagaccgtgttggtggcggtaattttgtccatcaaatgaatatgtgtgaaaacattcccttcttcggccctacaggtcagaatggcggcagcggagcatcgtcattcttcaggattgccctgctggccctacctcacagctgaaactttaaaaaacaggatgggccgccagccacctcctccaactcaacaacattctataactgataactccctgagcctcaagacacctcccgaatgtcttcttattccccttccaccctctcctcttccaccctccgtggatgataatctcaagactcctcccttagctactcaggaggccgaggcagaaaaatcactgaaacccaagaggcagaggttgagtaagctgagaacaggtcattgcactcaagcctgggcaataagaagaaatctgtgagtggaacaaaagaaaaaaatcaaaaaacaaaacaaaacccacactccaaaaacaaactaacaaagaataaataaataatataaaaataaaataaatactgcagtc

SEQ ID NO: 74160 - DNA, 4031 bp, Homo sapiens
  misc_feature (2792)..(2792): n is a, c, g, or t
taggaccctgtctcaaaaaaaaaaaaaaaagtttgatgctcattatgtttacaaaagcactgcattttttgaaaagtgtctcactgtgctattagctcatttcttgagatgtggttcttaggaaagagaagccttagtaacttagtttagagatggcttgggcactcgggagattttttcaatttcctgtggctatggagtgcaggagaatgatgccattaactaccagacccttgaggtcagcacagctctggcatcttcctgcaggcagaaccgtatactcctgaggatttgaatgctgtcctactgctgactcaaaggctaatcaatgcatgtgttaaactgcatggacatttagcagacatggtgatctgtatatagccatgccttatagtccacagtggagcatacatttcctgagagcgtaaatcagcattcgcctcctcctcctcctcttccttctcttctccctctctcctttctcgtcttcagtagttattgagcattcacctcagtgtcaggcaccatgagtactttcatgcatcatctcatttgatccctgcaacttcactagaatgtcagttccactgatgacagtgtattcagaattaattttctttaaggaaaacaaaaaggaatttcttgaggggctttctactgtccagtactcagtgaatatctgttgaattaatatactccaatcccatgagttagatatgattagtgatgagggacctgggattgagacattagtctaatgacactacattctagaccctgttgctaagcacttcttgtattgcatatcaactcatttactcctcacagcaatgtgagatacatactgtcctccctgttttataattgagggaactgaagcatagacaggttacatagctggtgactggcagatgaagtgacttatccgtggtcctgcaggtgatgagtggcagtactgtgctcttatcaccagctcttgagcgtgctgcatcctctcatttgtcgttggtctcccctagtgttcggtactgtgccttgcacgtgtttatactcagtagcttttgaatgaaagacagacttacattgcaaatacaacagatttccgtgtcttattagaaactgcttttcttgaattactacatgtaacttttaaatgaaagattggtgaatatttccagatgttgaaatacaaaaacaggtggctgaacttagaaaccaccaagtggcaggtgactttgcctgacatccgtgttcacagacctccacagcccctggtgaaaaccacttcttcatatcccatgtccgtctaattacatgtgttattttttgtcatttgcagagtcaacggttgcaggaaagtttgaagaaagtgaattacatcaaaatcttggtggaagatgagctcagctccccagtggtggtgttcagatttttccaggaattaccaggctcagatccggtgtttaaagccgtcccagtgcccaacatgacaccttcaggagtcggccgggagaggcactcgtgtgacgcgctgaatcgctggctgggagaacagctgaagcagctggtgcctgcaagcggcctcacagtcatggatctggaagctgagggcacgtgtttgcggttcagccctttgatgaccgcagcagttttaggaactcggggagaggatgtggatcagctcgtagcctgcatagaaagcaaactgccagtgctgtgctgtacgctccagttgcgtgaagagttcaagcaggaagtggaagcaacagcaggtctcctatatgttgatgaccctaactggtctggaataggggttgtcaggtatgaacatgctaatgatgataagagcagtttgaaatcagatcccgaaggggaaaacatccatgctggactcctgaagaagttaaatgaactggaatctgacctaacctttaaaataggccctgagtataagagcatgaagagctgcctttatgtcggcatggcgagcgacaacgtcgatgctgctgagctcgtggagaccattgcggccacagcccgggagatagaggagaactcgaggcttctggaaaacatgacagaagtggttcggaaaggcattcaggaagctcaagtggagctgcagaaggcaagtgaagaacggcttctggaagagggggtgttgcggcagatccctgtagtgggctccgtgctgaattggttttctccggtccaggctttacagaagggaagaacttttaacttgacagcaggctctctggagtccacagaacccatatatgtctacaaagcacaaggtgcaggagtcacgctgcctccaacgccctcgggcagtcgcaccaagcagaggcttccaggccagaagccttttaaaaggtccctgcgaggttcagatgctttgagtgagaccagctcagtcagtcacattgaagacttagaaaaggtggagcgcctatccagtgggccggagcagatcaccctcgaggccagcagcactgagggacacccaggggctcccagccctcagcacaccgaccagaccgaggccttccagaaaggggtcccacacccagaagatgaccactcacaggtagaaggaccggagagcttaagatgagactcattgtgtggtttgagactgtactgagtattgtttcagggaagatgaagttctattggaaatgtgaactgtgccacatactaatataaattactgttgtttgtgcttcactgggattttggcacaaatatgtgcctgaaaggtaggctttctaggaggggagtcagcttgnctaacttcatgtacatgtagaaccacgtttgctgtcctactacgacttttccctaagttaccataaacacattttattcacaaaaaacacttcgaatttcaagtgtctaccagtagcacccttgctctttctaaacataagcctaagtatatgaggttgcccgtggcaactttttggtaaaacagcttttcattagcactctccaggttctctgcaacacttcacagaggcgagactggctgtatcctttgctgtcggtctttagtacgatcaagttgcaatatacagtgggactgctagacttgaaggagagcagtgattgtgggattgtaaataagagcatcagaagccctccccagctactgctcttcgtggagacttagtaaggactgtgtctacttgagctgtggcaaggctgctgtctgggactgtcctctgccacaaggccatttctcccattatataccgtttgtaaagagaaactgtaaagtctcctcctgaccatatatttttaaatactggcaaagcttttaaaattggcacacaagtacagactgtgctcatttctgtttagtatctgaaaacctgatagatgctacccttaagagcttgctcttccgtgtgctacgtagcacccacctggttaaaatctgaaaacaagtacccctttgacctgtctcccactgaagcttctactgccctggcagctcgcctgggcccaactcagaaacaggagccagcagagcactctctcacgctgatccagccgggcaccctgcttaagtcagtagaagctcgctggcactgcccgttcctacttttccgaagtactgcgtcactttgtcgtaagtaatggcccctgtgccttcttaatccagcagtcaagcttttgggagacctgaaaatgggaaaattcacactgggtttctggactgtagtattggaagccttagttatagtatattaagcctataattatactctgatttgatgggatttttgacatttacacttgtcaaaatgcagggggttttttttggtgcagatgattaaacagtcttccctatttggtgcaatgaagtatagcagataaaatgggggaggggtaaattatcaccttcaagaaaattacatgtttttatatatatttggaattgttaaattggttttgctgaaacatttcacccttgagatattatttgaatgttggtttcaataaaggttcttgaaattgttaaa

SEQ ID NO: 74161 - DNA, 921 bp, Homo sapiens
agcggagcgctacggggccccgccccgccgcctctcaaccatcaggttcggcagccggcggcgccgcctggcagctcctcctcttctccgccccgccggccgcgggcgcgggggacgtcagcgctgccagcgtggaaggagctgcggggcgcgggaggaggaagtagagcccgggaccgccaggccaccaccggccgcctcagccatggacgcgtccctggagaagatagcagaccccacgttagctgaaatgggaaaaaacttgaaggaggcagtgaagatgctggaggacagtcagagaagaacagaagaggaaaatggaaagaagctcatatccggagatattccaggcccactccagggcagtgggcaagatatggtgagcatcctccagttagttcagaatctcatgcatggagatgaagatgaggagccccagagccccagaatccaaaatattggagaacaaggtcatatggctttgttgggacatagtctgggagcttatatttcaactctggacaaagagaagctgagaaaacttacaactaggatactttcagataccaccttatggctatgcagaattttcagatatgaaaatgggtgtgcttatttccacgaagaggaaagagaaggacttgcaaagatatgtaggcttgccattcattctcgatatgaagacttcgtagtggatggcttcaatgtgttatataacaagaagcctgtcatatatcttagtgctgctgctagacctggcctgggccaatacctttgtaatcaggtaatgtggtatcaggtggctattttaaagaaataatgtcttattttgttctgaaagttttaaagttgacccgtttgtctagttgctgttcttcgcaagtaactgtgcgttcttttaccctcaagaaacagctgtga

SEQ ID NO: 74162 - DNA, 1283 bp, Homo sapiens
agcggagcgctacggggccccgccccgccgcctctcaaccatcaggttcggcagccggcggcgccgcctggcagctcctcctcttctccgccccgccggccgcgggcgcgggggacgtcagcgctgccagcgtggaaggagctgcggggcgcgggaggaggaagtagagcccgggaccgccaggccaccaccggccgcctcagccatggacgcgtccctggagaagatagcagaccccacgttagctgaaatgggaaaaaacttgaaggaggcagtgaagatgctggaggacagtcagagaagaacagaagaggaaaatggaaagaagctcatatccggagatattccaggcccactccagggcagtgggcaagatatggtgagcatcctccagttagttcagaatctcatgcatggagatgaagatgaggagccccagagccccagaatccaaaatattggagaacaaggtcatatggctttgttgggacatagtctgggagcttatatttcaactctggacaaagagaagctgagaaaacttacaactaggatactttcagataccaccttatggctatgcagaattttcagatatgaaaatgggtgtgcttatttccacgaagaggaaagagaaggacttgcaaagatatgtaggcttgccattcattctcgatatgaagacttcgtagtggatggcttcaatgtgttatataacaagaagcctgtcatatatcttagtgctgctgctagacctggcctgggccaatacctttgtaatcagctcggcttgccctttccctgcttgtgccgtgtaccctgcttaagtcagtagaagctcgctggcactgcccgttcctacttttccgaagtactgcgtcactttgtcgtaagtaatggcccctgtgccttcttaatccagcagtcaagcttttgggagacctgaaaatgggaaaattcacactgggtttctggactgtagtattggaagccttagttatagtatattaagcctataattatactctgatttgatgggatttttgacatttacacttgtcaaaatgcagggggttttttttggtgcagatgattaaacagtcttccctatttggtgcaatgaagtatagcagataaaatgggggaggggtaaattatcaccttcaagaaaattacatgtttttatatatatttggaattgttaaattggttttgctgaaacatttcacccttgagatattatttgaatgttggtttcaataaaggttcttgaaattgttaaa

SEQ ID NO: 74163 - DNA, 2566 bp, Homo sapiens
  misc_feature (1327)..(1327): n is a, c, g, or t
ctttgagctcggtacccccttccctctctcacgctgatccagccgggcaccctgcttaagtcagtagaagctcgctggctgggagaacagctgaagcagctggtgcctgcaagcggcctcacagtcatggatctggaagctgagggcacgtgtttgcggttcagccctttgatgaccgcagcagttttaggaactcggggagaggatgtggatcagctcgtagcctgcatagaaagcaaactgccagtgctgtgctgtacgctccagttgcgtgaagagttcaagcaggaagtggaagcaacagcaggtctcctatatgttgatgaccctaactggtctggaataggggttgtcaggtatgaacatgctaatgatgataagagcagtttgaaatcagatcccgaaggggaaaacatccatgctggactcctgaagaagttaaatgaactggaatctgacctaacctttaaaataggccctgagtataagagcatgaagagctgcctttatgtcggcatggcgagcgacaacgtcgatgctgctgagctcgtggagaccattgcggccacagcccgggagatagaggagaactcgaggcttctggaaaacatgacagaagtggttcggaaaggcattcaggaagctcaagtggagctgcagaaggcaagtgaagaacggcttctggaagagggggtgttgcggcagatccctgtagtgggctccgtgctgaattggttttctccggtccaggctttacagaagggaagaacttttaacttgacagcaggctctctggagtccacagaacccatatatgtctacaaagcacaaggtgcaggagtcacgctgcctccaacgccctcgggcagtcgcaccaagcagaggcttccaggccagaagccttttaaaaggtccctgcgaggttcagatgctttgagtgagaccagctcagtcagtcacattgaagacttagaaaaggtggagcgcctatccagtgggccggagcagatcaccctcgaggccagcagcactgagggacacccaggggctcccagccctcagcacaccgaccagaccgaggccttccagaaaggggtcccacacccagaagatgaccactcacaggtagaaggaccggagagcttaagatgagactcattgtgtggtttgagactgtactgagtattgtttcagggaagatgaagttctattggaaatgtgaactgtgccacatactaatataaattactgttgtttgtgcttcactgggattttggcacaaatatgtgcctgaaaggtaggctttctaggaggggagtcagcttgnctaacttcatgtacatgtagaaccacgtttgctgtcctactacgacttttccctaagttaccataaacacattttattcacaaaaaacacttcgaatttcaagtgtctaccagtagcacccttgctctttctaaacataagcctaagtatatgaggttgcccgtggcaactttttggtaaaacagcttttcattagcactctccaggttctctgcaacacttcacagaggcgagactggctgtatcctttgctgtcggtctttagtacgatcaagttgcaatatacagtgggactgctagacttgaaggagagcagtgattgtgggattgtaaataagagcatcagaagccctccccagctactgctcttcgtggagacttagtaaggactgtgtctacttgagctgtggcaaggctgctgtctgggactgtcctctgccacaaggccatttctcccattatataccgtttgtaaagagaaactgtaaagtctcctcctgaccatatatttttaaatactggcaaagcttttaaaattggcacacaagtacagactgtgctcatttctgtttagtatctgaaaacctgatagatgctacccttaagagcttgctcttccgtgtgctacgtagcacccacctggttaaaatctgaaaacaagtacccctttgacctgtctcccactgaagcttctactgccctggcagctcgcctgggcccaactcagaaacaggagccagcagagcactctctcacgctgatccagccgggcaccctgcttaagtcagtagaagctcgctggcactgcccgttcctacttttccgaagtactgcgtcactttgtcgtaagtaatggcccctgtgccttcttaatccagcagtcaagcttttgggagacctgaaaatgggaaaattcacactgggtttctggactgtagtattggaagccttagttatagtatattaagcctataattatactctgatttgatgggatttttgacatttacacttgtcaaaatgcagggggttttttttggtgcagatgattaaacagtcttccctatttggtgcaatgaagtatagcagataaaatgggggaggggtaaattatcaccttcaagaaaattacatgtttttatatatatttggaattgttaaattggttttgctgaaacatttcacccttgagatattatttgaatgttggtttcaataaaggttcttgaaattgttaaa

SEQ ID NO: 74164 - DNA, 215 bp, Homo sapiens
aactcgggtatgctgtatcctttacccagagtcaccaattccttctgttttgaccatctgctttatctttctctatttttatagacatgcattttcctgagccattgaaagatggagcataccccttttacttccaaatacttcagtgtataagaacaagatcattttcttatataacccataggataattatcaaaaacaggaaatttaacatt

SEQ ID NO: 74165 - DNA, 412 bp, Homo sapiens
tttggagacagaatttcctctgttactgaagctagagtgcagtggtgtgatcaccgttcatcgcagcctcaccctctagggctcaatcaatcctcccacctcagcctcccacgaagctgggactacaggcatgtgccccgacacccagctaattttttttattttttggagagatggggtttcactatgctgctcaggctggtctcaaactcctgggctcaagcgatccacccatgtcagcctcccaaaatcctgggactacaggcgtgagccaccttttaaccatttttaagtgcacaattcagaggcattaagtacattcacaacgttgtgcaaccatcactacccattcctagagcttgttcagcatcccttcaattcatcaccaattaaattgttcattgaattctaa

SEQ ID NO: 74166 - DNA, 518 bp, Homo sapiens
tccgtctttggtggaacatggagacctccctactcttgaatctcaatacgtggagggggaagctgctggaggaggataaagcgctcagcagagaggagaaacatcaaacctctgtacttaccagtggggaaggcactatagaaatgagctgattttctctacagagacccagaaagggtccaggatcagaggcaccaggtatcacaggaagtggggcaggacctgagaataggggtagggggtagtttgaaagtctgtgtaaggagcagtagacttccaagtcccactccatcctatgcagccaggtgactgtcctccttactcccacgagagaccagaggtcctggtctcagagatgccaagtgtgaagagaaggggtgaggtgtcctaataaaggctcccagcctccttccccacccacctccagggtaccagaatcaggcttatgcctgcatcctgcactaaccccatgcaaagattgaagtgtgttttcactggaggaattaaacaagcccaaa

SEQ ID NO: 74167 - DNA, 613 bp, Homo sapiens
gtatttgctttcccttcatctttgtcatgattgtaagtttcctgaggcctccccagccatgcttctggtatagcctgcttaactgtgagccaatgaaacttcttttctttgtgaattatttagtttcaggtgtttctttatagtgatttgagaaaagactaatacagttactgacagaatagtatccccattcactatgtgagtaactcttctttaaatgttgtggtttcatctagagatttatcttctgacccaccaaggaccaaaccatgaatgtagggaatggggtttcatttaaaggcggcactgtgaagtcaggtatttctgtcagtctttctgtcagcactttaggcaaagcaaattggaagtgaactgaacagatgggacctgttaagagagacccttaggaaggtctccaggtggggccgcaatccttaacattgccatatagcaaattcttcttctcttggtaataaatagactaacagaccatgattatttttcttaatcaaagaaccaaactcctaagcctttttttaatagacagcctgctttatatctacactgatgaagaaaataagaaatatctaataaagcttaagatgtatctgct

SEQ ID NO: 74168 - DNA, 252 bp, Homo sapiens
tatcacaaaatatttggtaccgtaagttttgaataatagtgacaaaggtaacaattggattcttgattattcataaaaagcacccttgggtatggttttctattagaagagatatatatgtatgtgtgatggtttttgatgaatgagcgtattaaacacatctcagaaaaagttctaaatgatttttcagaaggatttcttattatatacagccaaagaattatttaatgaatagtatttatgtatgttttt

SEQ ID NO: 74169 - DNA, 383 bp, Homo sapiens
tttctcatctcaacggcactccatcgttttggaacaaaccagcagtcttcctacctcatggcttggcactaggttttctctgcatggaaagcctttcccatggatatctttatggattactcccccaccgtttcaggtttttgtcaaatgtcactttcttcgtgaggccttccctagcagacttcattaaaactgcaacactctcatcctggtctctgctttatttttctccaaagaattattgccatctgaaaaattatatagtctatttatttatttgtattcagaatacaagctccacaagaccaggaatttgatctttttatccccaaccactgaaacatttgcctgacacatagtgggtactcaatttgtatttgtcg

SEQ ID NO: 74170 - DNA, 553 bp, Homo sapiens
atggaaacattctaaaacagaattgtggtgacggttgcacaactctatgtatttgctaaaataactaaattttccagttacaatgggtgagttttaggatatgtaaattatgcctcaactctaaaaaagaaaaacctatgacttgaaaagttaggaaaaaataaaatctagggatagggctgaaggttacactcagaatgaatacgtggctttaaattcttttattattaaaaagcaaactaaaaataagtcaactctctattcaacttaataaatgaagaaaaggttaaaataaaagacataggataattaaagataaaagtacagatgaataatactgaacacaaacagaacagtcaaaagaataaatgaacttataaggagacataaccgccactgataaggaagagattaaaaggtgcattaaacaatgaccatgtactagttaacagacccccctttctaaatggacgcactgtgctaagaagctacagacgtttcatagagaaaagcaacaggcccactgagttccaagtcaaactttcaaccctat

SEQ ID NO: 74171 - DNA, 400 bp, Homo sapiens
ctgttcttctgatggatttgggcagggtgtatgttagcatcagacgcaaggagggctagccctggtggcctgcggagtaaatgctggtgggaccggggtgccacctgcctgcagactcggcctgttgctgctggactcctggggggcaccattttggggctttctgcaaccacctctgtgtagcagtttagagcagaagaagaagtagtaggaaatagtctttgtccaccaaggacgtcactgaggaaggggtaccgggggtacccttgaaatggaggagggaggaggtggacggtgaccgaaggcctgatgtcctgaggccaggggccaagtccctgttacctgtatgtcccatgcacttttttaaactgatgctgaagttggccaatgttttacttaa

SEQ ID NO: 74172 - DNA, 409 bp, Homo sapiens
ctgcaataaacatgggagtgcaggtatctctttagtattattgatttcctttctttggggtatgtacctaggagtgggattgccgaattataagatagctctagttttagctttttgaggaacctccaaactgttcttcacagtggttatactaatttacattcccatctacagtgtacaagggttcccttttctccacattctcgccagctagctccttggcagtgtgttaatgtgttaacctgcctactttagagttaaaaaaaatgctgagtttcagacctgagttgtagataaaaatagaatccaactcagatcttataagagactttaatgcagggactacagaggtgccgtggattaagggaacccataaggcatgtttttactagcagcagagaagcccaaa

SEQ ID NO: 74173 - DNA, 412 bp, Homo sapiens
ttcttttatgttttagttgttgttctttttagaaacatgattaaaaaggaaaaaatattaaatcaataagtgttaaatcaaaatggaatatctgattcaaaccattttacaagaatgaaagtaaaatgtgcatgatcaagcttagtatcttggtttttgaactctggtcaactggatatgtttgtcattttgtaacttaccaaaaacaaaccatcatatcataccaactaaaatgatatatggatgaagcaacatcaagtaaaattttagacgatggctataggacccaaatctaaagctgtctaaatgttaattcaatgaaacaagtattatttttgcatgaatacaatgttacaaataaatcacaagaaatagggaagatctgtttgttgcttggaaagaaaaaaattac

SEQ ID NO: 74174 - DNA, 513 bp, Homo sapiens
agaagaaaaatcaatgaatccgtattcagcagaagcaccctgttggtctcaattgtccaatgctgagctatcagtttccctcattgaacacagtgcctggtacatttacttttttaaagtgcactctctggataacaaaaaaagaaagataacaagcatcaatactgtaggaagtcccctgtacaagctttctgataaacaaaagttaagaaaaaaatagatcgagcttttccttagtgtggtgtttagaatgagttcagaataatattctcaatactgtaactctctctgcaacatctgtgtaaatttcctgaacagatctttaaatatattgtttcctttactttctttatttctggcacttatagttatcataaaatctggatatagtcttcaacagttttcatctttattcatatacagggtgttgtaatacatgatataagcaaggctgtataatattaaaataatttgtatcacagttaagagagaaaatatatatcaaggaggaaa

SEQ ID NO: 74175 - DNA, 420 bp, Homo sapiens
ttactagggaaattttcaagcatgcaaaagtagatggaataatatactcgatcctcatatacacatgaccagttatcaacatatggccagtcttctctcatgtccttcctatttcattgcatcagtcactccatcagtgtttagtctccctgcttgtctcatcagtgttttcctccagttggtgtgcgtgcaacagggaccaaacaagatccccacattgtatttggttgccatgtcccttaagtctcatttatcctatagtttgccctctcctttttatttccacctgaacttctcccgccacaaccttttaattagaaaatacacaaacctatggaaatgagttgaaaaacagtatattgaacgctgcttacccttcatctatggtcaccagatgttcacattttgccttagtttatg

SEQ ID NO: 74176 - DNA, 278 bp, Homo sapiens
ttacaactctccctgccccctccaagaggaatgtgagcacccagcaaatcaaatctctagaccaagcgggtgagctggacaagagcgcaaaggtccaattaagctgcctggccccttgcagcataacacgccaggaagccagaagaatgagtcttaaccctgttccttcctccacccacctgcatgtatttaccagcaatgacctggctgttgtcttggttttctttaaacagtttggagttttgtttttttaataaagatttttaaataatagatta

SEQ ID NO: 74177 - DNA, 301 bp, Homo sapiens
aaatgaaccatttagtcatattccatataattttcttaactgaagaaaaatgtaaatggaatccacgtcggatacaggctttctttatattctaaatctagttgtggttgtttttaatggtatttaagaaaatagttggatgtttgggataacactttgaattgttgattgtttttcacaattttggagagaacttatagtgtttctattttatgttggttttcattcaaagtaagtttttacattaaacagttgtcccttggtattcgtgggggattggttacaggacctcttgaggata

SEQ ID NO: 74178 - DNA, 1278 bp, Homo sapiens
  misc_feature (191)..(191): n is a, c, g, or t
  misc_feature (951)..(951): n is a, c, g, or t
  misc_feature (1142)..(1142): n is a, c, g, or t
ctctgaccaacactactgatggccacttgtagctactgtattctccccataccatccattttgtcacttaatatgccacctcatcgtgtatccctgtgattttctacagatcaaacctattacatcacgaagttatgccaagattaaaacagttttaatgctaaatttaaaaaagtatagttgtctaaaanttttttaatacttactactattggtcagattgatggaataactgatacaaaacaaaaactggtcattgaaacacaaattttggagatgaaacctaatagtgatgcagtgtatgtaaaaggtacgtgatggtctctgggccatactgcctgggtttgaatccaggcttcgctaagtatcagctagatgaccttgagtaagttacttaatctcaaatctcacatctgtaaaataggagtaatagttcttacctatttcaattgttgtaaagattaaatgagttaccacttgaaaagaacttaaaatacctggcatatgtaaagtctagttgctagctattattttggtggttattaaaatattattcatccctgtttacctagcaatttctataaacctgccttacagaaacacttgcacaaatacacaaagacacatatgactaacatttttagaggtgggtggatcacttgaggtcatcagtttgagaccagcctggacaacatcgtgaaaccctgcctctactaaaaatacaaaaaattagctaggcatgttggtgtgtgcctgtaattccagatactagggaggcggagacaggagaattgctgaacccggaaggcggaggctgaagtgagccgagatcgcgccactgtgctcctgcctgggcgacagagcaagactccatctcaaaaaaaaagctaaagacaaccgatatgtctataagtagtaaactagtgagtacatcatcatatatcatatganatactgtgaatgcacactaaacagtgaaggaactcttttgtatataagataagatctatttaaaaaaaaactacaatatgcactgatatggtttggctgtgtccccacccaaatctcatcttgaattgcggttcccataatctccccatgtcattggagggacctggtaggaagtaattgaatcatggggnacttcccccatgctcttctcatgacagtgagtgagttatcatgagatctgatggttttataaggagctttttcccctttgctcagcatttctctttcctgtcaccatgtgaagaagcacgttttcttccctttctg

SEQ ID NO: 74179 - DNA, 452 bp, Homo sapiens
gctaagtttattaaaaattaggatagaatattcttcctatcaaagggctctggagtgtctattatgagattcctgtctatttccctttctcctccattattaaaaaattcataatttacattggtgtcatattaatgcaaaacaacaggttttatgatttttgccattttagtatagtcattcttacattttgtttccagcttttaaaaataatttttgccatcagttgagtgaataggacaattatgatgtcagtaatatctgtgtgtgtgtgtgtgtgtgtgtgtgtgtgtgtatgtgtatacaatatgtttagtcaaccccattctagattttctcaaacaagacagtaaaactaaatggcagtgttcatgggatttattgagtaaatatattttaagtagatatacacgcccaatattagcaatagcaggaaatgaaaaaggagtaaa

SEQ ID NO: 74180 - DNA, 455 bp, Homo sapiens
tgtctggggtttgtgcccgctttcctgtttctaatgttccctgaacctacctctacagtagcaaccatattccattatacagtatttacttattgacccatccctcttccctgccagaccttgaactccctgagggcaaaaaccttcccattctcaatctctgccacctaacatggcctggcagtttacgaacgaacaaatgcttaaatattaacttattgatcattgaatgaatgaatgaatatctaaatcctgttgtctatttttaaacacagggacaattctcatatagtctaacatctgtatgataaaaagtataaagatggcattaagaaaaacagaaagaatatgtaccagaaaggcttaataatggttattacatttcttaaaatatattttctatgttataaatgtactcattttataataaaaacctcaatataagataaatagta

SEQ ID NO: 74181 - DNA, 291 bp, Homo sapiens
ggcagaggtcacagtaagccaagatcatgccattgcactacagcccgggtcacaagagtgaaactgcatctcaaaaaataaataaacaaataaaaataaaagaattgagaacttgttacaggcttgccacattcttcacacttgtagggtttctgtccagtatgaattatgtgtaataagggttgagaacttccttaaaaagctttgtcagccaggcacagtggctcatgcctgtaaccccaacactttgggaggccaaagcaggcagaccacctgaggttaggagattga

SEQ ID NO: 74182 - DNA, 392 bp, Homo sapiens
ttacttcggcgtggtggtgcatgcctgtagtcccagccacctggaaggcagaggctgcagtaagccaagatcgagccaccacttcagcctgagtgatggagcaagactttctcaaaacaaacaaacaaacaaaaaccccaagggttatcaaccccaattcaagactccattactttattattcaataagactcacaatgttgacgagaactaatctacaagtgattaagaaaataaaaataaaacaggcttatggtgatgattggccaagtaaataaacacgctccatcatcatcacagtgttcagaacaggcttccagggcaacactggccagaagtgaggagaaattaaagttccactggtaaaaccatgtaacttaaaaaaaaagccag

SEQ ID NO: 74183 - DNA, 450 bp, Homo sapiens
aacaatgctgctatgaacattcgtatatgggtatctgttcaggtctctgcttccagtttcttttgggtctgtacttagaagtgaaattgccgaatcgtatggtagttttgtgtttaactatttaaggaactgctgtaaatcctttgaagccattaacagttttgaagaaatttagcaaatttatttatttagcaagtgtttattaagtgcccaccacgtcctgtgcacatcatgttctaggcactttgccaaaacatttctccttgtcttctgcgcagaaagacgatgccaactgagtgtgttctccactgagtggcacagaggcttttaacacatggggcagcagaatgacacagggaagggatgactgtcttcggagacattcactcactgcggttgctgttgacagtcagtgattctctgctcggggtgttcagggacagatgcctt

SEQ ID NO: 74184 - DNA, 729 bp, Homo sapiens
actccaggctctttggagaggtggttgattccagaactaggtcaggaaacgttcatataatgtgggaacatggtcatatcaaagattaaggataaggattactagggccatgtcagaactcaagcaacatgaaaaggctcctgcttgcaaaagatggacagtttgaacatccacaaggacgctaactgcatcagatatgtttaatgggttcaaaatgatactttaaaaaaactcagtaatcatctttataggatacttgggaacagactcattttcaaattggtaaataaaaggaaagagtttgccttcgaggggtacataacttaattatgaatgaagtgatatgtgtggaatttacttcagagtaatggaggtggaagtggcagagaaaggaaacactggacttgatagtgttgaaactgattaatgatatgtggcggttcattatagtatttccacttttctgtatgtccaaaattttctaaaataaaaggagaattgaatagaaaaatgcttcctggaggtagctgtgtcttacctgagacttggcaggaggcagtagggcctgagggaacagcatttacagtgtcctaacggttatactgaaactttccacgtatacttgatggaacatcaatctgaaggcatcctacacttcctccatcagacctgatggtgcaagtgaacaccatcagtgcctttccagtttcatcaaagcagttattttag

SEQ ID NO: 74185 - DNA, 6630 bp, Homo sapiens
  misc_feature (1)..(2): n is a, c, g, or t
nngaggaaacgaaagcgaaattgaaccggagccatcttgggcccggcgcgcagacccgcggagtttcccgtgccgacgccccggggccacttccagtgcggagtagcggaggcgtgggggcctcgaggggctggcgcggtccagcggtcgggccagggtcgtgccgccggcgggtcgggccgggcaatgcctcgcgggcgcaatgaatccgcggcaggggtattccctcagcggatactacacccatccatttcaaggctatgagcacagacagctcagataccagcagcctgggccaggatcttcccccagtagtttcctgcttaagcaaatagaatttctcaaggggcagctcccagaagcaccggtgattggaaagcagacaccgtcactgccaccttccctcccaggactccggccaaggtttccagtactacttgcctccagtaccagaggcaggcaagtggacatcaggggtgtccccaggggcgtgcatctcggaagtcaggggctccagagagggttccagcatccttcaccacgtggcaggagtctgccacagagaggtgttgattgcctttcctcacatttccaggaactgagtatctaccaagatcaggaacaaaggatcttaaagttcctggaagagcttggggaagggaaggccaccacagcacatgatctgtctgggaaacttgggactccgaagaaagaaatcaatcgagttttatactccctggcaaagaagggcaagctacagaaagaggcaggaacaccccctttgtggaaaatcgcggtctccactcaggcttggaaccagcacagcggagtggtaagaccagacggtcatagccaaggagccccaaactcagacccgagtttggaaccggaagacagaaactccacatctgtctcagaagatcttcttgagccttttattgcagtctcagctcaggcttggaaccagcacagcggagtggtaagaccagacagtcatagccaaggatccccaaactcagacccaggtttggaacctgaagacagcaactccacatctgccttggaagatcctcttgagtttttagacatggccgagatcaaggagaaaatctgcgactatctcttcaatgtgtctgactcctctgccctgaatttggctaaaaatattggccttaccaaggcccgagatataaatgctgtgctaattgacatggaaaggcagggggatgtctatagacaagggacaacccctcccatatggcatttgacagacaagaagcgagagaggatgcaaatcaagagaaatacgaacagtgttcctgaaaccgctccagctgcaatccctgagaccagaagaaacgcagagttcctcacctgtaatatacccacatcaaatgcctcaaataacatggtaaccacagaaaaagtggagaatgggcaggaacctgtcataaagttagaaaacaggcaagaggccagaccagaaccagcaagactgaaaccacctgttcattacaatggcccctcaaaagcagggtatgttgactttgaaaatggccagtgggccacagatgacatcccagatgacttgaatagtatccgcgcagcaccaggtgagtttcgagccatcatggagatgccctccttctacagtcatggcttgccacggtgttcaccctacaagaaactgacagagtgccagctgaagaaccccatcagcgggctgttagaatatgcccagttcgctagtcaaacctgtgagttcaacatgatagagcagagtggaccaccccatgaacctcgatttaaattccaggttgtcatcaatggccgagagtttcccccagctgaagctggaagcaagaaagtggccaagcaggatgcagctatgaaagccatgacaattctgctagaggaagccaaagccaaggacagtggaaaatcagaagaatcatcccactattccacagagaaagaatcagagaagactgcagagtcccagacccccaccccttcagccacatccttcttttctgggaagagccccgtcaccacactgcttgagtgtatgcacaaattggggaactcctgcgaattccgtctcctgtccaaagaaggccctgcccatgaacccaagttccaatactgtgttgcagtgggagcccaaactttccccagtgtgagtgctcccagcaagaaagtggcaaagcagatggccgcagaggaagccatgaaggccctgcatggggaggcgaccaactccatggcttctgataaccagcctgaaggtatgatctcagagtcacttgataacttggaatccatgatgcccaacaaggtcaggaagattggcgagctcgtgagatacctgaacaccaaccctgtgggtggccttttggagtacgcccgctcccatggctttgctgctgaattcaagttggtcgaccagtccggacctcctcacgagcccaagttcgtttaccaagcaaaagttgggggtcgctggttcccagccgtctgcgcacacagcaagaagcaaggcaagcaggaagcagcagatgcggctctccgtgtcttgattggggagaacgagaaggcagaacgcatgggtttcacagaggtaaccccagtgacaggggccagtctcagaagaactatgctcctcctctcaaggtccccagaagcacagccaaagacactccctctcactggcagcaccttccatgaccagatagccatgctgagccaccggtgcttcaacactctgactaacagcttccagccctccttgctcggccgcaagattctggccgccatcattatgaaaaaagactctgaggacatgggtgtcgtcgtcagcttgggaacagggaatcgctgtgtgaaaggagattctctcagcctaaaaggagaaactgtcaatgactgccatgcagaaataatctcccggagaggcttcatcaggtttctctacagtgagttaatgaaatacaactcccagactgcgaaggatagtatatttgaacctgctaagggaggagaaaagctccaaataaaaaagactgtgtcattccatctgtatatcagcactgctccgtgtggagatggcgccctctttgacaagtcctgcagcgaccgtgctatggaaagcacagaatcccgccactaccctgtcttcgagaatcccaaacaaggaaagctccgcaccaaggtggagaacggagaaggcacaatccctgtggaatccagtgacattgtgcctacgtgggatggcattcggctcggggagagactccgtaccatgtcctgtagtgacaaaatcctacgctggaacgtgctgggcctgcaaggggcactgttgacccacttcctgcagcccatttatctcaaatctgtcacattgggttaccttttcagccaagggcatctgacccgtgctatttgctgtcgtgtgacaagagatgggagtgcatttgaggatggactacgacatccctttattgtcaaccaccccaaggttggcagagtcagcatatatgattccaaaaggcaatccgggaagactaaggagacaagcgtcaactggtgtctggctgatggctatgacctggagatcctggacggtaccagaggcactgtggatgggccacggaatgaattgtcccgggtctccaaaaagaacatttttcttctatttaagaagctctgctccttccgttaccgcagggatctactgagactctcctatggtgaggccaagaaagctgcccgtgactacgagacggccaagaactacttcaaaaaaggcctgaaggatatgggctatgggaactggattagcaaaccccaggaggaaaagaacttttatctctgcccagtatagtatgctccagtgacagatggattagggtgtgtcatactagggtgtgagagaggtaggtcgtagcattcctcatcacatggtcaggggatttttttttctcctttttttttctttttaagccataattggtgatactgaaaactttgggttcccatttatcctgctttctttgggattgctaggcaaggtctggccaggccccccttttttcccccaagtgaagaggcagaaacctaagaagttatcttttctttctacccaaagcatacatagtcactgagcacctgcggtccatttcctcttaaaagttttgttttgatttgtttccatttcctttccctttgtgtttgctacactgacctcttgcggtcttgattaggtttcagtcaactctggatcatgtcagggactgataatttcatttgtggattacgcagacccctctacttcccctctttcccttctgagattctttccttgtgatctgaatgtctccttttccccctcagagggcaaagaggtgaacataaaggatttggtgaaacatttgtaagggtaggagttgaaaactgcagttcccagtgccacggaagtgtgattggagcctgcagataatgcccagccatcctcccatcctgcactttagccagctgcagggcgggcaaggcaaggaaagctgcttccctggaagtgtatcactttctccggcagctgggaagtctagaaccagccagactgggttaagggagctgctcaagcaatagcagaggtttcacccggcaggatgacacagaccacttcccagggagcacgggcatgccttggaatattgccaagcttccagctgcctcttctcctaaagcattcctaggaatattttccccgccaatgctgggcgtacaccctagccaacgggacaaatcctagagggtataaaatcatctctgctcagataatcatgacttagcaagaataagggcaaaaaatcctgttggcttaacgtcactgttccacctggtgtaatatctctcatgacagtgacaccaagggaagttgactaagtcacatgtaaattaggagtgttttaaagaatgccatagatgttgattcttaactgctacagataacctgtaattgagcagatttaaaattcaggcatacttttccatttatccaagtgctttcatttttccagatggcttcagaagtaggctcgtgggcagggcgcagacctgatctttatagggttgacatagaaagcagtagttgtgggtgaaagggcaggttgtcttcaaactctgtgaggtagaatcctttgtctatacctccatgaacattgactcgtgtgttcagagcctttggcctctctgtggagtctggctctctggctcctgtgcattctttgaatagtcactcgtaaaaactgtcagtgcttgaaactgtttcctttactcatgttgaagggactttgttggcttttagagtgttggtcatgactccaagagcagagcagggaagagcccaagcatagacttggtgccgtggtgatggctgcagtccagttttgtgatgctgcttttacgtgtccctcgataacagtcagctagacacactcaggaggactactgaggctctgcgaccttcaggagctgagcctgcctctctcctttagatgacagaccttcatctgggaacgtgctgagccagcaccctcagatgatttccctccaaactgctgactaggtcatcctctgtctggtagagacattcacatctttgcttttattctatgctctctgtacttttgaccaaaaattgaccaaagtaagaaaatgcaagttctaaaaatagactaaggatgcctttgcagaacaccaaagcatcccaaggaactggtagggaagtggcgcctgtctcctggagtggaagaggcctgctccctggctctgggtctgctgggggcacagtaaatcagtcttggcacccacatccagggcagagaggtctgtggttctcagcatcagaaggcagcgcagcccctctcctcttcaggctacagggttgtcacctgctgagtcctcaggttgtttggcctctctggtccatcttgggcattaggttctccagcagagctctggccagctgcctcttctttaactgggaacacaggctctcacaagatcagaacccccactcacccccaagatcttatctagcaagcctgtagtattcagtttctgttgtaggaagagagcgaggcatccctgaattccacgcatctgctggaaacgagccgtgtcagatcgcacatccctgcgcccccatgcccccatgcccctctgagtcacacaggacagaggaggcagagcttctgcccactgttatcttcactttctttgtccagtcttttgtttttaataagcagtgaccctccctactcttctttttaatgatttttgtagttgatttgtctgaactgtggctactgtgcattccttgaataatcacttgtaaaaattgtcagtgcttgaagctgtttcctttactcacattgaagggacttcgttggttttttggagtcttggttgtgactccaagagcagagtgaggaagacccccaagcatagactcgggtactgtgatgatggctgcagtccagttttatgattctgcttttatgtgtcccttgataacagtgacttaacaatatacattcctcataaataaaaaaaaaacaagaatctgaa

SEQ ID NO: 74186 - DNA, 6673 bp, Homo sapiens
  misc_feature (1)..(2): n is a, c, g, or t
nngaggaaacgaaagcgaaattgaaccggagccatcttgggcccggcgcgcagacccgcggagtttcccgtgccgacgccccggggccacttccagtgcggagtagcggaggcgtgggggcctcgaggggctggcgcggtccagcggtcgggccagggtcgtgccgccggcgggtcgggccgggcaatgcctcgcgggcgcaatgaatccgcggcaggggtattccctcagcggatactacacccatccatttcaaggctatgagcacagacagctcagataccagcagcctgggccaggatcttcccccagtagtttcctgcttaagcaaatagaatttctcaaggggcagctcccagaagcaccggtgattggaaagcagacaccgtcactgccaccttccctcccaggactccggccaaggtttccagtactacttgcctccagtaccagaggcaggcaagtggacatcaggggtgtccccaggggcgtgcatctcggaagtcaggggctccagagagggttccagcatccttcaccacgtggcaggagtctgccacagagaggtgttgattgcctttcctcacatttccaggaactgagtatctaccaagatcaggaacaaaggatcttaaagttcctggaagagcttggggaagggaaggccaccacagcacatgatctgtctgggaaacttgggactccgaagaaagaaatcaatcgagttttatactccctggcaaagaagggcaagctacagaaagaggcaggaacaccccctttgtggaaaatcgcggtctccactcaggcttggaaccagcacagcggagtggtaagaccagacggtcatagccaaggagccccaaactcagacccgagtttggaaccggaagacagaaactccacatctgtctcagaagatcttcttgagccttttattgcagtctcagctcaggcttggaaccagcacagcggagtggtaagaccagacagtcatagccaaggatccccaaactcagacccaggtttggaacctgaagacagcaactccacatctgccttggaagatcctcttgagtttttagacatggccgagatcaaggagaaaatctgcgactatctcttcaatgtgtctgactcctctgccctgaatttggctaaaaatattggccttaccaaggcccgagatataaatgctgtgctaattgacatggaaaggcagggggatgtctatagacaagggacaacccctcccatatggcatttgacagacaagaagcgagagaggatgcaaatcaagagaaatacgaacagtgttcctgaaaccgctccagctgcaatccctgagaccagaagaaacgcagagttcctcacctgtaatatacccacatcaaatgcctcaaataacatggtaaccacagaaaaagtggagaatgggcaggaacctgtcataaagttagaaaacaggcaagaggccagaccagaaccagcaagactgaaaccacctgttcattacaatggcccctcaaaagcagggtatgttgactttgaaaatggccagtgggccacagatgacatcccagatgacttgaatagtatccgcgcagcaccaggtgagtttcgagccatcatggagatgccctccttctacagtcatggcttgccacggtgttcaccctacaagaaactgacagagtgccagctgaagaaccccatcagcgggctgttagaatatgcccagttcgctagtcaaacctgtgagttcaacatgatagagcagagtggaccaccccatgaacctcgatttaaattccaggttgtcatcaatggccgagagtttcccccagctgaagctggaagcaagaaagtggccaagcaggatgcagctatgaaagccatgacaattctgctagaggaagccaaagccaaggacagtggaaaatcagaagaatcatcccactattccacagagaaagaatcagagaagactgcagagtcccagacccccaccccttcagccacatccttcttttctgggaagagccccgtcaccacactgcttgagtgtatgcacaaattggggaactcctgcgaattccgtctcctgtccaaagaaggccctgcccatgaacccaagttccaatactgtgttgcagtgggagcccaaactttccccagtgtgagtgctcccagcaagaaagtggcaaagcagatggccgcagaggaagccatgaaggccctgcatggggaggcgaccaactccatggcttctgataaccagcctgaaggtatgatctcagagtcacttgataacttggaatccatgatgcccaacaaggtcaggaagattggcgagctcgtgagatacctgaacaccaaccctgtgggtggccttttggagtacgcccgctcccatggctttgctgctgaattcaagttggtcgaccagtccggacctcctcacgagcccaagttcgtttaccaagcaaaagttgggggtcgctggttcccagccgtctgcgcacacagcaagaagcaaggcaagcaggaagcagcagatgcggctctccgtgtcttgattggggagaacgagaaggcagaacgcatgggtttcacagaggtaaccccagtgacaggggccagtctcagaagaactatgctcctcctctcaaggtccccagaagcacagccaaagacactccctctcactggcagcaccttccatgaccagatagccatgctgagccaccggtgcttcaacactctgactaacagcttccagccctccttgctcggccgcaagattctggccgccatcattatgaaaaaagactctgaggacatgggtgtcgtcgtcagcttgggaacagggaatcgctgtgtgaaaggagattctctcagcctaaaaggagaaactgtcaatgactgccatgcagaaataatctcccggagaggcttcatcaggtttctctacagtgagttaatgaaatacaactcccagactgcgaaggatagtatatttgaacctgctaagggaggagaaaagctccaaataaaaaagactgtgtcattccatctgtatatcagcactgctccgtgtggagatggcgccctctttgacaagtcctgcagcgaccgtgctatggaaagcacagaatcccgccactaccctgtcttcgagaatcccaaacaaggaaagctccgcaccaaggtggagaacggagaaggcacaatccctgtggaatccagtgacattgtgcctacgtgggatggcattcggctcggggagagactccgtaccatgtcctgtagtgacaaaatcctacgctggaacgtgctgggcctgcaaggggcactgttgacccacttcctgcagcccatttatctcaaatctgtcacattgggttaccttttcagccaagggcatctgacccgtgctatttgctgtcgtgtgacaagagatgggagtgcatttgaggatggactacgacatccctttattgtcaaccaccccaaggttggcagagtcagcatatatgattccaaaaggcaatccgggaagactaaggagacaagcgtcaactggtgtctggctgatggctatgacctggagatcctggacggtaccagaggcactgtggatgggccacggaatgaattgtcccgggtctccaaaaagaacatttttcttctatttaagaagctctgctccttccgttaccgcagggatctactgagactctcctatggtgaggccaagaaagctgcccgtgactacgagacggccaagaactacttcaaaaaaggcctgaaggatatgggctatgggaactggattagcaaaccccaggaggaaaagaacttttatctctgcccagtatagtatgctccagtgacagatggattagggtgtgtcatactagggtgtgagagaggtaggtcgtagcattcctcatcacatggtcaggggatttttttttctcctttttttttctttttaagccataattggtgatactgaaaactttgggttcccatttatcctgctttctttgggattgctaggcaaggtctggccaggccccccttttttcccccaagtgaagaggcagaaacctaagaagttatcttttctttctacccaaagcatacatagtcactgagcacctgcggtccatttcctcttaaaagttttgttttgatttgtttccatttcctttccctttgtgtttgctacactgacctcttgcggtcttgattaggtttcagtcaactctggatcatgtcagggactgataatttcatttgtggattacgcagacccctctacttcccctctttcccttctgagattctttccttgtgatctgaatgtctccttttccccctcagagggcaaagaggtgaacataaaggatttggtgaaacatttgtaagggtaggagttgaaaactgcagttcccagtgccacggaagtgtgattggagcctgcagataatgcccagccatcctcccatcctgcactttagccagctgcagggcgggcaaggcaaggaaagctgcttccctggaagtgtatcactttctccggcagctgggaagtctagaaccagccagactgggttaagggagctgctcaagcaatagcagaggtttcacccggcaggatgacacagaccacttcccagggagcacgggcatgccttggaatattgccaagcttccagctgcctcttctcctaaagcattcctaggaatattttccccgccaatgctgggcgtacaccctagccaacgggacaaatcctagagggtataaaatcatctctgctcagataatcatgacttagcaagaataagggcaaaaaatcctgttggcttaacgtcactgttccacctggtgtaatatctctcatgacagtgacaccaagggaagttgactaagtcacatgtaaattaggagtgttttaaagaatgccatagatgttgattcttaactgctacagataacctgtaattgagcagatttaaaattcaggcatacttttccatttatccaagtgctttcatttttccagatggcttcagaagtaggctcgtgggcagggcgcagacctgatctttatagggttgacatagaaagcagtagttgtgggtgaaagggcaggttgtcttcaaactctgtgaggtagaatcctttgtctatacctccatgaacattgactcgtgtgttcagagcctttggcctctctgtggagtctggctctctggctcctgtgcattctttgaatagtcactcgtaaaaactgtcagtgcttgaaactgtttcctttactcatgttgaagggactttgttggcttttagagtgttggtcatgactccaagagcagagcagggaagagcccaagcatagacttggtgccgtggtgatggctgcagtccagttttgtgatgctgcttttacgtgtccctcgataacagtcagctagacacactcaggaggactactgaggctctgcgaccttcaggagctgagcctgcctctctcctttagatgacagaccttcatctgggaacgtgctgagccagcaccctcagatgatttccctccaaactgctgactaggtcatcctctgtctggtagagacattcacatctttgcttttattctatgctctctgtacttttgaccaaaaattgaccaaagtaagaaaatgcaagttctaaaaatagactaaggatgcctttgcagaacaccaaagcatcccaaggaactggtagggaagtggcgcctgtctcctggagtggaagaggcctgctccctggctctgggtctgctgggggcacagtaaatcagtcttggcacccacatccagggcagagaggtctgtggttctcagcatcagaaggcagcgcagcccctctcctcttcaggctacagggttgtcacctgctgagtcctcaggttgtttggcctctctggtccatcttgggcattaggttctccagcagagctctggccagctgcctcttctttaactgggaacacaggctctcacaagatcagaacccccactcacccccaagatcttatctagcaagcctgtagtattcagtttctgttgtaggaagagagcgaggcatccctgaattccacgcatctgctggaaacgagccgtgtcagatcgcacatccctgcgcccccatgcccccatgcccctctgagtcacacaggacagaggaggcagagcttctgcccactgttatcttcactttctttgtccagtcttttgtttttaataagcagtgaccctccctactcttctttttaatgatttttgtagttgatttgtctgaactgtggctactgtgcattccttgaataatcacttgtaaaaattgtcagtgcttgaagctgtttcctttactcacattgaagggacttcgttggttttttggagtcttggttgtgactccaagagcagagtgaggaagacccccaagcatagactcgggtactgtgatgatggctgcagtccagttttatgattctgcttttatgtgtcccttgataacagtgacttaacaatatacattcctcataaataaaaaaaaaacaagaatctgaaaaaaaaaaccagatggagatatagcgattaggcctactatcct

SEQ ID NO: 74187 - DNA, 7290 bp, Homo sapiens
gtaaaggcaaagggggtagtgcttatctcttgatcctaaatatgtgagaccagattaaagtgaaatctgggaggcaatgaatgttaaatgagttgttatgtaatttgcatagaggtgatgctgagagatttagaaaggatcactgtgggttgcttgctcactttcttgctctcctattccgtagctttccaaatggctgtactcaacggtggcttggtgtttaggggatttaaggggggcaaaaagaaagattaataatctcctcctctccctctaaccctactgccctaagatatccttagcaaacttacatctcctttcttttctctgtgttcattccattgtgcgcacacatacacattcatggattttctctttttgtttagggaaaaaaattataatgtacatactattctacaactttttgttgttttattgaacattatatgattcctaaattatccccaggtgaatacaaatagatatgacacattttaaaaaaataaaataactggccgggcgtggtagctcatgcctgtaatcccagcactttgggagcccgaggagggcggatcaggagatcgacaccatcctggccagcatggtgaaaccccatctctactaaaaatacaaaaattagctgggtgtggtggcgtgcgcctgtaatcccagctactccggaggctgaggcaggagaatcacttgaacccgggaggcggagattgcagtgagctgagatcacactgcactccagcctgattgcagtgagccgagatcatgccactgcactccagcttggcaacagagcgagactccgtctcacaagaaaaaaaataaccgggtattccctcagcggatactacacccatccatttcaaggctatgagcacagacagctcagataccagcagcctgggccaggatcttcccccagtagtttcctgcttaagcaaatagaatttctcaaggggcagctcccagaagcaccggtgattggaaagcagacaccgtcactgccaccttccctcccaggactccggccaaggtttccagtactacttgcctccagtaccagaggcaggcaagtggacatcaggggtgtccccaggggcgtgcatctcggaagtcaggggctccagagagggttccagcatccttcaccacgtggcaggagtctgccacagagaggtgttgattgcctttcctcacatttccaggaactgagtatctaccaagatcaggaacaaaggatcttaaagttcctggaagagcttggggaagggaaggccaccacagcacatgatctgtctgggaaacttgggactccgaagaaagaaatcaatcgagttttatactccctggcaaagaagggcaagctacagaaagaggcaggaacaccccctttgtggaaaatcgcggtctccactcaggcttggaaccagcacagcggagtggtaagaccagacggtcatagccaaggagccccaaactcagacccgagtttggaaccggaagacagaaactccacatctgtctcagaagatcttcttgagccttttattgcagtctcagctcaggcttggaaccagcacagcggagtggtaagaccagacagtcatagccaaggatccccaaactcagacccaggtttggaacctgaagacagcaactccacatctgccttggaagatcctcttgagtttttagacatggccgagatcaaggagaaaatctgcgactatctcttcaatgtgtctgactcctctgccctgaatttggctaaaaatattggccttaccaaggcccgagatataaatgctgtgctaattgacatggaaaggcagggggatgtctatagacaagggacaacccctcccatatggcatttgacagacaagaagcgagagaggatgcaaatcaagagaaatacgaacagtgttcctgaaaccgctccagctgcaatccctgagaccagaagaaacgcagagttcctcacctgtaatatacccacatcaaatgcctcaaataacatggtaaccacagaaaaagtggagaatgggcaggaacctgtcataaagttagaaaacaggcaagaggccagaccagaaccagcaagactgaaaccacctgttcattacaatggcccctcaaaagcagggtatgttgactttgaaaatggccagtgggccacagatgacatcccagatgacttgaatagtatccgcgcagcaccaggtgagtttcgagccatcatggagatgccctccttctacagtcatggcttgccacggtgttcaccctacaagaaactgacagagtgccagctgaagaaccccatcagcgggctgttagaatatgcccagttcgctagtcaaacctgtgagttcaacatgatagagcagagtggaccaccccatgaacctcgatttaaattccaggttgtcatcaatggccgagagtttcccccagctgaagctggaagcaagaaagtggccaagcaggatgcagctatgaaagccatgacaattctgctagaggaagccaaagccaaggacagtggaaaatcagaagaatcatcccactattccacagagaaagaatcagagaagactgcagagtcccagacccccaccccttcagccacatccttcttttctgggaagagccccgtcaccacactgcttgagtgtatgcacaaattggggaactcctgcgaattccgtctcctgtccaaagaaggccctgcccatgaacccaagttccaatactgtgttgcagtgggagcccaaactttccccagtgtgagtgctcccagcaagaaagtggcaaagcagatggccgcagaggaagccatgaaggccctgcatggggaggcgaccaactccatggcttctgataaccagcctgaaggtatgatctcagagtcacttgataacttggaatccatgatgcccaacaaggtcaggaagattggcgagctcgtgagatacctgaacaccaaccctgtgggtggccttttggagtacgcccgctcccatggctttgctgctgaattcaagttggtcgaccagtccggacctcctcacgagcccaagttcgtttaccaagcaaaagttgggggtcgctggttcccagccgtctgcgcacacagcaagaagcaaggcaagcaggaagcagcagatgcggctctccgtgtcttgattggggagaacgagaaggcagaacgcatgggtttcacagaggtaaccccagtgacaggggccagtctcagaagaactatgctcctcctctcaaggtccccagaagcacagccaaagacactccctctcactggcagcaccttccatgaccagatagccatgctgagccaccggtgcttcaacactctgactaacagcttccagccctccttgctcggccgcaagattctggccgccatcattatgaaaaaagactctgaggacatgggtgtcgtcgtcagcttgggaacagggaatcgctgtgtgaaaggagattctctcagcctaaaaggagaaactgtcaatgactgccatgcagaaataatctcccggagaggcttcatcaggtttctctacagtgagttaatgaaatacaactcccagactgcgaaggatagtatatttgaacctgctaagggaggagaaaagctccaaataaaaaagactgtgtcattccatctgtatatcagcactgctccgtgtggagatggcgccctctttgacaagtcctgcagcgaccgtgctatggaaagcacagaatcccgccactaccctgtcttcgagaatcccaaacaaggaaagctccgcaccaaggtggagaacggagaaggcacaatccctgtggaatccagtgacattgtgcctacgtgggatggcattcggctcggggagagactccgtaccatgtcctgtagtgacaaaatcctacgctggaacgtgctgggcctgcaaggggcactgttgacccacttcctgcagcccatttatctcaaatctgtcacattgggttaccttttcagccaagggcatctgacccgtgctatttgctgtcgtgtgacaagagatgggagtgcatttgaggatggactacgacatccctttattgtcaaccaccccaaggttggcagagtcagcatatatgattccaaaaggcaatccgggaagactaaggagacaagcgtcaactggtgtctggctgatggctatgacctggagatcctggacggtaccagaggcactgtggatgggccacggaatgaattgtcccgggtctccaaaaagaacatttttcttctatttaagaagctctgctccttccgttaccgcagggatctactgagactctcctatggtgaggccaagaaagctgcccgtgactacgagacggccaagaactacttcaaaaaaggcctgaaggatatgggctatgggaactggattagcaaaccccaggaggaaaagaacttttatctctgcccagtatagtatgctccagtgacagatggattagggtgtgtcatactagggtgtgagagaggtaggtcgtagcattcctcatcacatggtcaggggatttttttttctcctttttttttctttttaagccataattggtgatactgaaaactttgggttcccatttatcctgctttctttgggattgctaggcaaggtctggccaggccccccttttttcccccaagtgaagaggcagaaacctaagaagttatcttttctttctacccaaagcatacatagtcactgagcacctgcggtccatttcctcttaaaagttttgttttgatttgtttccatttcctttccctttgtgtttgctacactgacctcttgcggtcttgattaggtttcagtcaactctggatcatgtcagggactgataatttcatttgtggattacgcagacccctctacttcccctctttcccttctgagattctttccttgtgatctgaatgtctccttttccccctcagagggcaaagaggtgaacataaaggatttggtgaaacatttgtaagggtaggagttgaaaactgcagttcccagtgccacggaagtgtgattggagcctgcagataatgcccagccatcctcccatcctgcactttagccagctgcagggcgggcaaggcaaggaaagctgcttccctggaagtgtatcactttctccggcagctgggaagtctagaaccagccagactgggttaagggagctgctcaagcaatagcagaggtttcacccggcaggatgacacagaccacttcccagggagcacgggcatgccttggaatattgccaagcttccagctgcctcttctcctaaagcattcctaggaatattttccccgccaatgctgggcgtacaccctagccaacgggacaaatcctagagggtataaaatcatctctgctcagataatcatgacttagcaagaataagggcaaaaaatcctgttggcttaacgtcactgttccacctggtgtaatatctctcatgacagtgacaccaagggaagttgactaagtcacatgtaaattaggagtgttttaaagaatgccatagatgttgattcttaactgctacagataacctgtaattgagcagatttaaaattcaggcatacttttccatttatccaagtgctttcatttttccagatggcttcagaagtaggctcgtgggcagggcgcagacctgatctttatagggttgacatagaaagcagtagttgtgggtgaaagggcaggttgtcttcaaactctgtgaggtagaatcctttgtctatacctccatgaacattgactcgtgtgttcagagcctttggcctctctgtggagtctggctctctggctcctgtgcattctttgaatagtcactcgtaaaaactgtcagtgcttgaaactgtttcctttactcatgttgaagggactttgttggcttttagagtgttggtcatgactccaagagcagagcagggaagagcccaagcatagacttggtgccgtggtgatggctgcagtccagttttgtgatgctgcttttacgtgtccctcgataacagtcagctagacacactcaggaggactactgaggctctgcgaccttcaggagctgagcctgcctctctcctttagatgacagaccttcatctgggaacgtgctgagccagcaccctcagatgatttccctccaaactgctgactaggtcatcctctgtctggtagagacattcacatctttgcttttattctatgctctctgtacttttgaccaaaaattgaccaaagtaagaaaatgcaagttctaaaaatagactaaggatgcctttgcagaacaccaaagcatcccaaggaactggtagggaagtggcgcctgtctcctggagtggaagaggcctgctccctggctctgggtctgctgggggcacagtaaatcagtcttggcacccacatccagggcagagaggtctgtggttctcagcatcagaaggcagcgcagcccctctcctcttcaggctacagggttgtcacctgctgagtcctcaggttgtttggcctctctggtccatcttgggcattaggttctccagcagagctctggccagctgcctcttctttaactgggaacacaggctctcacaagatcagaacccccactcacccccaagatcttatctagcaagcctgtagtattcagtttctgttgtaggaagagagcgaggcatccctgaattccacgcatctgctggaaacgagccgtgtcagatcgcacatccctgcgcccccatgcccccatgcccctctgagtcacacaggacagaggaggcagagcttctgcccactgttatcttcactttctttgtccagtcttttgtttttaataagcagtgaccctccctactcttctttttaatgatttttgtagttgatttgtctgaactgtggctactgtgcattccttgaataatcacttgtaaaaattgtcagtgcttgaagctgtttcctttactcacattgaagggacttcgttggttttttggagtcttggttgtgactccaagagcagagtgaggaagacccccaagcatagactcgggtactgtgatgatggctgcagtccagttttatgattctgcttttatgtgtcccttgataacagtgacttaacaatatacattcctcataaataaaaaaaaaacaagaatctgaaaaaaaaaacaagaatctgaattcttaaaaaaaaaaaag

SEQ ID NO: 74188 - DNA, 6590 bp, Homo sapiens
  misc_feature (1)..(2): n is a, c, g, or t
nngaggaaacgaaagcgaaattgaaccggagccatcttgggcccggcgcgcagacccgcggagtttcccgtgccgacgccccggggccacttccagtgcggagtagcggaggcgtgggggcctcgaggggctggcgcggtccagcggtcgggccagggtcgtgccgccggcgggtcgggccgggcaatgcctcgcgggcgcaatgaatccgcggcaggggtattccctcagcggatactacacccatccatttcaaggctatgagcacagacagctcagataccagcagcctgggccaggatcttcccccagtagtttcctgcttaagcaaatagaatttctcaaggggcagctcccagaagcaccggtgattggaaagcagacaccgtcactgccaccttccctcccaggactccggccaaggtttccagtactacttgcctccagtaccagaggcaggcaagtggacatcaggggtgtccccaggggcgtgcatctcggaagtcaggggctccagagagggttccagcatccttcaccacgtggcaggagtctgccacagagaggtgttgattgcctttcctcacatttccaggaactgagtatctaccaagatcaggaacaaaggatcttaaagttcctggaagagcttggggaagggaaggccaccacagcacatgatctgtctgggaaacttgggactccgaagaaagaaatcaatcgagttttatactccctggcaaagaagggcaagctacagaaagaggcaggaacaccccctttgtggaaaatcgcggtctccactcaggcttggaaccagcacagcggagtggtaagaccagacggtcatagccaaggagccccaaactcagacccgagtttggaaccggaagacagaaactccacatctgtctcagaagatcttcttgagccttttattgcagtctcagctcaggcttggaaccagcacagcggagtggtaagaccagacagtcatagccaaggatccccaaactcagacccaggtttggaacctgaagacagcaactccacatctgccttggaagatcctcttgagtttttagacatggccgagatcaaggagaaaatctgcgactatctcttcaatgtgtctgactcctctgccctgaatttggctaaaaatattggccttaccaaggcccgagatataaatgctgtgctaattgacatggaaaggcagggggatgtctatagacaagggacaacccctcccatatggcatttgacagacaagaagcgagagaggatgcaaatcaagagaaatacgaacagtgttcctgaaaccgctccagctgcaatccctgagaccagaagaaacgcagagttcctcacctgtaatatacccacatcaaatgcctcaaataacatggtaaccacagaaaaagtggagaatgggcaggaacctgtcataaagttagaaaacaggcaagaggccagaccagaaccagcaagactgaaaccacctgttcattacaatggcccctcaaaagcagggtatgttgactttgaaaatggccagtgggccacagatgacatcccagatgacttgaatagtatccgcgcagcaccaggtgagtttcgagccatcatggagatgccctccttctacagtcatggcttgccacggtgttcaccctacaagaaactgacagagtgccagctgaagaaccccatcagcgggctgttagaatatgcccagttcgctagtcaaacctgtgagttcaacatgatagagcagagtggaccaccccatgaacctcgatttaaattccaggttgtcatcaatggccgagagtttcccccagctgaagctggaagcaagaaagtggccaagcaggatgcagctatgaaagccatgacaattctgctagaggaagccaaagccaaggacagtggaaaatcagaagaatcatcccactattccacagagaaagaatcagagaagactgcagagtcccagacccccaccccttcagccacatccttcttttctgggaagagccccgtcaccacactgcttgagtgtatgcacaaattggggaactcctgcgaattccgtctcctgtccaaagaaggccctgcccatgaacccaagttccaatactgtgttgcagtgggagcccaaactttccccagtgtgagtgctcccagcaagaaagtggcaaagcagatggccgcagaggaagccatgaaggccctgcatggggaggcgaccaactccatggcttctgataaccagcctgaaggtatgatctcagagtcacttgataacttggaatccatgatgcccaacaaggtcaggaagattggcgagctcgtgagatacctgaacaccaaccctgtgggtggccttttggagtacgcccgctcccatggctttgctgctgaattcaagttggtcgaccagtccggacctcctcacgagcccaagttcgtttaccaagcaaaagttgggggtcgctggttcccagccgtctgcgcacacagcaagaagcaaggcaagcaggaagcagcagatgcggctctccgtgtcttgattggggagaacgagaaggcagaacgcatgggtttcacagagctccctctcactggcagcaccttccatgaccagatagccatgctgagccaccggtgcttcaacactctgactaacagcttccagccctccttgctcggccgcaagattctggccgccatcattatgaaaaaagactctgaggacatgggtgtcgtcgtcagcttgggaacagggaatcgctgtgtgaaaggagattctctcagcctaaaaggagaaactgtcaatgactgccatgcagaaataatctcccggagaggcttcatcaggtttctctacagtgagttaatgaaatacaactcccagactgcgaaggatagtatatttgaacctgctaagggaggagaaaagctccaaataaaaaagactgtgtcattccatctgtatatcagcactgctccgtgtggagatggcgccctctttgacaagtcctgcagcgaccgtgctatggaaagcacagaatcccgccactaccctgtcttcgagaatcccaaacaaggaaagctccgcaccaaggtggagaacggagaaggcacaatccctgtggaatccagtgacattgtgcctacgtgggatggcattcggctcggggagagactccgtaccatgtcctgtagtgacaaaatcctacgctggaacgtgctgggcctgcaaggggcactgttgacccacttcctgcagcccatttatctcaaatctgtcacattgggttaccttttcagccaagggcatctgacccgtgctatttgctgtcgtgtgacaagagatgggagtgcatttgaggatggactacgacatccctttattgtcaaccaccccaaggttggcagagtcagcatatatgattccaaaaggcaatccgggaagactaaggagacaagcgtcaactggtgtctggctgatggctatgacctggagatcctggacggtaccagaggcactgtggatgggccacggaatgaattgtcccgggtctccaaaaagaacatttttcttctatttaagaagctctgctccttccgttaccgcagggatctactgagactctcctatggtgaggccaagaaagctgcccgtgactacgagacggccaagaactacttcaaaaaaggcctgaaggatatgggctatgggaactggattagcaaaccccaggaggaaaagaacttttatctctgcccagtatagtatgctccagtgacagatggattagggtgtgtcatactagggtgtgagagaggtaggtcgtagcattcctcatcacatggtcaggggatttttttttctcctttttttttctttttaagccataattggtgatactgaaaactttgggttcccatttatcctgctttctttgggattgctaggcaaggtctggccaggccccccttttttcccccaagtgaagaggcagaaacctaagaagttatcttttctttctacccaaagcatacatagtcactgagcacctgcggtccatttcctcttaaaagttttgttttgatttgtttccatttcctttccctttgtgtttgctacactgacctcttgcggtcttgattaggtttcagtcaactctggatcatgtcagggactgataatttcatttgtggattacgcagacccctctacttcccctctttcccttctgagattctttccttgtgatctgaatgtctccttttccccctcagagggcaaagaggtgaacataaaggatttggtgaaacatttgtaagggtaggagttgaaaactgcagttcccagtgccacggaagtgtgattggagcctgcagataatgcccagccatcctcccatcctgcactttagccagctgcagggcgggcaaggcaaggaaagctgcttccctggaagtgtatcactttctccggcagctgggaagtctagaaccagccagactgggttaagggagctgctcaagcaatagcagaggtttcacccggcaggatgacacagaccacttcccagggagcacgggcatgccttggaatattgccaagcttccagctgcctcttctcctaaagcattcctaggaatattttccccgccaatgctgggcgtacaccctagccaacgggacaaatcctagagggtataaaatcatctctgctcagataatcatgacttagcaagaataagggcaaaaaatcctgttggcttaacgtcactgttccacctggtgtaatatctctcatgacagtgacaccaagggaagttgactaagtcacatgtaaattaggagtgttttaaagaatgccatagatgttgattcttaactgctacagataacctgtaattgagcagatttaaaattcaggcatacttttccatttatccaagtgctttcatttttccagatggcttcagaagtaggctcgtgggcagggcgcagacctgatctttatagggttgacatagaaagcagtagttgtgggtgaaagggcaggttgtcttcaaactctgtgaggtagaatcctttgtctatacctccatgaacattgactcgtgtgttcagagcctttggcctctctgtggagtctggctctctggctcctgtgcattctttgaatagtcactcgtaaaaactgtcagtgcttgaaactgtttcctttactcatgttgaagggactttgttggcttttagagtgttggtcatgactccaagagcagagcagggaagagcccaagcatagacttggtgccgtggtgatggctgcagtccagttttgtgatgctgcttttacgtgtccctcgataacagtcagctagacacactcaggaggactactgaggctctgcgaccttcaggagctgagcctgcctctctcctttagatgacagaccttcatctgggaacgtgctgagccagcaccctcagatgatttccctccaaactgctgactaggtcatcctctgtctggtagagacattcacatctttgcttttattctatgctctctgtacttttgaccaaaaattgaccaaagtaagaaaatgcaagttctaaaaatagactaaggatgcctttgcagaacaccaaagcatcccaaggaactggtagggaagtggcgcctgtctcctggagtggaagaggcctgctccctggctctgggtctgctgggggcacagtaaatcagtcttggcacccacatccagggcagagaggtctgtggttctcagcatcagaaggcagcgcagcccctctcctcttcaggctacagggttgtcacctgctgagtcctcaggttgtttggcctctctggtccatcttgggcattaggttctccagcagagctctggccagctgcctcttctttaactgggaacacaggctctcacaagatcagaacccccactcacccccaagatcttatctagcaagcctgtagtattcagtttctgttgtaggaagagagcgaggcatccctgaattccacgcatctgctggaaacgagccgtgtcagatcgcacatccctgcgcccccatgcccccatgcccctctgagtcacacaggacagaggaggcagagcttctgcccactgttatcttcactttctttgtccagtcttttgtttttaataagcagtgaccctccctactcttctttttaatgatttttgtagttgatttgtctgaactgtggctactgtgcattccttgaataatcacttgtaaaaattgtcagtgcttgaagctgtttcctttactcacattgaagggacttcgttggttttttggagtcttggttgtgactccaagagcagagtgaggaagacccccaagcatagactcgggtactgtgatgatggctgcagtccagttttatgattctgcttttatgtgtcccttgataacagtgacttaacaatatacattcctcataaataaaaaaaaaacaagaatctgaaaaaaaaaacaagaatctgaattcttaaaaaaaaaaaag

SEQ ID NO: 74189 - DNA, 862 bp, Homo sapiens
gtaaaggcaaagggggtagtgcttatctcttgatcctaaatatgtgagaccagattaaagtgaaatctgggaggcaatgaatgttaaatgagttgttatgtaatttgcatagaggtgatgctgagagatttagaaaggatcactgtgggttgcttgctcactttcttgctctcctattccgtagctttccaaatggctgtactcaacggtggcttggtgtttaggggatttaaggggggcaaaaagaaagattaataatctcctcctctccctctaaccctactgccctaagatatccttagcaaacttacatctcctttcttttctctgtgttcattccattgtgcgcacacatacacattcatggattttctctttttgtttagggaaaaaaattataatgtacatactattctacaactttttgttgttttattgaacattatatgattcctaaattatccccaggtgaatacaaatagatatgacacattttaaaaaaataaaataactggccgggcgtggtagctcatgcctgtaatcccagcactttgggagcccgaggagggcggatcaggagatcgacaccatcctggccagcatggtgaaaccccatctctactaaaaatacaaaaattagctgggtgtggtggcgtgcgcctgtaatcccagctactccggaggctgaggcaggagaatcacttgaacccgggaggcggagattgcagtgagctgagatcacactgcactccagcctgattgcagtgagccgagatcatgccactgcactccagcttggcaacagagcgagactccgtctcacaagaaaaaaaataaccgtgtgagtactattccatagaat

SEQ ID NO: 74190 - DNA, 885 bp, Homo sapiens
agtggttgttgcgtgtgtgggtggttgatgtgttgtgttgttgtgttcgttgatgtgttggttagtttgttgtctgtgtgctgtgtgtgtgtgtatggtcggtgtgtatgttatgagcgacgctgagagaagtggccgaagaatagttcgggagcccagaagtcttagccaccgcagggcatatgccgccgtggggtacaccacagataacccccgaaaaagggttatagtttgtcctccggggccactataaaactcgctgaaggagagggggccccacaacaagttgggcccccacgcacagaggaagatgggggctcctctctccaacgagagttcccaggagggacccagctgtgttccacgccaacgcgactgtgtttataaacgcggcggcccgtggcccctgggcctgataataatacgagaccgcccctataaggggggcccgccctggtgaaaaaaaaaaacgggggagcgcggctaatggggccccccggggggaattttttggccccccccctttttttttttttttttttttttttttttttttttttttttgatttgtctgaactgtggctactgtgcattccttgaataatcacttgtaaaaattgtcagtgcttgaagctgtttcctttactcacattgaagggacttcgttggttttttggagtcttggttgtgactccaagagcagagtgaggaagacccccaagcatagactcgggtactgtgatgatggctgcagtccagttttatgattctgcttttatgtgtcccttgataacagtgacttaacaatatacattcctcataaataaaaaaaaaacaagaatctgaaaaaaaaaacaagaatctgaattcttaaaaaaaaaaaag

SEQ ID NO: 74191 - DNA, 695 bp, Homo sapiens
ctccagcagaatatctcccgagagcttcatcagtttctctacagtgagttaatgaaatacaactcccagactgcgaaggatagtatatttgaacctgctaagggaggagaaaagctccaaataaaaaagactgtgtcattccatctgtatatcagcactgctccgtgtggagatggcgccctctttgacaagtcctgcttatctcgaggagataagcaggatttttgaccaagtagcttaaaagccagcaaaacagggatcagtgacagcaactgtagtgtatggagtatgaaatgacaaactttacacaaatacactgttagaaatttaccagtgaacactgaagatctgagaagctgctctttggaacagtcaagtgggaccaccttattccagtcacataagcccttgtaaagtaacacagtgttctgtgctatatacttgctggctgggtagttacaggatttgttttgtcattagcagctgaaaaacttattccacatgttcttaaagccttaatggtggaaaaaaaggcaagtgtcattagcatggtggatcatatacttctgcacacaaacacaagaggcttcactagtatttttaaagtctctgatgtctcccattgcacttcaaagctcaattgagatgaaagcctttctccatcgtagcagctagcaggcgctctcctgctatct

SEQ ID NO: 74192 - DNA, 6487 bp, Homo sapiens
  misc_feature (17)..(17): n is a, c, g, or t
  misc_feature (24)..(24): n is a, c, g, or t
  misc_feature (26)..(27): n is a, c, g, or t
gggggggggagggctcncggccgnannggcagcctccgggtgtccggccgtgtcccgaggaagtgcaagacccggggtattccctcagcggatactacacccatccatttcaaggctatgagcacagacagctcagataccagcagcctgggccaggatcttcccccagtagtttcctgcttaagcaaatagaatttctcaaggggcagctcccagaagcaccggtgattggaaagcagacaccgtcactgccaccttccctcccaggactccggccaaggtttccagtactacttgcctccagtaccagaggcaggcaagtggacatcaggggtgtccccaggggcgtgcatctcggaagtcaggggctccagagagggttccagcatccttcaccacgtggcaggagtctgccacagagaggtgttgattgcctttcctcacatttccaggaactgagtatctaccaagatcaggaacaaaggatcttaaagttcctggaagagcttggggaagggaaggccaccacagcacatgatctgtctgggaaacttgggactccgaagaaagaaatcaatcgagttttatactccctggcaaagaagggcaagctacagaaagaggcaggaacaccccctttgtggaaaatcgcggtctccactcaggcttggaaccagcacagcggagtggtaagaccagacggtcatagccaaggagccccaaactcagacccgagtttggaaccggaagacagaaactccacatctgtctcagaagatcttcttgagccttttattgcagtctcagctcaggcttggaaccagcacagcggagtggtaagaccagacagtcatagccaaggatccccaaactcagacccaggtttggaacctgaagacagcaactccacatctgccttggaagatcctcttgagtttttagacatggccgagatcaaggagaaaatctgcgactatctcttcaatgtgtctgactcctctgccctgaatttggctaaaaatattggccttaccaaggcccgagatataaatgctgtgctaattgacatggaaaggcagggggatgtctatagacaagggacaacccctcccatatggcatttgacagacaagaagcgagagaggatgcaaatcaagagaaatacgaacagtgttcctgaaaccgctccagctgcaatccctgagaccagaagaaacgcagagttcctcacctgtaatatacccacatcaaatgcctcaaataacatggtaaccacagaaaaagtggagaatgggcaggaacctgtcataaagttagaaaacaggcaagaggccagaccagaaccagcaagactgaaaccacctgttcattacaatggcccctcaaaagcagggtatgttgactttgaaaatggccagtgggccacagatgacatcccagatgacttgaatagtatccgcgcagcaccaggtgagtttcgagccatcatggagatgccctccttctacagtcatggcttgccacggtgttcaccctacaagaaactgacagagtgccagctgaagaaccccatcagcgggctgttagaatatgcccagttcgctagtcaaacctgtgagttcaacatgatagagcagagtggaccaccccatgaacctcgatttaaattccaggttgtcatcaatggccgagagtttcccccagctgaagctggaagcaagaaagtggccaagcaggatgcagctatgaaagccatgacaattctgctagaggaagccaaagccaaggacagtggaaaatcagaagaatcatcccactattccacagagaaagaatcagagaagactgcagagtcccagacccccaccccttcagccacatccttcttttctgggaagagccccgtcaccacactgcttgagtgtatgcacaaattggggaactcctgcgaattccgtctcctgtccaaagaaggccctgcccatgaacccaagttccaatactgtgttgcagtgggagcccaaactttccccagtgtgagtgctcccagcaagaaagtggcaaagcagatggccgcagaggaagccatgaaggccctgcatggggaggcgaccaactccatggcttctgataaccagcctgaaggtatgatctcagagtcacttgataacttggaatccatgatgcccaacaaggtcaggaagattggcgagctcgtgagatacctgaacaccaaccctgtgggtggccttttggagtacgcccgctcccatggctttgctgctgaattcaagttggtcgaccagtccggacctcctcacgagcccaagttcgtttaccaagcaaaagttgggggtcgctggttcccagccgtctgcgcacacagcaagaagcaaggcaagcaggaagcagcagatgcggctctccgtgtcttgattggggagaacgagaaggcagaacgcatgggtttcacagaggtaaccccagtgacaggggccagtctcagaagaactatgctcctcctctcaaggtccccagaagcacagccaaagacactccctctcactggcagcaccttccatgaccagatagccatgctgagccaccggtgcttcaacactctgactaacagcttccagccctccttgctcggccgcaagattctggccgccatcattatgaaaaaagactctgaggacatgggtgtcgtcgtcagcttgggaacagggaatcgctgtgtgaaaggagattctctcagcctaaaaggagaaactgtcaatgactgccatgcagaaataatctcccggagaggcttcatcaggtttctctacagtgagttaatgaaatacaactcccagactgcgaaggatagtatatttgaacctgctaagggaggagaaaagctccaaataaaaaagactgtgtcattccatctgtatatcagcactgctccgtgtggagatggcgccctctttgacaagtcctgcagcgaccgtgctatggaaagcacagaatcccgccactaccctgtcttcgagaatcccaaacaaggaaagctccgcaccaaggtggagaacggagaaggcacaatccctgtggaatccagtgacattgtgcctacgtgggatggcattcggctcggggagagactccgtaccatgtcctgtagtgacaaaatcctacgctggaacgtgctgggcctgcaaggggcactgttgacccacttcctgcagcccatttatctcaaatctgtcacattgggttaccttttcagccaagggcatctgacccgtgctatttgctgtcgtgtgacaagagatgggagtgcatttgaggatggactacgacatccctttattgtcaaccaccccaaggttggcagagtcagcatatatgattccaaaaggcaatccgggaagactaaggagacaagcgtcaactggtgtctggctgatggctatgacctggagatcctggacggtaccagaggcactgtggatgggccacggaatgaattgtcccgggtctccaaaaagaacatttttcttctatttaagaagctctgctccttccgttaccgcagggatctactgagactctcctatggtgaggccaagaaagctgcccgtgactacgagacggccaagaactacttcaaaaaaggcctgaaggatatgggctatgggaactggattagcaaaccccaggaggaaaagaacttttatctctgcccagtatagtatgctccagtgacagatggattagggtgtgtcatactagggtgtgagagaggtaggtcgtagcattcctcatcacatggtcaggggatttttttttctcctttttttttctttttaagccataattggtgatactgaaaactttgggttcccatttatcctgctttctttgggattgctaggcaaggtctggccaggccccccttttttcccccaagtgaagaggcagaaacctaagaagttatcttttctttctacccaaagcatacatagtcactgagcacctgcggtccatttcctcttaaaagttttgttttgatttgtttccatttcctttccctttgtgtttgctacactgacctcttgcggtcttgattaggtttcagtcaactctggatcatgtcagggactgataatttcatttgtggattacgcagacccctctacttcccctctttcccttctgagattctttccttgtgatctgaatgtctccttttccccctcagagggcaaagaggtgaacataaaggatttggtgaaacatttgtaagggtaggagttgaaaactgcagttcccagtgccacggaagtgtgattggagcctgcagataatgcccagccatcctcccatcctgcactttagccagctgcagggcgggcaaggcaaggaaagctgcttccctggaagtgtatcactttctccggcagctgggaagtctagaaccagccagactgggttaagggagctgctcaagcaatagcagaggtttcacccggcaggatgacacagaccacttcccagggagcacgggcatgccttggaatattgccaagcttccagctgcctcttctcctaaagcattcctaggaatattttccccgccaatgctgggcgtacaccctagccaacgggacaaatcctagagggtataaaatcatctctgctcagataatcatgacttagcaagaataagggcaaaaaatcctgttggcttaacgtcactgttccacctggtgtaatatctctcatgacagtgacaccaagggaagttgactaagtcacatgtaaattaggagtgttttaaagaatgccatagatgttgattcttaactgctacagataacctgtaattgagcagatttaaaattcaggcatacttttccatttatccaagtgctttcatttttccagatggcttcagaagtaggctcgtgggcagggcgcagacctgatctttatagggttgacatagaaagcagtagttgtgggtgaaagggcaggttgtcttcaaactctgtgaggtagaatcctttgtctatacctccatgaacattgactcgtgtgttcagagcctttggcctctctgtggagtctggctctctggctcctgtgcattctttgaatagtcactcgtaaaaactgtcagtgcttgaaactgtttcctttactcatgttgaagggactttgttggcttttagagtgttggtcatgactccaagagcagagcagggaagagcccaagcatagacttggtgccgtggtgatggctgcagtccagttttgtgatgctgcttttacgtgtccctcgataacagtcagctagacacactcaggaggactactgaggctctgcgaccttcaggagctgagcctgcctctctcctttagatgacagaccttcatctgggaacgtgctgagccagcaccctcagatgatttccctccaaactgctgactaggtcatcctctgtctggtagagacattcacatctttgcttttattctatgctctctgtacttttgaccaaaaattgaccaaagtaagaaaatgcaagttctaaaaatagactaaggatgcctttgcagaacaccaaagcatcccaaggaactggtagggaagtggcgcctgtctcctggagtggaagaggcctgctccctggctctgggtctgctgggggcacagtaaatcagtcttggcacccacatccagggcagagaggtctgtggttctcagcatcagaaggcagcgcagcccctctcctcttcaggctacagggttgtcacctgctgagtcctcaggttgtttggcctctctggtccatcttgggcattaggttctccagcagagctctggccagctgcctcttctttaactgggaacacaggctctcacaagatcagaacccccactcacccccaagatcttatctagcaagcctgtagtattcagtttctgttgtaggaagagagcgaggcatccctgaattccacgcatctgctggaaacgagccgtgtcagatcgcacatccctgcgcccccatgcccccatgcccctctgagtcacacaggacagaggaggcagagcttctgcccactgttatcttcactttctttgtccagtcttttgtttttaataagcagtgaccctccctactcttctttttaatgatttttgtagttgatttgtctgaactgtggctactgtgcattccttgaataatcacttgtaaaaattgtcagtgcttgaagctgtttcctttactcacattgaagggacttcgttggttttttggagtcttggttgtgactccaagagcagagtgaggaagacccccaagcatagactcgggtactgtgatgatggctgcagtccagttttatgattctgcttttatgtgtcccttgataacagtgacttaacaatatacattcctcataaataaaaaaaaaacaagaatctgaa

SEQ ID NO: 74193 - DNA, 6409 bp, Homo sapiens
  misc_feature (17)..(17): n is a, c, g, or t
  misc_feature (24)..(24): n is a, c, g, or t
  misc_feature (26)..(27): n is a, c, g, or t
gggggggggagggctcncggccgnannggcagcctccgggtgtccggccgtgtcccgaggaagtgcaagacccggggtattccctcagcggatactacacccatccatttcaaggctatgagcacagacagctcagataccagcagcctgggccaggatcttcccccagtagtttcctgcttaagcaaatagaatttctcaaggggcagctcccagaagcaccggtgattggaaagcagacaccgtcactgccaccttccctcccaggactccggccaaggtttccagtactacttgcctccagtaccagaggcaggcaagtggacatcaggggtgtccccaggggcgtgcatctcggaagtcaggggctccagagagggttccagcatccttcaccacgtggcaggagtctgccacagagaggtgttgattgcctttcctcacatttccaggaactgagtatctaccaagatcaggaacaaaggatcttaaagttcctggaagagcttggggaagggaaggccaccacagcacatgatctgtctgggaaacttgggactccgaagaaagaaatcaatcgagttttatactccctggcaaagaagggcaagctacagaaagaggcaggaacaccccctttgtggaaaatcgcggtctccactcaggcttggaaccagcacagcggagtggtaagaccagacggtcatagccaaggagccccaaactcagacccgagtttggaaccggaagacagaaactccacatctgtctcagaagatcttcttgagccttttattgcagtctcagctcaggcttggaaccagcacagcggagtggtaagaccagacagtcatagccaaggatccccaaactcagacccaggtttggaacctgaagacagcaactccacatctgccttggaagatcctcttgagtttttagacatggccgagatcaaggagaaaatctgcgactatctcttcaatgtgtctgactcctctgccctgaatttggctaaaaatattggccttaccaaggcccgagatataaatgctgtgctaattgacatggaaaggcagggggatgtctatagacaagggacaacccctcccatatggcatttgacagacaagaagcgagagaggatgcaaatcaagagaaatacgaacagtgttcctgaaaccgctccagctgcaatccctgagaccagaagaaacgcagagttcctcacctgtaatatacccacatcaaatgcctcaaataacatggtaaccacagaaaaagtggagaatgggcaggaacctgtcataaagttagaaaacaggcaagaggccagaccagaaccagcaagactgaaaccacctgttcattacaatggcccctcaaaagcagggtatgttgactttgaaaatggccagtgggccacagatgacatcccagatgacttgaatagtatccgcgcagcaccaggtgagtttcgagccatcatggagatgccctccttctacagtcatggcttgccacggtgttcaccctacaagaaactgacagagtgccagctgaagaaccccatcagcgggctgttagaatatgcccagttcgctagtcaaacctgtgagttcaacatgatagagcagagtggaccaccccatgaacctcgatttaaattccaggttgtcatcaatggccgagagtttcccccagctgaagctggaagcaagaaagtggccaagcaggatgcagctatgaaagccatgacaattctgctagaggaagccaaagccaaggacagtggaaaatcagaagaatcatcccactattccacagagaaagaatcagagaagactgcagagtcccagacccccaccccttcagccacatccttcttttctgggaagagccccgtcaccacactgcttgagtgtatgcacaaattggggaactcctgcgaattccgtctcctgtccaaagaaggccctgcccatgaacccaagttccaatactgtgttgcagtgggagcccaaactttccccagtgtgagtgctcccagcaagaaagtggcaaagcagatggccgcagaggaagccatgaaggccctgcatggggaggcgaccaactccatggcttctgataaccagcctgaaggtatgatctcagagtcacttgataacttggaatccatgatgcccaacaaggtcaggaagattggcgagctcgtgagatacctgaacaccaaccctgtgggtggccttttggagtacgcccgctcccatggctttgctgctgaattcaagttggtcgaccagtccggacctcctcacgagcccaagttcgtttaccaagcaaaagttgggggtcgctggttcccagccgtctgcgcacacagcaagaagcaaggcaagcaggaagcagcagatgcggctctccgtgtcttgattggggagaacgagaaggcagaacgcatgggtttcacagagctccctctcactggcagcaccttccatgaccagatagccatgctgagccaccggtgcttcaacactctgactaacagcttccagccctccttgctcggccgcaagattctggccgccatcattatgaaaaaagactctgaggacatgggtgtcgtcgtcagcttgggaacagggaatcgctgtgtgaaaggagattctctcagcctaaaaggagaaactgtcaatgactgccatgcagaaataatctcccggagaggcttcatcaggtttctctacagtgagttaatgaaatacaactcccagactgcgaaggatagtatatttgaacctgctaagggaggagaaaagctccaaataaaaaagactgtgtcattccatctgtatatcagcactgctccgtgtggagatggcgccctctttgacaagtcctgcagcgaccgtgctatggaaagcacagaatcccgccactaccctgtcttcgagaatcccaaacaaggaaagctccgcaccaaggtggagaacggagaaggcacaatccctgtggaatccagtgacattgtgcctacgtgggatggcattcggctcggggagagactccgtaccatgtcctgtagtgacaaaatcctacgctggaacgtgctgggcctgcaaggggcactgttgacccacttcctgcagcccatttatctcaaatctgtcacattgggttaccttttcagccaagggcatctgacccgtgctatttgctgtcgtgtgacaagagatgggagtgcatttgaggatggactacgacatccctttattgtcaaccaccccaaggttggcagagtcagcatatatgattccaaaaggcaatccgggaagactaaggagacaagcgtcaactggtgtctggctgatggctatgacctggagatcctggacggtaccagaggcactgtggatgggccacggaatgaattgtcccgggtctccaaaaagaacatttttcttctatttaagaagctctgctccttccgttaccgcagggatctactgagactctcctatggtgaggccaagaaagctgcccgtgactacgagacggccaagaactacttcaaaaaaggcctgaaggatatgggctatgggaactggattagcaaaccccaggaggaaaagaacttttatctctgcccagtatagtatgctccagtgacagatggattagggtgtgtcatactagggtgtgagagaggtaggtcgtagcattcctcatcacatggtcaggggatttttttttctcctttttttttctttttaagccataattggtgatactgaaaactttgggttcccatttatcctgctttctttgggattgctaggcaaggtctggccaggccccccttttttcccccaagtgaagaggcagaaacctaagaagttatcttttctttctacccaaagcatacatagtcactgagcacctgcggtccatttcctcttaaaagttttgttttgatttgtttccatttcctttccctttgtgtttgctacactgacctcttgcggtcttgattaggtttcagtcaactctggatcatgtcagggactgataatttcatttgtggattacgcagacccctctacttcccctctttcccttctgagattctttccttgtgatctgaatgtctccttttccccctcagagggcaaagaggtgaacataaaggatttggtgaaacatttgtaagggtaggagttgaaaactgcagttcccagtgccacggaagtgtgattggagcctgcagataatgcccagccatcctcccatcctgcactttagccagctgcagggcgggcaaggcaaggaaagctgcttccctggaagtgtatcactttctccggcagctgggaagtctagaaccagccagactgggttaagggagctgctcaagcaatagcagaggtttcacccggcaggatgacacagaccacttcccagggagcacgggcatgccttggaatattgccaagcttccagctgcctcttctcctaaagcattcctaggaatattttccccgccaatgctgggcgtacaccctagccaacgggacaaatcctagagggtataaaatcatctctgctcagataatcatgacttagcaagaataagggcaaaaaatcctgttggcttaacgtcactgttccacctggtgtaatatctctcatgacagtgacaccaagggaagttgactaagtcacatgtaaattaggagtgttttaaagaatgccatagatgttgattcttaactgctacagataacctgtaattgagcagatttaaaattcaggcatacttttccatttatccaagtgctttcatttttccagatggcttcagaagtaggctcgtgggcagggcgcagacctgatctttatagggttgacatagaaagcagtagttgtgggtgaaagggcaggttgtcttcaaactctgtgaggtagaatcctttgtctatacctccatgaacattgactcgtgtgttcagagcctttggcctctctgtggagtctggctctctggctcctgtgcattctttgaatagtcactcgtaaaaactgtcagtgcttgaaactgtttcctttactcatgttgaagggactttgttggcttttagagtgttggtcatgactccaagagcagagcagggaagagcccaagcatagacttggtgccgtggtgatggctgcagtccagttttgtgatgctgcttttacgtgtccctcgataacagtcagctagacacactcaggaggactactgaggctctgcgaccttcaggagctgagcctgcctctctcctttagatgacagaccttcatctgggaacgtgctgagccagcaccctcagatgatttccctccaaactgctgactaggtcatcctctgtctggtagagacattcacatctttgcttttattctatgctctctgtacttttgaccaaaaattgaccaaagtaagaaaatgcaagttctaaaaatagactaaggatgcctttgcagaacaccaaagcatcccaaggaactggtagggaagtggcgcctgtctcctggagtggaagaggcctgctccctggctctgggtctgctgggggcacagtaaatcagtcttggcacccacatccagggcagagaggtctgtggttctcagcatcagaaggcagcgcagcccctctcctcttcaggctacagggttgtcacctgctgagtcctcaggttgtttggcctctctggtccatcttgggcattaggttctccagcagagctctggccagctgcctcttctttaactgggaacacaggctctcacaagatcagaacccccactcacccccaagatcttatctagcaagcctgtagtattcagtttctgttgtaggaagagagcgaggcatccctgaattccacgcatctgctggaaacgagccgtgtcagatcgcacatccctgcgcccccatgcccccatgcccctctgagtcacacaggacagaggaggcagagcttctgcccactgttatcttcactttctttgtccagtcttttgtttttaataagcagtgaccctccctactcttctttttaatgatttttgtagttgatttgtctgaactgtggctactgtgcattccttgaataatcacttgtaaaaattgtcagtgcttgaagctgtttcctttactcacattgaagggacttcgttggttttttggagtcttggttgtgactccaagagcagagtgaggaagacccccaagcatagactcgggtactgtgatgatggctgcagtccagttttatgattctgcttttatgtgtcccttgataacagtgacttaacaatatacattcctcataaataaaaaaaaaacaagaatctgaa

SEQ ID NO: 74194 - DNA, 6351 bp, Homo sapiens
  misc_feature (17)..(17): n is a, c, g, or t
  misc_feature (24)..(24): n is a, c, g, or t
  misc_feature (26)..(27): n is a, c, g, or t
gggggggggagggctcncggccgnannggcagcctccgggtgtccggccgtgtcccgaggaagtgcaagacccggggtattccctcagcggatactacacccatccatttcaaggctatgagcacagacagctcagataccagcagcctgggccaggatcttcccccagtagtttcctgcttaagcaaatagaatttctcaaggggcagctcccagaagcaccggtgattggaaagcagacaccgtcactgccaccttccctcccaggactccggccaaggtttccagtactacttgcctccagtaccagaggcaggaactgagtatctaccaagatcaggaacaaaggatcttaaagttcctggaagagcttggggaagggaaggccaccacagcacatgatctgtctgggaaacttgggactccgaagaaagaaatcaatcgagttttatactccctggcaaagaagggcaagctacagaaagaggcaggaacaccccctttgtggaaaatcgcggtctccactcaggcttggaaccagcacagcggagtggtaagaccagacggtcatagccaaggagccccaaactcagacccgagtttggaaccggaagacagaaactccacatctgtctcagaagatcttcttgagccttttattgcagtctcagctcaggcttggaaccagcacagcggagtggtaagaccagacagtcatagccaaggatccccaaactcagacccaggtttggaacctgaagacagcaactccacatctgccttggaagatcctcttgagtttttagacatggccgagatcaaggagaaaatctgcgactatctcttcaatgtgtctgactcctctgccctgaatttggctaaaaatattggccttaccaaggcccgagatataaatgctgtgctaattgacatggaaaggcagggggatgtctatagacaagggacaacccctcccatatggcatttgacagacaagaagcgagagaggatgcaaatcaagagaaatacgaacagtgttcctgaaaccgctccagctgcaatccctgagaccagaagaaacgcagagttcctcacctgtaatatacccacatcaaatgcctcaaataacatggtaaccacagaaaaagtggagaatgggcaggaacctgtcataaagttagaaaacaggcaagaggccagaccagaaccagcaagactgaaaccacctgttcattacaatggcccctcaaaagcagggtatgttgactttgaaaatggccagtgggccacagatgacatcccagatgacttgaatagtatccgcgcagcaccaggtgagtttcgagccatcatggagatgccctccttctacagtcatggcttgccacggtgttcaccctacaagaaactgacagagtgccagctgaagaaccccatcagcgggctgttagaatatgcccagttcgctagtcaaacctgtgagttcaacatgatagagcagagtggaccaccccatgaacctcgatttaaattccaggttgtcatcaatggccgagagtttcccccagctgaagctggaagcaagaaagtggccaagcaggatgcagctatgaaagccatgacaattctgctagaggaagccaaagccaaggacagtggaaaatcagaagaatcatcccactattccacagagaaagaatcagagaagactgcagagtcccagacccccaccccttcagccacatccttcttttctgggaagagccccgtcaccacactgcttgagtgtatgcacaaattggggaactcctgcgaattccgtctcctgtccaaagaaggccctgcccatgaacccaagttccaatactgtgttgcagtgggagcccaaactttccccagtgtgagtgctcccagcaagaaagtggcaaagcagatggccgcagaggaagccatgaaggccctgcatggggaggcgaccaactccatggcttctgataaccagcctgaaggtatgatctcagagtcacttgataacttggaatccatgatgcccaacaaggtcaggaagattggcgagctcgtgagatacctgaacaccaaccctgtgggtggccttttggagtacgcccgctcccatggctttgctgctgaattcaagttggtcgaccagtccggacctcctcacgagcccaagttcgtttaccaagcaaaagttgggggtcgctggttcccagccgtctgcgcacacagcaagaagcaaggcaagcaggaagcagcagatgcggctctccgtgtcttgattggggagaacgagaaggcagaacgcatgggtttcacagaggtaaccccagtgacaggggccagtctcagaagaactatgctcctcctctcaaggtccccagaagcacagccaaagacactccctctcactggcagcaccttccatgaccagatagccatgctgagccaccggtgcttcaacactctgactaacagcttccagccctccttgctcggccgcaagattctggccgccatcattatgaaaaaagactctgaggacatgggtgtcgtcgtcagcttgggaacagggaatcgctgtgtgaaaggagattctctcagcctaaaaggagaaactgtcaatgactgccatgcagaaataatctcccggagaggcttcatcaggtttctctacagtgagttaatgaaatacaactcccagactgcgaaggatagtatatttgaacctgctaagggaggagaaaagctccaaataaaaaagactgtgtcattccatctgtatatcagcactgctccgtgtggagatggcgccctctttgacaagtcctgcagcgaccgtgctatggaaagcacagaatcccgccactaccctgtcttcgagaatcccaaacaaggaaagctccgcaccaaggtggagaacggagaaggcacaatccctgtggaatccagtgacattgtgcctacgtgggatggcattcggctcggggagagactccgtaccatgtcctgtagtgacaaaatcctacgctggaacgtgctgggcctgcaaggggcactgttgacccacttcctgcagcccatttatctcaaatctgtcacattgggttaccttttcagccaagggcatctgacccgtgctatttgctgtcgtgtgacaagagatgggagtgcatttgaggatggactacgacatccctttattgtcaaccaccccaaggttggcagagtcagcatatatgattccaaaaggcaatccgggaagactaaggagacaagcgtcaactggtgtctggctgatggctatgacctggagatcctggacggtaccagaggcactgtggatgggccacggaatgaattgtcccgggtctccaaaaagaacatttttcttctatttaagaagctctgctccttccgttaccgcagggatctactgagactctcctatggtgaggccaagaaagctgcccgtgactacgagacggccaagaactacttcaaaaaaggcctgaaggatatgggctatgggaactggattagcaaaccccaggaggaaaagaacttttatctctgcccagtatagtatgctccagtgacagatggattagggtgtgtcatactagggtgtgagagaggtaggtcgtagcattcctcatcacatggtcaggggatttttttttctcctttttttttctttttaagccataattggtgatactgaaaactttgggttcccatttatcctgctttctttgggattgctaggcaaggtctggccaggccccccttttttcccccaagtgaagaggcagaaacctaagaagttatcttttctttctacccaaagcatacatagtcactgagcacctgcggtccatttcctcttaaaagttttgttttgatttgtttccatttcctttccctttgtgtttgctacactgacctcttgcggtcttgattaggtttcagtcaactctggatcatgtcagggactgataatttcatttgtggattacgcagacccctctacttcccctctttcccttctgagattctttccttgtgatctgaatgtctccttttccccctcagagggcaaagaggtgaacataaaggatttggtgaaacatttgtaagggtaggagttgaaaactgcagttcccagtgccacggaagtgtgattggagcctgcagataatgcccagccatcctcccatcctgcactttagccagctgcagggcgggcaaggcaaggaaagctgcttccctggaagtgtatcactttctccggcagctgggaagtctagaaccagccagactgggttaagggagctgctcaagcaatagcagaggtttcacccggcaggatgacacagaccacttcccagggagcacgggcatgccttggaatattgccaagcttccagctgcctcttctcctaaagcattcctaggaatattttccccgccaatgctgggcgtacaccctagccaacgggacaaatcctagagggtataaaatcatctctgctcagataatcatgacttagcaagaataagggcaaaaaatcctgttggcttaacgtcactgttccacctggtgtaatatctctcatgacagtgacaccaagggaagttgactaagtcacatgtaaattaggagtgttttaaagaatgccatagatgttgattcttaactgctacagataacctgtaattgagcagatttaaaattcaggcatacttttccatttatccaagtgctttcatttttccagatggcttcagaagtaggctcgtgggcagggcgcagacctgatctttatagggttgacatagaaagcagtagttgtgggtgaaagggcaggttgtcttcaaactctgtgaggtagaatcctttgtctatacctccatgaacattgactcgtgtgttcagagcctttggcctctctgtggagtctggctctctggctcctgtgcattctttgaatagtcactcgtaaaaactgtcagtgcttgaaactgtttcctttactcatgttgaagggactttgttggcttttagagtgttggtcatgactccaagagcagagcagggaagagcccaagcatagacttggtgccgtggtgatggctgcagtccagttttgtgatgctgcttttacgtgtccctcgataacagtcagctagacacactcaggaggactactgaggctctgcgaccttcaggagctgagcctgcctctctcctttagatgacagaccttcatctgggaacgtgctgagccagcaccctcagatgatttccctccaaactgctgactaggtcatcctctgtctggtagagacattcacatctttgcttttattctatgctctctgtacttttgaccaaaaattgaccaaagtaagaaaatgcaagttctaaaaatagactaaggatgcctttgcagaacaccaaagcatcccaaggaactggtagggaagtggcgcctgtctcctggagtggaagaggcctgctccctggctctgggtctgctgggggcacagtaaatcagtcttggcacccacatccagggcagagaggtctgtggttctcagcatcagaaggcagcgcagcccctctcctcttcaggctacagggttgtcacctgctgagtcctcaggttgtttggcctctctggtccatcttgggcattaggttctccagcagagctctggccagctgcctcttctttaactgggaacacaggctctcacaagatcagaacccccactcacccccaagatcttatctagcaagcctgtagtattcagtttctgttgtaggaagagagcgaggcatccctgaattccacgcatctgctggaaacgagccgtgtcagatcgcacatccctgcgcccccatgcccccatgcccctctgagtcacacaggacagaggaggcagagcttctgcccactgttatcttcactttctttgtccagtcttttgtttttaataagcagtgaccctccctactcttctttttaatgatttttgtagttgatttgtctgaactgtggctactgtgcattccttgaataatcacttgtaaaaattgtcagtgcttgaagctgtttcctttactcacattgaagggacttcgttggttttttggagtcttggttgtgactccaagagcagagtgaggaagacccccaagcatagactcgggtactgtgatgatggctgcagtccagttttatgattctgcttttatgtgtcccttgataacagtgacttaacaatatacattcctcataaataaaaaaaaaacaagaatctgaa

SEQ ID NO: 74195 - DNA, 4454 bp, Homo sapiens
  misc_feature (7)..(7): n is a, c, g, or t
ctgactnagaggatccctcgaatcgacggttctcatccaaaggttcgtttaccaagcaaaagttgggggtcgctggttcccagccgtctgcgcacacagcaagaagcaaggcaagcaggaagcagcagatgcggctctccgtgtcttgattggggagaacgagaaggcagaacgcatgggtttcacagaggtaaccccagtgacaggggccagtctcagaagaactatgctcctcctctcaaggtccccagaagcacagccaaagacagttaagacgtctacttttggtgccttttttggggggggggggtcctcctaactcctaagtggaggtggctcttgctgtcatgcgagttattcctaggctttactcttagcctcgagagagcagtaactgggacactagatgtaagaaggaaaagatgactcacacgacaagtagagcttgatctccctgcccacggtgaatatggtggacacagcctcagctttgtggtgctgacacagcctcttttccccacactccctctcactggcagcaccttccatgaccagatagccatgctgagccaccggtgcttcaacactctgactaacagcttccagccctccttgctcggccgcaagattctggccgccatcattatgaaaaaagactctgaggacatgggtgtcgtcgtcagcttgggaacagggaatcgctgtgtgaaaggagattctctcagcctaaaaggagaaactgtcaatgactgccatgcagaaataatctcccggagaggcttcatcaggtttctctacagtgagttaatgaaatacaactcccagactgcgaaggatagtatatttgaacctgctaagggaggagaaaagctccaaataaaaaagactgtgtcattccatctgtatatcagcactgctccgtgtggagatggcgccctctttgacaagtcctgcagcgaccgtgctatggaaagcacagaatcccgccactaccctgtcttcgagaatcccaaacaaggaaagctccgcaccaaggtggagaacggagaaggcacaatccctgtggaatccagtgacattgtgcctacgtgggatggcattcggctcggggagagactccgtaccatgtcctgtagtgacaaaatcctacgctggaacgtgctgggcctgcaaggggcactgttgacccacttcctgcagcccatttatctcaaatctgtcacattgggttaccttttcagccaagggcatctgacccgtgctatttgctgtcgtgtgacaagagatgggagtgcatttgaggatggactacgacatccctttattgtcaaccaccccaaggttggcagagtcagcatatatgattccaaaaggcaatccgggaagactaaggagacaagcgtcaactggtgtctggctgatggctatgacctggagatcctggacggtaccagaggcactgtggatgggccacggaatgaattgtcccgggtctccaaaaagaacatttttcttctatttaagaagctctgctccttccgttaccgcagggatctactgagactctcctatggtgaggccaagaaagctgcccgtgactacgagacggccaagaactacttcaaaaaaggcctgaaggatatgggctatgggaactggattagcaaaccccaggaggaaaagaacttttatctctgcccagtatagtatgctccagtgacagatggattagggtgtgtcatactagggtgtgagagaggtaggtcgtagcattcctcatcacatggtcaggggatttttttttctcctttttttttctttttaagccataattggtgatactgaaaactttgggttcccatttatcctgctttctttgggattgctaggcaaggtctggccaggccccccttttttcccccaagtgaagaggcagaaacctaagaagttatcttttctttctacccaaagcatacatagtcactgagcacctgcggtccatttcctcttaaaagttttgttttgatttgtttccatttcctttccctttgtgtttgctacactgacctcttgcggtcttgattaggtttcagtcaactctggatcatgtcagggactgataatttcatttgtggattacgcagacccctctacttcccctctttcccttctgagattctttccttgtgatctgaatgtctccttttccccctcagagggcaaagaggtgaacataaaggatttggtgaaacatttgtaagggtaggagttgaaaactgcagttcccagtgccacggaagtgtgattggagcctgcagataatgcccagccatcctcccatcctgcactttagccagctgcagggcgggcaaggcaaggaaagctgcttccctggaagtgtatcactttctccggcagctgggaagtctagaaccagccagactgggttaagggagctgctcaagcaatagcagaggtttcacccggcaggatgacacagaccacttcccagggagcacgggcatgccttggaatattgccaagcttccagctgcctcttctcctaaagcattcctaggaatattttccccgccaatgctgggcgtacaccctagccaacgggacaaatcctagagggtataaaatcatctctgctcagataatcatgacttagcaagaataagggcaaaaaatcctgttggcttaacgtcactgttccacctggtgtaatatctctcatgacagtgacaccaagggaagttgactaagtcacatgtaaattaggagtgttttaaagaatgccatagatgttgattcttaactgctacagataacctgtaattgagcagatttaaaattcaggcatacttttccatttatccaagtgctttcatttttccagatggcttcagaagtaggctcgtgggcagggcgcagacctgatctttatagggttgacatagaaagcagtagttgtgggtgaaagggcaggttgtcttcaaactctgtgaggtagaatcctttgtctatacctccatgaacattgactcgtgtgttcagagcctttggcctctctgtggagtctggctctctggctcctgtgcattctttgaatagtcactcgtaaaaactgtcagtgcttgaaactgtttcctttactcatgttgaagggactttgttggcttttagagtgttggtcatgactccaagagcagagcagggaagagcccaagcatagacttggtgccgtggtgatggctgcagtccagttttgtgatgctgcttttacgtgtccctcgataacagtcagctagacacactcaggaggactactgaggctctgcgaccttcaggagctgagcctgcctctctcctttagatgacagaccttcatctgggaacgtgctgagccagcaccctcagatgatttccctccaaactgctgactaggtcatcctctgtctggtagagacattcacatctttgcttttattctatgctctctgtacttttgaccaaaaattgaccaaagtaagaaaatgcaagttctaaaaatagactaaggatgcctttgcagaacaccaaagcatcccaaggaactggtagggaagtggcgcctgtctcctggagtggaagaggcctgctccctggctctgggtctgctgggggcacagtaaatcagtcttggcacccacatccagggcagagaggtctgtggttctcagcatcagaaggcagcgcagcccctctcctcttcaggctacagggttgtcacctgctgagtcctcaggttgtttggcctctctggtccatcttgggcattaggttctccagcagagctctggccagctgcctcttctttaactgggaacacaggctctcacaagatcagaacccccactcacccccaagatcttatctagcaagcctgtagtattcagtttctgttgtaggaagagagcgaggcatccctgaattccacgcatctgctggaaacgagccgtgtcagatcgcacatccctgcgcccccatgcccccatgcccctctgagtcacacaggacagaggaggcagagcttctgcccactgttatcttcactttctttgtccagtcttttgtttttaataagcagtgaccctccctactcttctttttaatgatttttgtagttgatttgtctgaactgtggctactgtgcattccttgaataatcacttgtaaaaattgtcagtgcttgaagctgtttcctttactcacattgaagggacttcgttggttttttggagtcttggttgtgactccaagagcagagtgaggaagacccccaagcatagactcgggtactgtgatgatggctgcagtccagttttatgattctgcttttatgtgtcccttgataacagtgacttaacaatatacattcctcataaataaaaaaaaaacaagaatctgaa

SEQ ID NO: 74196 - DNA, 3986 bp, Homo sapiens
agctcggtacccccccgactagcccgacagtccccagaagcacagcctaagacactccctctcactggcagcaccttccatgaccagatagccatgctgagccaccggtgcttcaacactctgactaacagcttccagccctccttgctcggccgcaagattctggccgccatcattatgaaaaaagactctgaggacatgggtgtcgtcgtcagcttgggaacagggaatcgctgtgtgaaaggagattctctcagcctaaaaggagaaactgtcaatgactgccatgcagaaataatctcccggagaggcttcatcaggtttctctacagtgagttaatgaaatacaactcccagactgcgaaggatagtatatttgaacctgctaagggaggagaaaagctccaaataaaaaagactgtgtcattccatctgtatatcagcactgctccgtgtggagatggcgccctctttgacaagtcctgcagcgaccgtgctatggaaagcacagaatcccgccactaccctgtcttcgagaatcccaaacaaggaaagctccgcaccaaggtggagaacggagaaggcacaatccctgtggaatccagtgacattgtgcctacgtgggatggcattcggctcggggagagactccgtaccatgtcctgtagtgacaaaatcctacgctggaacgtgctgggcctgcaaggggcactgttgacccacttcctgcagcccatttatctcaaatctgtcacattgggttaccttttcagccaagggcatctgacccgtgctatttgctgtcgtgtgacaagagatgggagtgcatttgaggatggactacgacatccctttattgtcaaccaccccaaggttggcagagtcagcatatatgattccaaaaggcaatccgggaagactaaggagacaagcgtcaactggtgtctggctgatggctatgacctggagatcctggacggtaccagaggcactgtggatgggccacggaatgaattgtcccgggtctccaaaaagaacatttttcttctatttaagaagctctgctccttccgttaccgcagggatctactgagactctcctatggtgaggccaagaaagctgcccgtgactacgagacggccaagaactacttcaaaaaaggcctgaaggatatgggctatgggaactggattagcaaaccccaggaggaaaagaacttttatctctgcccagtatagtatgctccagtgacagatggattagggtgtgtcatactagggtgtgagagaggtaggtcgtagcattcctcatcacatggtcaggggatttttttttctcctttttttttctttttaagccataattggtgatactgaaaactttgggttcccatttatcctgctttctttgggattgctaggcaaggtctggccaggccccccttttttcccccaagtgaagaggcagaaacctaagaagttatcttttctttctacccaaagcatacatagtcactgagcacctgcggtccatttcctcttaaaagttttgttttgatttgtttccatttcctttccctttgtgtttgctacactgacctcttgcggtcttgattaggtttcagtcaactctggatcatgtcagggactgataatttcatttgtggattacgcagacccctctacttcccctctttcccttctgagattctttccttgtgatctgaatgtctccttttccccctcagagggcaaagaggtgaacataaaggatttggtgaaacatttgtaagggtaggagttgaaaactgcagttcccagtgccacggaagtgtgattggagcctgcagataatgcccagccatcctcccatcctgcactttagccagctgcagggcgggcaaggcaaggaaagctgcttccctggaagtgtatcactttctccggcagctgggaagtctagaaccagccagactgggttaagggagctgctcaagcaatagcagaggtttcacccggcaggatgacacagaccacttcccagggagcacgggcatgccttggaatattgccaagcttccagctgcctcttctcctaaagcattcctaggaatattttccccgccaatgctgggcgtacaccctagccaacgggacaaatcctagagggtataaaatcatctctgctcagataatcatgacttagcaagaataagggcaaaaaatcctgttggcttaacgtcactgttccacctggtgtaatatctctcatgacagtgacaccaagggaagttgactaagtcacatgtaaattaggagtgttttaaagaatgccatagatgttgattcttaactgctacagataacctgtaattgagcagatttaaaattcaggcatacttttccatttatccaagtgctttcatttttccagatggcttcagaagtaggctcgtgggcagggcgcagacctgatctttatagggttgacatagaaagcagtagttgtgggtgaaagggcaggttgtcttcaaactctgtgaggtagaatcctttgtctatacctccatgaacattgactcgtgtgttcagagcctttggcctctctgtggagtctggctctctggctcctgtgcattctttgaatagtcactcgtaaaaactgtcagtgcttgaaactgtttcctttactcatgttgaagggactttgttggcttttagagtgttggtcatgactccaagagcagagcagggaagagcccaagcatagacttggtgccgtggtgatggctgcagtccagttttgtgatgctgcttttacgtgtccctcgataacagtcagctagacacactcaggaggactactgaggctctgcgaccttcaggagctgagcctgcctctctcctttagatgacagaccttcatctgggaacgtgctgagccagcaccctcagatgatttccctccaaactgctgactaggtcatcctctgtctggtagagacattcacatctttgcttttattctatgctctctgtacttttgaccaaaaattgaccaaagtaagaaaatgcaagttctaaaaatagactaaggatgcctttgcagaacaccaaagcatcccaaggaactggtagggaagtggcgcctgtctcctggagtggaagaggcctgctccctggctctgggtctgctgggggcacagtaaatcagtcttggcacccacatccagggcagagaggtctgtggttctcagcatcagaaggcagcgcagcccctctcctcttcaggctacagggttgtcacctgctgagtcctcaggttgtttggcctctctggtccatcttgggcattaggttctccagcagagctctggccagctgcctcttctttaactgggaacacaggctctcacaagatcagaacccccactcacccccaagatcttatctagcaagcctgtagtattcagtttctgttgtaggaagagagcgaggcatccctgaattccacgcatctgctggaaacgagccgtgtcagatcgcacatccctgcgcccccatgcccccatgcccctctgagtcacacaggacagaggaggcagagcttctgcccactgttatcttcactttctttgtccagtcttttgtttttaataagcagtgaccctccctactcttctttttaatgatttttgtagttgatttgtctgaactgtggctactgtgcattccttgaataatcacttgtaaaaattgtcagtgcttgaagctgtttcctttactcacattgaagggacttcgttggttttttggagtcttggttgtgactccaagagcagagtgaggaagacccccaagcatagactcgggtactgtgatgatggctgcagtccagttttatgattctgcttttatgtgtcccttgataacagtgacttaacaatatacattcctcataaataaaaaaaaaacaagaatctgaa

SEQ ID NO: 74197 - DNA, 3949 bp, Homo sapiens
cactcttgaggatccccgtgagaccacctttgcgaaggatagtatatttgaacctgctaagggaggagaaaagctccaaataaaaaagactgtgtcattccatctgtatatcaggtctgtacagttcctgttgctgccagggtgggccctgccaggctgttagaattgggtatccaaatgctctcctggcctgtaaatcgaacctgatacaataagccacactccactgtgggtttgaggtccatattcaggcgtagataactcacatgtactgctgtccacctccagtctcccatggtaggccttagaaaacatcccttgcctctgtcacatctgactgttttggagccccacgaaattgcagatttcccacaggtgagttttaacagccacccctgtttttcagcactgctccgtgtggagatggcgccctctttgacaagtcctgcagcgaccgtgctatggaaagcacagaatcccgccactaccctgtcttcgagaatcccaaacaaggaaagctccgcaccaaggtggagaacggagaaggcacaatccctgtggaatccagtgacattgtgcctacgtgggatggcattcggctcggggagagactccgtaccatgtcctgtagtgacaaaatcctacgctggaacgtgctgggcctgcaaggggcactgttgacccacttcctgcagcccatttatctcaaatctgtcacattgggttaccttttcagccaagggcatctgacccgtgctatttgctgtcgtgtgacaagagatgggagtgcatttgaggatggactacgacatccctttattgtcaaccaccccaaggttggcagagtcagcatatatgattccaaaaggcaatccgggaagactaaggagacaagcgtcaactggtgtctggctgatggctatgacctggagatcctggacggtaccagaggcactgtggatgggccacggaatgaattgtcccgggtctccaaaaagaacatttttcttctatttaagaagctctgctccttccgttaccgcagggatctactgagactctcctatggtgaggccaagaaagctgcccgtgactacgagacggccaagaactacttcaaaaaaggcctgaaggatatgggctatgggaactggattagcaaaccccaggaggaaaagaacttttatctctgcccagtatagtatgctccagtgacagatggattagggtgtgtcatactagggtgtgagagaggtaggtcgtagcattcctcatcacatggtcaggggatttttttttctcctttttttttctttttaagccataattggtgatactgaaaactttgggttcccatttatcctgctttctttgggattgctaggcaaggtctggccaggccccccttttttcccccaagtgaagaggcagaaacctaagaagttatcttttctttctacccaaagcatacatagtcactgagcacctgcggtccatttcctcttaaaagttttgttttgatttgtttccatttcctttccctttgtgtttgctacactgacctcttgcggtcttgattaggtttcagtcaactctggatcatgtcagggactgataatttcatttgtggattacgcagacccctctacttcccctctttcccttctgagattctttccttgtgatctgaatgtctccttttccccctcagagggcaaagaggtgaacataaaggatttggtgaaacatttgtaagggtaggagttgaaaactgcagttcccagtgccacggaagtgtgattggagcctgcagataatgcccagccatcctcccatcctgcactttagccagctgcagggcgggcaaggcaaggaaagctgcttccctggaagtgtatcactttctccggcagctgggaagtctagaaccagccagactgggttaagggagctgctcaagcaatagcagaggtttcacccggcaggatgacacagaccacttcccagggagcacgggcatgccttggaatattgccaagcttccagctgcctcttctcctaaagcattcctaggaatattttccccgccaatgctgggcgtacaccctagccaacgggacaaatcctagagggtataaaatcatctctgctcagataatcatgacttagcaagaataagggcaaaaaatcctgttggcttaacgtcactgttccacctggtgtaatatctctcatgacagtgacaccaagggaagttgactaagtcacatgtaaattaggagtgttttaaagaatgccatagatgttgattcttaactgctacagataacctgtaattgagcagatttaaaattcaggcatacttttccatttatccaagtgctttcatttttccagatggcttcagaagtaggctcgtgggcagggcgcagacctgatctttatagggttgacatagaaagcagtagttgtgggtgaaagggcaggttgtcttcaaactctgtgaggtagaatcctttgtctatacctccatgaacattgactcgtgtgttcagagcctttggcctctctgtggagtctggctctctggctcctgtgcattctttgaatagtcactcgtaaaaactgtcagtgcttgaaactgtttcctttactcatgttgaagggactttgttggcttttagagtgttggtcatgactccaagagcagagcagggaagagcccaagcatagacttggtgccgtggtgatggctgcagtccagttttgtgatgctgcttttacgtgtccctcgataacagtcagctagacacactcaggaggactactgaggctctgcgaccttcaggagctgagcctgcctctctcctttagatgacagaccttcatctgggaacgtgctgagccagcaccctcagatgatttccctccaaactgctgactaggtcatcctctgtctggtagagacattcacatctttgcttttattctatgctctctgtacttttgaccaaaaattgaccaaagtaagaaaatgcaagttctaaaaatagactaaggatgcctttgcagaacaccaaagcatcccaaggaactggtagggaagtggcgcctgtctcctggagtggaagaggcctgctccctggctctgggtctgctgggggcacagtaaatcagtcttggcacccacatccagggcagagaggtctgtggttctcagcatcagaaggcagcgcagcccctctcctcttcaggctacagggttgtcacctgctgagtcctcaggttgtttggcctctctggtccatcttgggcattaggttctccagcagagctctggccagctgcctcttctttaactgggaacacaggctctcacaagatcagaacccccactcacccccaagatcttatctagcaagcctgtagtattcagtttctgttgtaggaagagagcgaggcatccctgaattccacgcatctgctggaaacgagccgtgtcagatcgcacatccctgcgcccccatgcccccatgcccctctgagtcacacaggacagaggaggcagagcttctgcccactgttatcttcactttctttgtccagtcttttgtttttaataagcagtgaccctccctactcttctttttaatgatttttgtagttgatttgtctgaactgtggctactgtgcattccttgaataatcacttgtaaaaattgtcagtgcttgaagctgtttcctttactcacattgaagggacttcgttggttttttggagtcttggttgtgactccaagagcagagtgaggaagacccccaagcatagactcgggtactgtgatgatggctgcagtccagttttatgattctgcttttatgtgtcccttgataacagtgacttaacaatatacattcctcataaataaaaaaaaaacaagaatctgaa

SEQ ID NO: 74198 - DNA, 6425 bp, Homo sapiens
  misc_feature (17)..(17): n is a, c, g, or t
  misc_feature (24)..(24): n is a, c, g, or t
  misc_feature (26)..(27): n is a, c, g, or t
gggggggggagggctcncggccgnannggcagcctccgggtgtccggccgtgtcccgaggaagtgcaagacccggggtattccctcagcggatactacacccatccatttcaaggctatgagcacagacagctcagataccagcagcctgggccaggatcttcccccagtagtttcctgcttaagcaaatagaatttctcaaggggcagctcccagaagcaccggtgattggaaagcagacaccgtcactgccaccttccctcccaggactccggccaaggtttccagtactacttgcctccagtaccagaggcaggcaagtggacatcaggggtgtccccaggggcgtgcatctcggaagtcaggggctccagagagggttccagcatccttcaccacgtggcaggagtctgccacagagaggtgttgattgcctttcctcacatttccaggaactgagtatctaccaagatcaggaacaaaggatcttaaagttcctggaagagcttggggaagggaaggccaccacagcacatgatctgtctgggaaacttgggactccgaagaaagaaatcaatcgagttttatactccctggcaaagaagggcaagctacagaaagaggcaggaacaccccctttgtggaaaatcgcggtctccactcaggcttggaaccagcacagcggagtggtaagaccagacggtcatagccaaggagccccaaactcagacccgagtttggaaccggaagacagaaactccacatctgtctcagaagatcttcttgagccttttattgcagtctcagctcaggcttggaaccagcacagcggagtggtaagaccagacagtcatagccaaggatccccaaactcagacccaggtttggaacctgaagacagcaactccacatctgccttggaagatcctcttgagtttttagacatggccgagatcaaggagaaaatctgcgactatctcttcaatgtgtctgactcctctgccctgaatttggctaaaaatattggccttaccaaggcccgagatataaatgctgtgctaattgacatggaaaggcagggggatgtctatagacaagggacaacccctcccatatggcatttgacagacaagaagcgagagaggatgcaaatcaagagaaatacgaacagtgttcctgaaaccgctccagctgcaatccctgagaccagaagaaacgcagagttcctcacctgtaatatacccacatcaaatgcctcaaataacatggtaaccacagaaaaagtggagaatgggcaggaacctgtcataaagttagaaaacaggcaagaggccagaccagaaccagcaagactgaaaccacctgttcattacaatggcccctcaaaagcagggtatgttgactttgaaaatggccagtgggccacagatgacatcccagatgacttgaatagtatccgcgcagcaccaggtgagtttcgagccatcatggagatgccctccttctacagtcatggcttgccacggtgttcaccctacaagaaactgacagagtgccagctgaagaaccccatcagcgggctgttagaatatgcccagttcgctagtcaaacctgtgagttcaacatgatagagcagagtggaccaccccatgaacctcgatttaaattccaggttgtcatcaatggccgagagtttcccccagctgaagctggaagcaagaaagtggccaagcaggatgcagctatgaaagccatgacaattctgctagaggaagccaaagccaaggacagtggaaaatcagaagaatcatcccactattccacagagaaagaatcagagaagactgcagagtcccagacccccaccccttcagccacatccttcttttctgggaagagccccgtcaccacactgcttgagtgtatgcacaaattggggaactcctgcgaattccgtctcctgtccaaagaaggccctgcccatgaacccaagttccaatactgtgttgcagtgggagcccaaactttccccagtgtgagtgctcccagcaagaaagtggcaaagcagatggccgcagaggaagccatgaaggccctgcatggggaggcgaccaactccatggcttctgataaccagcctgaaggtatgatctcagagtcacttgataacttggaatccatgatgcccaacaaggtcaggaagattggcgagctcgtgagatacctgaacaccaaccctgtgggtggccttttggagtacgcccgctcccatggctttgctgctgaattcaagttggtcgaccagtccggacctcctcacgagcccaagttcgtttaccaagcaaaagttgggggtcgctggttcccagccgtctgcgcacacagcaagaagcaaggcaagcaggaagcagcagatgcggctctccgtgtcttgattggggagaacgagaaggcagaacgcatgggtttcacagaggtaaccccagtgacaggggccagtctcagaagaactatgctcctcctctcaaggtccccagaagcacagccaaagacactccctctcactggcagcaccttccatgaccagatagccatgctgagccaccggtgcttcaacactctgactaacagcttccagccctccttgctcggccgcaagattctggccgccatcattatgaaaaaagactctgaggacatgggtgtcgtcgtcagcttgggaacagggaatcgctgtgtgaaaggagattctctcagcctaaaaggagaaactgtcaatgactgccatgcagaaataatctcccggagaggcttcatcaggtttctctacagtgagttaatgaaatacaactcccagactgcgaaggatagtatatttgaacctgctaagggaggagaaaagctccaaataaaaaagactgtgtcattccatctgtatatcagcactgctccgtgtggagatggcgccctctttgacaagtcctgcagcgaccgtgctatggaaagcacagaatcccgccactaccctgtcttcgagaatcccaaacaaggaaagctccgcaccaaggtggagaacggagaaggcacaatccctgtggaatccagtgacattgtgcctacgtgggatggcattcggctcggggagagactccgtaccatgtcctgtagtgacaaaatcctacgctggaacgtgctgggcctgcaaggggcactgttgacccacttcctgcagcccatttatctcaaatctgtcacattgggttaccttttcagccaagggcatctgacccgtgctatttgctgtcgtgtgacaagagatgggagtgcatttgaggatggactacgacatccctttattgtcaaccaccccaaggttggcagagtcagcatatatgattccaaaaggcaatccgggaagactaaggagacaagcgtcaactggtgtctggctgatggctatgacctggagatcctggacggtaccagaggcactgtggatgggccacggaatgaattgtcccgggtctccaaaaagaacatttttcttctatttaagaagctctgctccttccgttaccgcagggatctactgagactctcctatggtgaggccaagaaagctgcccgtgactacgagacggccaagaactacttcaaaaaaggcctgaaggatatgggctatgggaactggattagcaaaccccaggaggaaaagaacttttatctctgcccagtatagtatgctccagtgacagatggattagggtgtgtcatactagggtgtgagagaggtaggtcgtagcattcctcatcacatggtcaggggatttttttttctcctttttttttctttttaagccataattggtgatactgaaaactttgggttcccatttatcctgctttctttgggattgctaggcaaggtctggccaggccccccttttttcccccaagtgaagaggcagaaacctaagaagttatcttttctttctacccaaagcatacatagtcactgagcacctgcggtccatttcctcttaaaagttttgttttgatttgtttccatttcctttccctttgtgtttgctacactgacctcttgcggtcttgattaggtttcagtcaactctggatcatgtcagggactgataatttcatttgtggattacgcagacccctctacttcccctctttcccttctgagattctttccttgtgatctgaatgtctccttttccccctcagagggcaaagaggtgaacataaaggatttggtgaaacatttgtaagggtaggagttgaaaactgcagttcccagtgccacggaagtgtgattggagcctgcagataatgcccagccatcctcccatcctgcactttagccagctgcagggcgggcaaggcaaggaaagctgcttccctggaagtgtatcactttctccggcagctgggaagtctagaaccagccagactgggttaagggagctgctcaagcaatagcagaggtttcacccggcaggatgacacagaccacttcccagggagcacgggcatgccttggaatattgccaagcttccagctgcctcttctcctaaagcattcctaggaatattttccccgccaatgctgggcgtacaccctagccaacgggacaaatcctagagggtataaaatcatctctgctcagataatcatgacttagcaagaataagggcaaaaaatcctgttggcttaacgtcactgttccacctggtgtaatatctctcaccatagatgttgattcttaactgctacagataacctgtaattgagcagatttaaaattcaggcatacttttccatttatccaagtgctttcatttttccagatggcttcagaagtaggctcgtgggcagggcgcagacctgatctttatagggttgacatagaaagcagtagttgtgggtgaaagggcaggttgtcttcaaactctgtgaggtagaatcctttgtctatacctccatgaacattgactcgtgtgttcagagcctttggcctctctgtggagtctggctctctggctcctgtgcattctttgaatagtcactcgtaaaaactgtcagtgcttgaaactgtttcctttactcatgttgaagggactttgttggcttttagagtgttggtcatgactccaagagcagagcagggaagagcccaagcatagacttggtgccgtggtgatggctgcagtccagttttgtgatgctgcttttacgtgtccctcgataacagtcagctagacacactcaggaggactactgaggctctgcgaccttcaggagctgagcctgcctctctcctttagatgacagaccttcatctgggaacgtgctgagccagcaccctcagatgatttccctccaaactgctgactaggtcatcctctgtctggtagagacattcacatctttgcttttattctatgctctctgtacttttgaccaaaaattgaccaaagtaagaaaatgcaagttctaaaaatagactaaggatgcctttgcagaacaccaaagcatcccaaggaactggtagggaagtggcgcctgtctcctggagtggaagaggcctgctccctggctctgggtctgctgggggcacagtaaatcagtcttggcacccacatccagggcagagaggtctgtggttctcagcatcagaaggcagcgcagcccctctcctcttcaggctacagggttgtcacctgctgagtcctcaggttgtttggcctctctggtccatcttgggcattaggttctccagcagagctctggccagctgcctcttctttaactgggaacacaggctctcacaagatcagaacccccactcacccccaagatcttatctagcaagcctgtagtattcagtttctgttgtaggaagagagcgaggcatccctgaattccacgcatctgctggaaacgagccgtgtcagatcgcacatccctgcgcccccatgcccccatgcccctctgagtcacacaggacagaggaggcagagcttctgcccactgttatcttcactttctttgtccagtcttttgtttttaataagcagtgaccctccctactcttctttttaatgatttttgtagttgatttgtctgaactgtggctactgtgcattccttgaataatcacttgtaaaaattgtcagtgcttgaagctgtttcctttactcacattgaagggacttcgttggttttttggagtcttggttgtgactccaagagcagagtgaggaagacccccaagcatagactcgggtactgtgatgatggctgcagtccagttttatgattctgcttttatgtgtcccttgataacagtgacttaacaatatacattcctcataaataaaaaaaaaacaagaatctgaa

SEQ ID NO: 74199 - DNA, 2816 bp, Homo sapiens
ctctagaggatcctcgcgaaacgtgtaatcccccaggaggaaaagaacttttatctctgcccagtatagtatgctccagtgacagatggattagggtgtgtcatactagggtgtgagagaggtaggtcgtagcattcctcatcacatggtcaggggatttttttttctcctttttttttctttttaagccataattggtgatactgaaaactttgggttcccatttatcctgctttctttgggattgctaggcaaggtctggccaggccccccttttttcccccaagtgaagaggcagaaacctaagaagttatcttttctttctacccaaagcatacatagtcactgagcacctgcggtccatttcctcttaaaagttttgttttgatttgtttccatttcctttccctttgtgtttgctacactgacctcttgcggtcttgattaggtttcagtcaactctggatcatgtcagggactgataatttcatttgtggattacgcagacccctctacttcccctctttcccttctgagattctttccttgtgatctgaatgtctccttttccccctcagagggcaaagaggtgaacataaaggatttggtgaaacatttgtaagggtaggagttgaaaactgcagttcccagtgccacggaagtgtgattggagcctgcagataatgcccagccatcctcccatcctgcactttagccagctgcagggcgggcaaggcaaggaaagctgcttccctggaagtgtatcactttctccggcagctgggaagtctagaaccagccagactgggttaagggagctgctcaagcaatagcagaggtttcacccggcaggatgacacagaccacttcccagggagcacgggcatgccttggaatattgccaagcttccagctgcctcttctcctaaagcattcctaggaatattttccccgccaatgctgggcgtacaccctagccaacgggacaaatcctagagggtataaaatcatctctgctcagataatcatgacttagcaagaataagggcaaaaaatcctgttggcttaacgtcactgttccacctggtgtaatatctctcatgacagtgacaccaagggaagttgactaagtcacatgtaaattaggagtgttttaaagaatgccatagatgttgattcttaactgctacagataacctgtaattgagcagatttaaaattcaggcatacttttccatttatccaagtgctttcatttttccagatggcttcagaagtaggctcgtgggcagggcgcagacctgatctttatagggttgacatagaaagcagtagttgtgggtgaaagggcaggttgtcttcaaactctgtgaggtagaatcctttgtctatacctccatgaacattgactcgtgtgttcagagcctttggcctctctgtggagtctggctctctggctcctgtgcattctttgaatagtcactcgtaaaaactgtcagtgcttgaaactgtttcctttactcatgttgaagggactttgttggcttttagagtgttggtcatgactccaagagcagagcagggaagagcccaagcatagacttggtgccgtggtgatggctgcagtccagttttgtgatgctgcttttacgtgtccctcgataacagtcagctagacacactcaggaggactactgaggctctgcgaccttcaggagctgagcctgcctctctcctttagatgacagaccttcatctgggaacgtgctgagccagcaccctcagatgatttccctccaaactgctgactaggtcatcctctgtctggtagagacattcacatctttgcttttattctatgctctctgtacttttgaccaaaaattgaccaaagtaagaaaatgcaagttctaaaaatagactaaggatgcctttgcagaacaccaaagcatcccaaggaactggtagggaagtggcgcctgtctcctggagtggaagaggcctgctccctggctctgggtctgctgggggcacagtaaatcagtcttggcacccacatccagggcagagaggtctgtggttctcagcatcagaaggcagcgcagcccctctcctcttcaggctacagggttgtcacctgctgagtcctcaggttgtttggcctctctggtccatcttgggcattaggttctccagcagagctctggccagctgcctcttctttaactgggaacacaggctctcacaagatcagaacccccactcacccccaagatcttatctagcaagcctgtagtattcagtttctgttgtaggaagagagcgaggcatccctgaattccacgcatctgctggaaacgagccgtgtcagatcgcacatccctgcgcccccatgcccccatgcccctctgagtcacacaggacagaggaggcagagcttctgcccactgttatcttcactttctttgtccagtcttttgtttttaataagcagtgaccctccctactcttctttttaatgatttttgtagttgatttgtctgaactgtggctactgtgcattccttgaataatcacttgtaaaaattgtcagtgcttgaagctgtttcctttactcacattgaagggacttcgttggttttttggagtcttggttgtgactccaagagcagagtgaggaagacccccaagcatagactcgggtactgtgatgatggctgcagtccagttttatgattctgcttttatgtgtcccttgataacagtgacttaacaatatacattcctcataaataaaaaaaaaacaagaatctgaa

SEQ ID NO: 74200 - DNA, 2309 bp, Homo sapiens
ggacgcgtgggtcgaaccacgcgtccggagattctttccttgtgatctgaatgtctccttttccccctcagagggcaaagaggtgaacataaaggatttggtgaaacatttgtaagggtaggagttgaaaactgcagttcccagtgccacggaagtgtgattggagcctgcagataatgcccagccatcctcccatcctgcactttagccagctgcagggcgggcaaggcaaggaaagctgcttccctggaagtgtatcactttctccggcagctgggaagtctagaaccagccagactgggttaagggagctgctcaagcaatagcagaggtttcacccggcaggatgacacagaccacttcccagggagcacgggcatgccttggaatattgccaagcttccagctgcctcttctcctaaagcattcctaggaatattttccccgccaatgctgggcgtacaccctagccaacgggacaaatcctagagggtataaaatcatctctgctcagataatcatgacttagcaagaataagggcaaaaaatcctgttggcttaacgtcactgttccacctggtgtaatatctctcatgacagtgacaccaagggaagttgactaagtcacatgtaaattaggagtgttttaaagaatgccatagatgttgattcttaactgctacagataacctgtaattgagcagatttaaaattcaggcatacttttccatttatccaagtgctttcatttttccagatggcttcagaagtaggctcgtgggcagggcgcagacctgatctttatagggttgacatagaaagcagtagttgtgggtgaaagggcaggttgtcttcaaactctgtgaggtagaatcctttgtctatacctccatgaacattgactcgtgtgttcagagcctttggcctctctgtggagtctggctctctggctcctgtgcattctttgaatagtcactcgtaaaaactgtcagtgcttgaaactgtttcctttactcatgttgaagggactttgttggcttttagagtgttggtcatgactccaagagcagagcagggaagagcccaagcatagacttggtgccgtggtgatggctgcagtccagttttgtgatgctgcttttacgtgtccctcgataacagtcagctagacacactcaggaggactactgaggctctgcgaccttcaggagctgagcctgcctctctcctttagatgacagaccttcatctgggaacgtgctgagccagcaccctcagatgatttccctccaaactgctgactaggtcatcctctgtctggtagagacattcacatctttgcttttattctatgctctctgtacttttgaccaaaaattgaccaaagtaagaaaatgcaagttctaaaaatagactaaggatgcctttgcagaacaccaaagcatcccaaggaactggtagggaagtggcgcctgtctcctggagtggaagaggcctgctccctggctctgggtctgctgggggcacagtaaatcagtcttggcacccacatccagggcagagaggtctgtggttctcagcatcagaaggcagcgcagcccctctcctcttcaggctacagggttgtcacctgctgagtcctcaggttgtttggcctctctggtccatcttgggcattaggttctccagcagagctctggccagctgcctcttctttaactgggaacacaggctctcacaagatcagaacccccactcacccccaagatcttatctagcaagcctgtagtattcagtttctgttgtaggaagagagcgaggcatccctgaattccacgcatctgctggaaacgagccgtgtcagatcgcacatccctgcgcccccatgcccccatgcccctctgagtcacacaggacagaggaggcagagcttctgcccactgttatcttcactttctttgtccagtcttttgtttttaataagcagtgaccctccctactcttctttttaatgatttttgtagttgatttgtctgaactgtggctactgtgcattccttgaataatcacttgtaaaaattgtcagtgcttgaagctgtttcctttactcacattgaagggacttcgttggttttttggagtcttggttgtgactccaagagcagagtgaggaagacccccaagcatagactcgggtactgtgatgatggctgcagtccagttttatgattctgcttttatgtgtcccttgataacagtgacttaacaatatacattcctcataaataaaaaaaaaacaagaatctgaa

SEQ ID NO: 74201 - DNA, 6526 bp, Homo sapiens
  misc_feature (17)..(17): n is a, c, g, or t
  misc_feature (24)..(24): n is a, c, g, or t
  misc_feature (26)..(27): n is a, c, g, or t
gggggggggagggctcncggccgnannggcagcctccgggtgtccggccgtgtcccgaggaagtgcaagacccggggtattccctcagcggatactacacccatccatttcaaggctatgagcacagacagctcagataccagcagcctgggccaggatcttcccccagtagtttcctgcttaagcaaatagaatttctcaaggggcagctcccagaagcaccggtgattggaaagcagacaccgtcactgccaccttccctcccaggactccggccaaggtttccagtactacttgcctccagtaccagaggcaggcaagtggacatcaggggtgtccccaggggcgtgcatctcggaagtcaggggctccagagagggttccagcatccttcaccacgtggcaggagtctgccacagagaggtgttgattgcctttcctcacatttccaggaactgagtatctaccaagatcaggaacaaaggatcttaaagttcctggaagagcttggggaagggaaggccaccacagcacatgatctgtctgggaaacttgggactccgaagaaagaaatcaatcgagttttatactccctggcaaagaagggcaagctacagaaagaggcaggaacaccccctttgtggaaaatcgcggtctccactcaggcttggaaccagcacagcggagtggtaagaccagacggtcatagccaaggagccccaaactcagacccgagtttggaaccggaagacagaaactccacatctgtctcagaagatcttcttgagccttttattgcagtctcagctcaggcttggaaccagcacagcggagtggtaagaccagacagtcatagccaaggatccccaaactcagacccaggtttggaacctgaagacagcaactccacatctgccttggaagatcctcttgagtttttagacatggccgagatcaaggagaaaatctgcgactatctcttcaatgtgtctgactcctctgccctgaatttggctaaaaatattggccttaccaaggcccgagatataaatgctgtgctaattgacatggaaaggcagggggatgtctatagacaagggacaacccctcccatatggcatttgacagacaagaagcgagagaggatgcaaatcaagagaaatacgaacagtgttcctgaaaccgctccagctgcaatccctgagaccagaagaaacgcagagttcctcacctgtaatatacccacatcaaatgcctcaaataacatggtaaccacagaaaaagtggagaatgggcaggaacctgtcataaagttagaaaacaggcaagaggccagaccagaaccagcaagactgaaaccacctgttcattacaatggcccctcaaaagcagggtatgttgactttgaaaatggccagtgggccacagatgacatcccagatgacttgaatagtatccgcgcagcaccaggtgagtttcgagccatcatggagatgccctccttctacagtcatggcttgccacggtgttcaccctacaagaaactgacagagtgccagctgaagaaccccatcagcgggctgttagaatatgcccagttcgctagtcaaacctgtgagttcaacatgatagagcagagtggaccaccccatgaacctcgatttaaattccaggttgtcatcaatggccgagagtttcccccagctgaagctggaagcaagaaagtggccaagcaggatgcagctatgaaagccatgacaattctgctagaggaagccaaagccaaggacagtggaaaatcagaagaatcatcccactattccacagagaaagaatcagagaagactgcagagtcccagacccccaccccttcagccacatccttcttttctgggaagagccccgtcaccacactgcttgagtgtatgcacaaattggggaactcctgcgaattccgtctcctgtccaaagaaggccctgcccatgaacccaagttccaatactgtgttgcagtgggagcccaaactttccccagtgtgagtgctcccagcaagaaagtggcaaagcagatggccgcagaggaagccatgaaggccctgcatggggaggcgaccaactccatggcttctgataaccagcctgaaggtatgatctcagagtcacttgataacttggaatccatgatgcccaacaaggtcaggaagattggcgagctcgtgagatacctgaacaccaaccctgtgggtggccttttggagtacgcccgctcccatggctttgctgctgaattcaagttggtcgaccagtccggacctcctcacgagcccaagttcgtttaccaagcaaaagttgggggtcgctggttcccagccgtctgcgcacacagcaagaagcaaggcaagcaggaagcagcagatgcggctctccgtgtcttgattggggagaacgagaaggcagaacgcatgggtttcacagaggtaaccccagtgacaggggccagtctcagaagaactatgctcctcctctcaaggtccccagaagcacagccaaagacactccctctcactggcagcaccttccatgaccagatagccatgctgagccaccggtgcttcaacactctgactaacagcttccagccctccttgctcggccgcaagattctggccgccatcattatgaaaaaagactctgaggacatgggtgtcgtcgtcagcttgggaacagggaatcgctgtgtgaaaggagattctctcagcctaaaaggagaaactgtcaatgactgccatgcagaaataatctcccggagaggcttcatcaggtttctctacagtgagttaatgaaatacaactcccagactgcgaaggatagtatatttgaacctgctaagggaggagaaaagctccaaataaaaaagactgtgtcattccatctgtatatcagcactgctccgtgtggagatggcgccctctttgacaagtcctgcagcgaccgtgctatggaaagcacagaatcccgccactaccctgtcttcgagaatcccaaacaaggaaagctccgcaccaaggtggagaacggagaaggcacaatccctgtggaatccagtgacattgtgcctacgtgggatggcattcggctcggggagagactccgtaccatgtcctgtagtgacaaaatcctacgctggaacgtgctgggcctgcaaggggcactgttgacccacttcctgcagcccatttatctcaaatctgtcacattgggttaccttttcagccaagggcatctgacccgtgctatttgctgtcgtgtgacaagagatgggagtgcatttgaggatggactacgacatccctttattgtcaaccaccccaaggttggcagagtcagcatatatgattccaaaaggcaatccgggaagactaaggagacaagcgtcaactggtgtctggctgatggctatgacctggagatcctggacggtaccagaggcactgtggatgggccacggaatgaattgtcccgggtctccaaaaagaacatttttcttctatttaagaagctctgctccttccgttaccgcagggatctactgagactctcctatggtgaggccaagaaagctgcccgtgactacgagacggccaagaactacttcaaaaaaggcctgaaggatatgggctatgggaactggattagcaaaccccaggaggaaaagaacttttatctctgcccagtatagtatgctccagtgacagatggattagggtgtgtcatactagggtgtgagagaggtaggtcgtagcattcctcatcacatggtcaggggatttttttttctcctttttttttctttttaagccataattggtgatactgaaaactttgggttcccatttatcctgctttctttgggattgctaggcaaggtctggccaggccccccttttttcccccaagtgaagaggcagaaacctaagaagttatcttttctttctacccaaagcatacatagtcactgagcacctgcggtccatttcctcttaaaagttttgttttgatttgtttccatttcctttccctttgtgtttgctacactgacctcttgcggtcttgattaggtttcagtcaactctggatcatgtcagggactgataatttcatttgtggattacgcagacccctctacttcccctctttcccttctgagattctttccttgtgatctgaatgtctccttttccccctcagagggcaaagaggtgaacataaaggatttggtgaaacatttgtaagggtaggagttgaaaactgcagttcccagtgccacggaagtgtgattggagcctgcagataatgcccagccatcctcccatcctgcactttagccagctgcagggcgggcaaggcaaggaaagctgcttccctggaagtgtatcactttctccggcagctgggaagtctagaaccagccagactgggttaagggagctgctcaagcaatagcagaggtttcacccggcaggatgacacagaccacttcccagggagcacgggcatgccttggaatattgccaagcttccagctgcctcttctcctaaagcattcctaggaatattttccccgccaatgctgggcgtacaccctagccaacgggacaaatcctagagggtataaaatcatctctgctcagataatcatgacttagcaagaataagggcaaaaaatcctgttggcttaacgtcactgttccacctggtgtaatatctctcatgacagtgacaccaagggaagttgactaagtcacatgtaaattaggagtgttttaaagaatgccatagatgttgattcttaactgctacagataacctgtaattgagcagatttaaaattcaggcatacttttccatttatccaagtgctttcatttttccagatggcttcagaagtaggctcgtgggcagggcgcagacctgatctttatagggttgacatagaaagcagtagttgtgggtgaaagggcaggttgtcttcaaactctgtgaggtagaatcctttgtctatacctccatgaacattgactcgtgtgttcagagcctttggcctctctgtggagtctggctctctggctcctgtgcattctttgaatagtcactcgtaaaaactgtcagtgcttgaaactgtttcctttactcatgttgaagggactttgttggcttttagagtgttggtcatgactccaagagcagagcagggaagagcccaagcatagacttggtgccgtggtgatggctgcagtccagttttgtgatgctgcttttacgtgtccctcgataacagtcagctagacacactcaggaggactactgaggctctgcgaccttcaggagctgagcctgcctctctcctttagatgacagaccttcatctgggaacgtgctgagccagcaccctcagatgatttccctccaaactgctgactaggtcatcctctgtctggtagagacattcacatctttgcttttattctatgctctctgtacttttgaccaaaaattgaccaaagtaagaaaatgcaagttctaaaaatagactaaggatgcctttgcagaacaccaaagcatcccaaggaactggtagggaagtggcgcctgtctcctggagtggaagaggcctgctccctggctctgggtctgctgggggcacagtaaatcagtcttggcacccacatccagggcagagaggtctgtggttctcagcatcagaaggcagcgcagcccctctcctcttcaggctacagggttgtcacctgctgagtcctcaggttgtttggcctctctggtccatcttgggcattaggttctccagcagagctctggccagctgcctcttctttaactgggaacacaggctctcacaagatcagaacccccactcacccccaagatcttatctagcaagcctgtagtattcagtttctgttgtaggaagagagcgaggcatccctgaattccacgcatctgctggaaacgagccgtgtcagatcgcacatccctgcgcccccatgcccccatgcccctctgagtcacacaggacagaggaggcagagcttctgcccactgttatcttcactttctttgtccagtcttttgtttttaataagcagtgaccctccctactcttctttttaatgatttttgtagttgatttgtctgaactgtggctactgtgcattccttgaataatcacttgtaaaaattgtcagtgcttgaagctgtttcctttactcacattgaagggacttcgttggttttttggagtcttggttgtgactccaagagcagagtgaggaagacccccaagcatagactcgggtactgtgatgatggctgcagtccagttttatgattctgcttttatgtgtcccttgataacagtgacttaacaatatacattcctcataaataaaaaaaaaacaagaatctgaacctcgtgccggggtaaacagcgtggctcgttggtggtcg

SEQ ID NO: 74202 - DNA, 6297 bp, Homo sapiens
  misc_feature (17)..(17): n is a, c, g, or t
  misc_feature (24)..(24): n is a, c, g, or t
  misc_feature (26)..(27): n is a, c, g, or t
gggggggggagggctcncggccgnannggcagcctccgggtgtccggccgtgtcccgaggaagtgcaagacccggggtattccctcagcggatactacacccatccatttcaaggctatgagcacagacagctcagataccagcagcctgggccaggatcttcccccagtagtttcctgcttaagcaaatagaatttctcaaggggcagctcccagaagcaccggtgattggaaagcagacaccgtcactgccaccttccctcccaggactccggccaaggtttccagtactacttgcctccagtaccagaggcaggcaagtggacatcaggggtgtccccaggggcgtgcatctcggaagtcaggggctccagagagggttccagcatccttcaccacgtggcaggagtctgccacagagaggtgttgattgcctttcctcacatttccaggaactgagtatctaccaagatcaggaacaaaggatcttaaagttcctggaagagcttggggaagggaaggccaccacagcacatgatctgtctgggaaacttgggactccgaagaaagaaatcaatcgagttttatactccctggcaaagaagggcaagctacagaaagaggcaggaacaccccctttgtggaaaatcgcggtctccactcaggcttggaaccagcacagcggagtggtaagaccagacggtcatagccaaggagccccaaactcagacccgagtttggaaccggaagacagaaactccacatctgtctcagaagatcttcttgagccttttattgcagtctcagctcaggcttggaaccagcacagcggagtggtaagaccagacagtcatagccaaggatccccaaactcagacccaggtttggaacctgaagacagcaactccacatctgccttggaagatcctcttgagtttttagacatggccgagatcaaggagaaaatctgcgactatctcttcaatgtgtctgactcctctgccctgaatttggctaaaaatattggccttaccaaggcccgagatataaatgctgtgctaattgacatggaaaggcagggggatgtctatagacaagggacaacccctcccatatggcatttgacagacaagaagcgagagaggatgcaaatcaagagaaatacgaacagtgttcctgaaaccgctccagctgcaatccctgagaccagaagaaacgcagagttcctcacctgtaatatacccacatcaaatgcctcaaataacatggtaaccacagaaaaagtggagaatgggcaggaacctgtcataaagttagaaaacaggcaagaggccagaccagaaccagcaagactgaaaccacctgttcattacaatggcccctcaaaagcagggtatgttgactttgaaaatggccagtgggccacagatgacatcccagatgacttgaatagtatccgcgcagcaccaggtgagtttcgagccatcatggagatgccctccttctacagtcatggcttgccacggtgttcaccctacaagaaactgacagagtgccagctgaagaaccccatcagcgggctgttagaatatgcccagttcgctagtcaaacctgtgagttcaacatgatagagcagagtggaccaccccatgaacctcgatttaaattccaggttgtcatcaatggccgagagtttcccccagctgaagctggaagcaagaaagtggccaagcaggatgcagctatgaaagccatgacaattctgctagaggaagccaaagccaaggacagtggaaaatcagaagaatcatcccactattccacagagaaagaatcagagaagactgcagagtcccagacccccaccccttcagccacatccttcttttctgggaagagccccgtcaccacactgcttgagtgtatgcacaaattggggaactcctgcgaattccgtctcctgtccaaagaaggccctgcccatgaacccaagttccaatactgtgttgcagtgggagcccaaactttccccagtgtgagtgctcccagcaagaaagtggcaaagcagatggccgcagaggaagccatgaaggccctgcatggggaggcgaccaactccatggcttctgataaccagcctgaaggtatgatctcagagtcacttgataacttggaatccatgatgcccaacaaggtcaggaagattggcgagctcgtgagatacctgaacaccaaccctgtgggtggccttttggagtacgcccgctcccatggctttgctgctgaattcaagttggtcgaccagtccggacctcctcacgagcccaagttcgtttaccaagcaaaagttgggggtcgctggttcccagccgtctgcgcacacagcaagaagcaaggcaagcaggaagcagcagatgcggctctccgtgtcttgattggggagaacgagaaggcagaacgcatgggtttcacagaggtaaccccagtgacaggggccagtctcagaagaactatgctcctcctctcaaggtccccagaagcacagccaaagacactccctctcactggcagcaccttccatgaccagatagccatgctgagccaccggtgcttcaacactctgactaacagcttccagccctccttgctcggccgcaagattctggccgccatcattatgaaaaaagactctgaggacatgggtgtcgtcgtcagcttgggaacagggaatcgctgtgtgaaaggagattctctcagcctaaaaggagaaactgtcaatgactgccatgcagaaataatctcccggagaggcttcatcaggtttctctacagtgagttaatgaaatacaactcccagactgcgaaggatagtatatttgaacctgctaagggaggagaaaagctccaaataaaaaagactgtgtcattccatctgtatatcagcactgctccgtgtggagatggcgccctctttgacaagtcctgcagcgaccgtgctatggaaagcacagaatcccgccactaccctgtcttcgagaatcccaaacaaggaaagctccgcaccaaggtggagaacggagaaggcacaatccctgtggaatccagtgacattgtgcctacgtgggatggcattcggctcggggagagactccgtaccatgtcctgtagtgacaaaatcctacgctggaacgtgctgggcctgcaaggggcactgttgacccacttcctgcagcccatttatctcaaatctgtcacattgggttaccttttcagccaagggcatctgacccgtgctatttgctgtcgtgtgacaagagatgggagtgcatttgaggatggactacgacatccctttattgtcaaccaccccaaggttggcagagtcagcatatatgattccaaaaggcaatccgggaagactaaggagacaagcgtcaactggtgtctggctgatggctatgacctggagatcctggacggtaccagaggcactgtggatgggccacggaatgaattgtcccgggtctccaaaaagaacatttttcttctatttaagaagctctgctccttccgttaccgcagggatctactgagactctcctatggtgaggccaagaaagctgcccgtgactacgagacggccaagaactacttcaaaaaaggcctgaaggatatgggctatgggaactggattagcaaaccccaggaggaaaagaacttttatctctgcccagtatagtatgctccagtgacagatggattagggtgtgtcatactagggtgtgagagaggtaggtcgtagcattcctcatcacatggtcaggggatttttttttctcctttttttttctttttaagccataattggtgatactgaaaactttgggttcccatttatcctgctttctttgggattgctaggcaaggtctggccaggccccccttttttcccccaagtgaagaggcagaaacctaagaagttatcttttctttctacccaaagcatacatagtcactgagcacctgcggtccatttcctcttaaaagttttgttttgatttgtttccatttcctttccctttgtgtttgctacactgacctcttgcggtcttgattaggtttcagtcaactctggatcatgtcagggactgataatttcatttgtggattacgcagacccctctacttcccctctttcccttctgagattctttccttgtgatctgaatgtctccttttccccctcagagggcaaagaggtgaacataaaggatttggtgaaacatttgtaagggtaggagttgaaaactgcagttcccagtgccacggaagtgtgattggagcctgcagataatgcccagccatcctcccatcctgcactttagccagctgcagggcgggcaaggcaaggaaagctgcttccctggaagtgtatcactttctccggcagctgggaagtctagaaccagccagactgggttaagggagctgctcaagcaatagcagaggtttcacccggcaggatgacacagaccacttcccagggagcacgggcatgccttggaatattgccaagcttccagctgcctcttctcctaaagcattcctaggaatattttccccgccaatgctgggcgtacaccctagccaacgggacaaatcctagagggtataaaatcatctctgctcagataatcatgacttagcaagaataagggcaaaaaatcctgttggcttaacgtcactgttccacctggtgtaatatctctcatgacagtgacaccaagggaagttgactaagtcacatgtaaattaggagtgttttaaagaatggttgtcttcaaactctgtgaggtagaatcctttgtctatacctccatgaacattgactcgtgtgttcagagcctttggcctctctgtggagtctggctctctggctcctgtgcattctttgaatagtcactcgtaaaaactgtcagtgcttgaaactgtttcctttactcatgttgaagggactttgttggcttttagagtgttggtcatgactccaagagcagagcagggaagagcccaagcatagacttggtgccgtggtgatggctgcagtccagttttgtgatgctgcttttacgtgtccctcgataacagtcagctagacacactcaggaggactactgaggctctgcgaccttcaggagctgagcctgcctctctcctttagatgacagaccttcatctgggaacgtgctgagccagcaccctcagatgatttccctccaaactgctgactaggtcatcctctgtctggtagagacattcacatctttgcttttattctatgctctctgtacttttgaccaaaaattgaccaaagtaagaaaatgcaagttctaaaaatagactaaggatgcctttgcagaacaccaaagcatcccaaggaactggtagggaagtggcgcctgtctcctggagtggaagaggcctgctccctggctctgggtctgctgggggcacagtaaatcagtcttggcacccacatccagggcagagaggtctgtggttctcagcatcagaaggcagcgcagcccctctcctcttcaggctacagggttgtcacctgctgagtcctcaggttgtttggcctctctggtccatcttgggcattaggttctccagcagagctctggccagctgcctcttctttaactgggaacacaggctctcacaagatcagaacccccactcacccccaagatcttatctagcaagcctgtagtattcagtttctgttgtaggaagagagcgaggcatccctgaattccacgcatctgctggaaacgagccgtgtcagatcgcacatccctgcgcccccatgcccccatgcccctctgagtcacacaggacagaggaggcagagcttctgcccactgttatcttcactttctttgtccagtcttttgtttttaataagcagtgaccctccctactcttctttttaatgatttttgtagttgatttgtctgaactgtggctactgtgcattccttgaataatcacttgtaaaaattgtcagtgcttgaagctgtttcctttactcacattgaagggacttcgttggttttttggagtcttggttgtgactccaagagcagagtgaggaagacccccaagcatagactcgggtactgtgatgatggctgcagtccagttttatgattctgcttttatgtgtcccttgataacagtgacttaacaatatacattcctcataaataaaaaaaaaacaagaatctgaa

SEQ ID NO: 74203 - DNA, 6464 bp, Homo sapiens
  misc_feature (17)..(17): n is a, c, g, or t
  misc_feature (24)..(24): n is a, c, g, or t
  misc_feature (26)..(27): n is a, c, g, or t
gggggggggagggctcncggccgnannggcagcctccgggtgtccggccgtgtcccgaggaagtgcaagacccggggtattccctcagcggatactacacccatccatttcaaggctatgagcacagacagctcagataccagcagcctgggccaggatcttcccccagtagtttcctgcttaagcaaatagaatttctcaaggggcagctcccagaagcaccggtgattggaaagcagacaccgtcactgccaccttccctcccaggactccggccaaggtttccagtactacttgcctccagtaccagaggcaggcaagtggacatcaggggtgtccccaggggcgtgcatctcggaagtcaggggctccagagagggttccagcatccttcaccacgtggcaggagtctgccacagagaggtgttgattgcctttcctcacatttccaggaactgagtatctaccaagatcaggaacaaaggatcttaaagttcctggaagagcttggggaagggaaggccaccacagcacatgatctgtctgggaaacttgggactccgaagaaagaaatcaatcgagttttatactccctggcaaagaagggcaagctacagaaagaggcaggaacaccccctttgtggaaaatcgcggtctccactcaggcttggaaccagcacagcggagtggtaagaccagacggtcatagccaaggagccccaaactcagacccgagtttggaaccggaagacagaaactccacatctgtctcagaagatcttcttgagccttttattgcagtctcagctcaggcttggaaccagcacagcggagtggtaagaccagacagtcatagccaaggatccccaaactcagacccaggtttggaacctgaagacagcaactccacatctgccttggaagatcctcttgagtttttagacatggccgagatcaaggagaaaatctgcgactatctcttcaatgtgtctgactcctctgccctgaatttggctaaaaatattggccttaccaaggcccgagatataaatgctgtgctaattgacatggaaaggcagggggatgtctatagacaagggacaacccctcccatatggcatttgacagacaagaagcgagagaggatgcaaatcaagagaaatacgaacagtgttcctgaaaccgctccagctgcaatccctgagaccagaagaaacgcagagttcctcacctgtaatatacccacatcaaatgcctcaaataacatggtaaccacagaaaaagtggagaatgggcaggaacctgtcataaagttagaaaacaggcaagaggccagaccagaaccagcaagactgaaaccacctgttcattacaatggcccctcaaaagcagggtatgttgactttgaaaatggccagtgggccacagatgacatcccagatgacttgaatagtatccgcgcagcaccaggtgagtttcgagccatcatggagatgccctccttctacagtcatggcttgccacggtgttcaccctacaagaaactgacagagtgccagctgaagaaccccatcagcgggctgttagaatatgcccagttcgctagtcaaacctgtgagttcaacatgatagagcagagtggaccaccccatgaacctcgatttaaattccaggttgtcatcaatggccgagagtttcccccagctgaagctggaagcaagaaagtggccaagcaggatgcagctatgaaagccatgacaattctgctagaggaagccaaagccaaggacagtggaaaatcagaagaatcatcccactattccacagagaaagaatcagagaagactgcagagtcccagacccccaccccttcagccacatccttcttttctgggaagagccccgtcaccacactgcttgagtgtatgcacaaattggggaactcctgcgaattccgtctcctgtccaaagaaggccctgcccatgaacccaagttccaatactgtgttgcagtgggagcccaaactttccccagtgtgagtgctcccagcaagaaagtggcaaagcagatggccgcagaggaagccatgaaggccctgcatggggaggcgaccaactccatggcttctgataaccagcctgaaggtatgatctcagagtcacttgataacttggaatccatgatgcccaacaaggtcaggaagattggcgagctcgtgagatacctgaacaccaaccctgtgggtggccttttggagtacgcccgctcccatggctttgctgctgaattcaagttggtcgaccagtccggacctcctcacgagcccaagttcgtttaccaagcaaaagttgggggtcgctggttcccagccgtctgcgcacacagcaagaagcaaggcaagcaggaagcagcagatgcggctctccgtgtcttgattggggagaacgagaaggcagaacgcatgggtttcacagaggtaaccccagtgacaggggccagtctcagaagaactatgctcctcctctcaaggtccccagaagcacagccaaagacactccctctcactggcagcaccttccatgaccagatagccatgctgagccaccggtgcttcaacactctgactaacagcttccagccctccttgctcggccgcaagattctggccgccatcattatgaaaaaagactctgaggacatgggtgtcgtcgtcagcttgggaacagggaatcgctgtgtgaaaggagattctctcagcctaaaaggagaaactgtcaatgactgccatgcagaaataatctcccggagaggcttcatcaggtttctctacagtgagttaatgaaatacaactcccagactgcgaaggatagtatatttgaacctgctaagggaggagaaaagctccaaataaaaaagactgtgtcattccatctgtatatcagcactgctccgtgtggagatggcgccctctttgacaagtcctgcagcgaccgtgctatggaaagcacagaatcccgccactaccctgtcttcgagaatcccaaacaaggaaagctccgcaccaaggtggagaacggagaaggcacaatccctgtggaatccagtgacattgtgcctacgtgggatggcattcggctcggggagagactccgtaccatgtcctgtagtgacaaaatcctacgctggaacgtgctgggcctgcaaggggcactgttgacccacttcctgcagcccatttatctcaaatctgtcacattgggttaccttttcagccaagggcatctgacccgtgctatttgctgtcgtgtgacaagagatgggagtgcatttgaggatggactacgacatccctttattgtcaaccaccccaaggttggcagagtcagcatatatgattccaaaaggcaatccgggaagactaaggagacaagcgtcaactggtgtctggctgatggctatgacctggagatcctggacggtaccagaggcactgtggatgggccacggaatgaattgtcccgggtctccaaaaagaacatttttcttctatttaagaagctctgctccttccgttaccgcagggatctactgagactctcctatggtgaggccaagaaagctgcccgtgactacgagacggccaagaactacttcaaaaaaggcctgaaggatatgggctatgggaactggattagcaaaccccaggaggaaaagaacttttatctctgcccagtatagtatgctccagtgacagatggattagggtgtgtcatactagggtgtgagagaggtaggtcgtagcattcctcatcacatggtcaggggatttttttttctcctttttttttctttttaagccataattggtgatactgaaaactttgggttcccatttatcctgctttctttgggattgctaggcaaggtctggccaggccccccttttttcccccaagtgaagaggcagaaacctaagaagttatcttttctttctacccaaagcatacatagtcactgagcacctgcggtccatttcctcttaaaagttttgttttgatttgtttccatttcctttccctttgtgtttgctacactgacctcttgcggtcttgattaggtttcagtcaactctggatcatgtcagggactgataatttcatttgtggattacgcagacccctctacttcccctctttcccttctgagattctttccttgtgatctgaatgtctccttttccccctcagagggcaaagaggtgaacataaaggatttggtgaaacatttgtaagggtaggagttgaaaactgcagttcccagtgccacggaagtgtgattggagcctgcagataatgcccagccatcctcccatcctgcactttagccagctgcagggcgggcaaggcaaggaaagctgcttccctggaagtgtatcactttctccggcagctgggaagtctagaaccagccagactgggttaagggagctgctcaagcaatagcagaggtttcacccggcaggatgacacagaccacttcccagggagcacgggcatgccttggaatattgccaagcttccagctgcctcttctcctaaagcattcctaggaatattttccccgccaatgctgggcgtacaccctagccaacgggacaaatcctagagggtataaaatcatctctgctcagataatcatgacttagcaagaataagggcaaaaaatcctgttggcttaacgtcactgttccacctggtgtaatatctctcatgacagtgacaccaagggaagttgactaagtcacatgtaaattaggagtgttttaaagaatgccatagatgttgattcttaactgctacagataacctgtaattgagcagatttaaaattcaggcatacttttccatttatccaagtgctttcatttttccagatggcttcagaagtaggctcgtgggcagggcgcagacctgatctttatagggttgacatagaaagcagtagttgtgggtgaaagggcaggttgtcttcaaactctgtgaggtagaatcctttgtctatacctccatgaacattgactcgtgtgttcagagcctttggcctctctgtggagtctggctctctggctcctgtgcattctttgaatagtcactcgtaaaaactgtcagtgcttgaaactgtttcctttactcatgttgaagggactttgttggcttttagagtgttggtcatgactccaagagcagagcagggaagagcccaagcatagacttggtgccgtggtgatggctgcagtccagttttgtgatgctgcttttacgtgtccctcgataacagtcagctagacacactcaggaggactactgaggctctgcgaccttcaggagctgagcctgcctctctcctttagatgacagaccttcatctgggaacgtgctgagccagcaccctcagatgatttccctccaaactgctgactaggtcatcctctgtctggtagagacattcacatctttgcttttattctatgctctctgtacttttgaccaaaaattgaccaaagtaagaaaatgcaagttctaaaaatagactaaggatgcctttgcagaacaccaaagcatcccaaggaactggtagggaagtggcgcctgtctcctggagtggaagaggcctgctccctggctctgggtctgctgggggcacagtaaatcagtcttggcacccacatccagggcagagaggtctgtggttctcagcatcagaaggcagcgcagcccctctcctcttcaggctacagggttgtcacctgctgagtcctcaggttgtttggcctctctggtccatcttgggcattaggttctccagcagagctctggccagctgcctcttctttaactgggaacacaggctctcacaagatcagaacccccactcacccccaagatcttatctagcaagcctgtagtattcagtttctgttgtaggaagagagcgaggcatccctgaattccacgcatctgctggaaacgagccgtgtcagatcgcacatccctgcgcccccatgcccccatgcccctctgagtcacacaggacagaggaggcagagcttctgcccactgttatcttcactttctttgtccagtcttttgtttttaataagcagtgaccctccctactcttctttttaatgatttttgtagttgatttgtctgaactgtggctactgtgcattccttgaataatcacttttttggagtcttggttgtgactccaagagcagagtgaggaagacccccaagcatagactcgggtactgtgatgatggctgcagtccagttttatgattctgcttttatgtgtcccttgataacagtgacttaacaatatacattcctcataaataaaaaaaaaacaagaatctgaaaaaaaaaacaagaatctgaattcttaaaaaaaaaaaag

SEQ ID NO: 74204 - DNA, 1629 bp, Homo sapiens
caaagggaagaagggacccccgcgggcgttttaaaatggacgattttccatttatccaagtgctttcatttttccagatggcttcagaagtaggctcgtgggcagggcgcagacctgatctttatagggttgacatagaaagcagtagttgtgggtgaaagggcaggttgtcttcaaactctgtgaggtagaatcctttgtctatacctccatgaacattgactcgtgtgttcagagcctttggcctctctgtggagtctggctctctggctcctgtgcattctttgaatagtcactcgtaaaaactgtcagtgcttgaaactgtttcctttactcatgttgaagggactttgttggcttttagagtgttggtcatgactccaagagcagagcagggaagagcccaagcatagacttggtgccgtggtgatggctgcagtccagttttgtgatgctgcttttacgtgtccctcgataacagtcagctagacacactcaggaggactactgaggctctgcgaccttcaggagctgagcctgcctctctcctttagatgacagaccttcatctgggaacgtgctgagccagcaccctcagatgatttccctccaaactgctgactaggtcatcctctgtctggtagagacattcacatctttgcttttattctatgctctctgtacttttgaccaaaaattgaccaaagtaagaaaatgcaagttctaaaaatagactaaggatgcctttgcagaacaccaaagcatcccaaggaactggtagggaagtggcgcctgtctcctggagtggaagaggcctgctccctggctctgggtctgctgggggcacagtaaatcagtcttggcacccacatccagggcagagaggtctgtggttctcagcatcagaaggcagcgcagcccctctcctcttcaggctacagggttgtcacctgctgagtcctcaggttgtttggcctctctggtccatcttgggcattaggttctccagcagagctctggccagctgcctcttctttaactgggaacacaggctctcacaagatcagaacccccactcacccccaagatcttatctagcaagcctgtagtattcagtttctgttgtaggaagagagcgaggcatccctgaattccacgcatctgctggaaacgagccgtgtcagatcgcacatccctgcgcccccatgcccccatgcccctctgagtcacacaggacagaggaggcagagcttctgcccactgttatcttcactttctttgtccagtcttttgtttttaataagcagtgaccctccctactcttctttttaatgatttttgtagttgatttgtctgaactgtggctactgtgcattccttgaataatcacttgtaaaaattgtcagtgcttgaagctgtttcctttactcacattgaagggacttcgttggttttttggagtcttggttgtgactccaagagcagagtgaggaagacccccaagcatagactcgggtactgtgatgatggctgcagtccagttttatgattctgcttttatgtgtcccttgataacagtgacttaacaatatacattcctcataaataaaaaaaaaacaagaatctgaa

SEQ ID NO: 74205 - DNA, 5975 bp, Homo sapiens
  misc_feature (17)..(17): n is a, c, g, or t
  misc_feature (24)..(24): n is a, c, g, or t
  misc_feature (26)..(27): n is a, c, g, or t
gggggggggagggctcncggccgnannggcagcctccgggtgtccggccgtgtcccgaggaagtgcaagacccggggtattccctcagcggatactacacccatccatttcaaggctatgagcacagacagctcagataccagcagcctgggccaggatcttcccccagtagtttcctgcttaagcaaatagaatttctcaaggggcagctcccagaagcaccggtgattggaaagcagacaccgtcactgccaccttccctcccaggactccggccaaggtttccagtactacttgcctccagtaccagaggcaggcaagtggacatcaggggtgtccccaggggcgtgcatctcggaagtcaggggctccagagagggttccagcatccttcaccacgtggcaggagtctgccacagagaggtgttgattgcctttcctcacatttccaggaactgagtatctaccaagatcaggaacaaaggatcttaaagttcctggaagagcttggggaagggaaggccaccacagcacatgatctgtctgggaaacttgggactccgaagaaagaaatcaatcgagttttatactccctggcaaagaagggcaagctacagaaagaggcaggaacaccccctttgtggaaaatcgcggtctccactcaggcttggaaccagcacagcggagtggtaagaccagacggtcatagccaaggagccccaaactcagacccgagtttggaaccggaagacagaaactccacatctgtctcagaagatcttcttgagccttttattgcagtctcagctcaggcttggaaccagcacagcggagtggtaagaccagacagtcatagccaaggatccccaaactcagacccaggtttggaacctgaagacagcaactccacatctgccttggaagatcctcttgagtttttagacatggccgagatcaaggagaaaatctgcgactatctcttcaatgtgtctgactcctctgccctgaatttggctaaaaatattggccttaccaaggcccgagatataaatgctgtgctaattgacatggaaaggcagggggatgtctatagacaagggacaacccctcccatatggcatttgacagacaagaagcgagagaggatgcaaatcaagagaaatacgaacagtgttcctgaaaccgctccagctgcaatccctgagaccagaagaaacgcagagttcctcacctgtaatatacccacatcaaatgcctcaaataacatggtaaccacagaaaaagtggagaatgggcaggaacctgtcataaagttagaaaacaggcaagaggccagaccagaaccagcaagactgaaaccacctgttcattacaatggcccctcaaaagcagggtatgttgactttgaaaatggccagtgggccacagatgacatcccagatgacttgaatagtatccgcgcagcaccaggtgagtttcgagccatcatggagatgccctccttctacagtcatggcttgccacggtgttcaccctacaagaaactgacagagtgccagctgaagaaccccatcagcgggctgttagaatatgcccagttcgctagtcaaacctgtgagttcaacatgatagagcagagtggaccaccccatgaacctcgatttaaattccaggttgtcatcaatggccgagagtttcccccagctgaagctggaagcaagaaagtggccaagcaggatgcagctatgaaagccatgacaattctgctagaggaagccaaagccaaggacagtggaaaatcagaagaatcatcccactattccacagagaaagaatcagagaagactgcagagtcccagacccccaccccttcagccacatccttcttttctgggaagagccccgtcaccacactgcttgagtgtatgcacaaattggggaactcctgcgaattccgtctcctgtccaaagaaggccctgcccatgaacccaagttccaatactgtgttgcagtgggagcccaaactttccccagtgtgagtgctcccagcaagaaagtggcaaagcagatggccgcagaggaagccatgaaggccctgcatggggaggcgaccaactccatggcttctgataaccagcctgaaggtatgatctcagagtcacttgataacttggaatccatgatgcccaacaaggtcaggaagattggcgagctcgtgagatacctgaacaccaaccctgtgggtggccttttggagtacgcccgctcccatggctttgctgctgaattcaagttggtcgaccagtccggacctcctcacgagcccaagttcgtttaccaagcaaaagttgggggtcgctggttcccagccgtctgcgcacacagcaagaagcaaggcaagcaggaagcagcagatgcggctctccgtgtcttgattggggagaacgagaaggcagaacgcatgggtttcacagaggtaaccccagtgacaggggccagtctcagaagaactatgctcctcctctcaaggtccccagaagcacagccaaagacactccctctcactggcagcaccttccatgaccagatagccatgctgagccaccggtgcttcaacactctgactaacagcttccagccctccttgctcggccgcaagattctggccgccatcattatgaaaaaagactctgaggacatgggtgtcgtcgtcagcttgggaacagggaatcgctgtgtgaaaggagattctctcagcctaaaaggagaaactgtcaatgactgccatgcagaaataatctcccggagaggcttcatcaggtttctctacagtgagttaatgaaatacaactcccagactgcgaaggatagtatatttgaacctgctaagggaggagaaaagctccaaataaaaaagactgtgtcattccatctgtatatcagcactgctccgtgtggagatggcgccctctttgacaagtcctgcagcgaccgtgctatggaaagcacagaatcccgccactaccctgtcttcgagaatcccaaacaaggaaagctccgcaccaaggtggagaacggagaaggcacaatccctgtggaatccagtgacattgtgcctacgtgggatggcattcggctcggggagagactccgtaccatgtcctgtagtgacaaaatcctacgctggaacgtgctgggcctgcaaggggcactgttgacccacttcctgcagcccatttatctcaaatctgtcacattgggttaccttttcagccaagggcatctgacccgtgctatttgctgtcgtgtgacaagagatgggagtgcatttgaggatggactacgacatccctttattgtcaaccaccccaaggttggcagagtcagcatatatgattccaaaaggcaatccgggaagactaaggagacaagcgtcaactggtgtctggctgatggctatgacctggagatcctggacggtaccagaggcactgtggatgggccacggaatgaattgtcccgggtctccaaaaagaacatttttcttctatttaagaagctctgctccttccgttaccgcagggatctactgagactctcctatggtgaggccaagaaagctgcccgtgactacgagacggccaagaactacttcaaaaaaggcctgaaggatatgggctatgggaactggattagcaaaccccaggaggaaaagaacttttatctctgcccagtatagtatgctccagtgacagatggattagggtgtgtcatactagggtgtgagagaggtaggtcgtagcattcctcatcacatggtcaggggatttttttttctcctttttttttctttttaagccataattggtgatactgaaaactttgggttcccatttatcctgctttctttgggattgctaggcaaggtctggccaggccccccttttttcccccaagtgaagaggcagaaacctaagaagttatcttttctttctacccaaagcatacatagtcactgagcacctgcggtccatttcctcttaaaagttttgttttgatttgtttccatttcctttccctttgtgtttgctacactgacctcttgcggtcttgattaggtttcagtcaactctggatcatgtcagggactgataatttcatttgtggattacgcagacccctctacttcccctctttcccttctgagattctttccttgtgatctgaatgtctccttttccccctcagagggcaaagaggtgaacataaaggatttggtgaaacatttgtaagggtaggagttgaaaactgcagttcccagtgccacggaagtgtgattggagcctgcagataatgcccagccatcctcccatcctgcactttagccagctgcagggcgggcaaggcaaggaaagctgcttccctggaagtgtatcactttctccggcagctgggaagtctagaaccagccagactgggttaagggagctgctcaagcaatagcagaggtttcacccggcaggatgacacagaccacttcccagggagcacgggcatgccttggaatattgccaagcttccagctgcctcttctcctaaagcattcctaggaatattttccccgccaatgctgggcgtacaccctagccaacgggacaaatcctagagggtataaaatcatctctgctcagataatcatgacttagcaagaataagggcaaaaaatcctgttggcttaacgtcactgttccacctggtgtaatatctctcatgacagtgacaccaagggaagttgactaagtcacatgtaaattaggagtgttttaaagaatgccatagatgttgattcttaactgctacagataacctgtaattgagcagatttaaaattcaggcatacttttccatttatccaagtgctttcatttttccagatggcttcagaagtaggctcgtgggcagggcgcagacctgatctttatagggttgacatagaaagcagtagttgtgggtgaaagggcaggttgtcttcaaactctgtgaggtagaatcctttgtctatacctccatgaacattgactcgtgtgttcagagcctttggcctctctgtggagtctggctctctggctcctgtgcattctttgaatagtcactcgtaaaaactgtcagtgcttgaaactgtttcctttactcatgttgaagggactttgttggcttttagagtgttggtcatgactccaagagcagagcagggaagagcccaagcatagacttggtgccgtggtgatggctgcagtccagttttgtgatgctgcttttacgtgtccctcgataacagtcagctagacacactcaggaggactactgaggctctgcgaccttcaggagctgagcctgcctctctcctttagatgacagaccttcatctgggaacgtgctgagccagcaccctcagatgatttccctccaaactgctgactaggtcatcctctgtctggtagagacattcacatctttgcttttattctatgctctctgtacttttgaccaaaaattgaccaaagtaagaaaatgcaagttctaaaaatagactaaggatgcctttgcagaacaccaaagcatcccaaggaactggtagggaagtggcgcctgtctcctggagtggaagaggcctgctccctggctctgggtctgctgggggcacagtaaatcagtcttggcacccacatccagggcagagaggtctgtggttctcagcatcagaaggcagcgcagcccctctcctcttcaggctacagggttgtcacctgctgagtcctcaggttgtttggcctctctggtccatcttgggcattaggttctccagcagagctctggccagctgcctcttctttaactgggaacacaggctctcacaagatcagaacccccactcacccccaagcataactcggacgtctgcgtgccgaccgca

SEQ ID NO: 74206 - DNA, 1544 bp, Homo sapiens
gctggacggtaccagaggcactgtggatgggccacggaatgaattgtcccgggtctccaaaaagaacatttttcttctgcccactgttatcttcactttctttgtccagtcttttgttttaataagcagtgaccctcctactcttctttttaatgattttgtagttgatttgtctggctctctggctcctgtgcattctttgaatagtcactcgtaaaaactgtcagtgcttgaaactgtttcctttactcatgttgaagggactttgttggcttttagagtgttggtcatgactccaagagcagagcagggaagagcccaagcatagacttggtgccgtggtgatggctgcagtccagttttgtgatgctgcttttacgtgtccctcgataacagtcagctagacacactcaggaggactactgaggctctgcgaccttcaggagctgagcctgcctctctcctttagatgacagaccttcatctgggaacgtgctgagccagcaccctcagatgatttccctccaaactgctgactaggtcatcctctgtctggtagagacattcacatctttgcttttattctatgctctctgtacttttgaccaaaaattgaccaaagtaagaaaatgcaagttctaaaaatagactaaggatgcctttgcagaacaccaaagcatcccaaggaactggtagggaagtggcgcctgtctcctggagtggaagaggcctgctccctggctctgggtctgctgggggcacagtaaatcagtcttggcacccacatccagggcagagaggtctgtggttctcagcatcagaaggcagcgcagcccctctcctcttcaggctacagggttgtcacctgctgagtcctcaggttgtttggcctctctggtccatcttgggcattaggttctccagcagagctctggccagctgcctcttctttaactgggaacacaggctctcacaagatcagaacccccactcacccccaagatcttatctagcaagcctgtagtattcagtttctgttgtaggaagagagcgaggcatccctgaattccacgcatctgctggaaacgagccgtgtcagatcgcacatccctgcgcccccatgcccccatgcccctctgagtcacacaggacagaggaggcagagcttctgcccactgttatcttcactttctttgtccagtcttttgtttttaataagcagtgaccctccctactcttctttttaatgatttttgtagttgatttgtctgaactgtggctactgtgcattccttgaataatcacttgtaaaaattgtcagtgcttgaagctgtttcctttactcacattgaagggacttcgttggttttttggagtcttggttgtgactccaagagcagagtgaggaagacccccaagcatagactcgggtactgtgatgatggctgcagtccagttttatgattctgcttttatgtgtcccttgataacagtgacttaacaatatacattcctcataaataaaaaaaaaacaagaatctgaa

SEQ ID NO: 74207 - DNA, 5401 bp, Homo sapiens
  misc_feature (17)..(17): n is a, c, g, or t
  misc_feature (24)..(24): n is a, c, g, or t
  misc_feature (26)..(27): n is a, c, g, or t
gggggggggagggctcncggccgnannggcagcctccgggtgtccggccgtgtcccgaggaagtgcaagacccggggtattccctcagcggatactacacccatccatttcaaggctatgagcacagacagctcagataccagcagcctgggccaggatcttcccccagtagtttcctgcttaagcaaatagaatttctcaaggggcagctcccagaagcaccggtgattggaaagcagacaccgtcactgccaccttccctcccaggactccggccaaggtttccagtactacttgcctccagtaccagaggcaggcaagtggacatcaggggtgtccccaggggcgtgcatctcggaagtcaggggctccagagagggttccagcatccttcaccacgtggcaggagtctgccacagagaggtgttgattgcctttcctcacatttccaggaactgagtatctaccaagatcaggaacaaaggatcttaaagttcctggaagagcttggggaagggaaggccaccacagcacatgatctgtctgggaaacttgggactccgaagaaagaaatcaatcgagttttatactccctggcaaagaagggcaagctacagaaagaggcaggaacaccccctttgtggaaaatcgcggtctccactcaggcttggaaccagcacagcggagtggtaagaccagacggtcatagccaaggagccccaaactcagacccgagtttggaaccggaagacagaaactccacatctgtctcagaagatcttcttgagccttttattgcagtctcagctcaggcttggaaccagcacagcggagtggtaagaccagacagtcatagccaaggatccccaaactcagacccaggtttggaacctgaagacagcaactccacatctgccttggaagatcctcttgagtttttagacatggccgagatcaaggagaaaatctgcgactatctcttcaatgtgtctgactcctctgccctgaatttggctaaaaatattggccttaccaaggcccgagatataaatgctgtgctaattgacatggaaaggcagggggatgtctatagacaagggacaacccctcccatatggcatttgacagacaagaagcgagagaggatgcaaatcaagagaaatacgaacagtgttcctgaaaccgctccagctgcaatccctgagaccagaagaaacgcagagttcctcacctgtaatatacccacatcaaatgcctcaaataacatggtaaccacagaaaaagtggagaatgggcaggaacctgtcataaagttagaaaacaggcaagaggccagaccagaaccagcaagactgaaaccacctgttcattacaatggcccctcaaaagcagggtatgttgactttgaaaatggccagtgggccacagatgacatcccagatgacttgaatagtatccgcgcagcaccaggtgagtttcgagccatcatggagatgccctccttctacagtcatggcttgccacggtgttcaccctacaagaaactgacagagtgccagctgaagaaccccatcagcgggctgttagaatatgcccagttcgctagtcaaacctgtgagttcaacatgatagagcagagtggaccaccccatgaacctcgatttaaattccaggttgtcatcaatggccgagagtttcccccagctgaagctggaagcaagaaagtggccaagcaggatgcagctatgaaagccatgacaattctgctagaggaagccaaagccaaggacagtggaaaatcagaagaatcatcccactattccacagagaaagaatcagagaagactgcagagtcccagacccccaccccttcagccacatccttcttttctgggaagagccccgtcaccacactgcttgagtgtatgcacaaattggggaactcctgcgaattccgtctcctgtccaaagaaggccctgcccatgaacccaagttccaatactgtgttgcagtgggagcccaaactttccccagtgtgagtgctcccagcaagaaagtggcaaagcagatggccgcagaggaagccatgaaggccctgcatggggaggcgaccaactccatggcttctgataaccagcctgaaggtatgatctcagagtcacttgataacttggaatccatgatgcccaacaaggtcaggaagattggcgagctcgtgagatacctgaacaccaaccctgtgggtggccttttggagtacgcccgctcccatggctttgctgctgaattcaagttggtcgaccagtccggacctcctcacgagcccaagttcgtttaccaagcaaaagttgggggtcgctggttcccagccgtctgcgcacacagcaagaagcaaggcaagcaggaagcagcagatgcggctctccgtgtcttgattggggagaacgagaaggcagaacgcatgggtttcacagaggtaaccccagtgacaggggccagtctcagaagaactatgctcctcctctcaaggtccccagaagcacagccaaagacactccctctcactggcagcaccttccatgaccagatagccatgctgagccaccggtgcttcaacactctgactaacagcttccagccctccttgctcggccgcaagattctggccgccatcattatgaaaaaagactctgaggacatgggtgtcgtcgtcagcttgggaacagggaatcgctgtgtgaaaggagattctctcagcctaaaaggagaaactgtcaatgactgccatgcagaaataatctcccggagaggcttcatcaggtttctctacagtgagttaatgaaatacaactcccagactgcgaaggatagtatatttgaacctgctaagggaggagaaaagctccaaataaaaaagactgtgtcattccatctgtatatcagcactgctccgtgtggagatggcgccctctttgacaagtcctgcagcgaccgtgctatggaaagcacagaatcccgccactaccctgtcttcgagaatcccaaacaaggaaagctccgcaccaaggtggagaacggagaaggcacaatccctgtggaatccagtgacattgtgcctacgtgggatggcattcggctcggggagagactccgtaccatgtcctgtagtgacaaaatcctacgctggaacgtgctgggcctgcaaggggcactgttgacccacttcctgcagcccatttatctcaaatctgtcacattgggttaccttttcagccaagggcatctgacccgtgctatttgctgtcgtgtgacaagagatgggagtgcatttgaggatggactacgacatccctttattgtcaaccaccccaaggttggcagagtcagcatatatgattccaaaaggcaatccgggaagactaaggagacaagcgtcaactggtgtctggctgatggctatgacctggagatcctggacggtaccagaggcactgtggatgggccacggaatgaattgtcccgggtctccaaaaagaacatttttcttctatttaagaagctctgctccttccgttaccgcagggatctactgagactctcctatggtgaggccaagaaagctgcccgtgactacgagacggccaagaactacttcaaaaaaggcctgaaggatatgggctatgggaactggattagcaaaccccaggaggaaaagaacttttatctctgcccagtatagtatgctccagtgacagatggattagggtgtgtcatactagggtgtgagagaggtaggtcgtagcattcctcatcacatggtcaggggatttttttttctcctttttttttctttttaagccataattggtgatactgaaaactttgggttcccatttatcctgctttctttgggattgctaggcaaggtctggccaggccccccttttttcccccaagtgaagaggcagaaacctaagaagttatcttttctttctacccaaagcatacatagtcactgagcacctgcggtccatttcctcttaaaagttttgttttgatttgtttccatttcctttccctttgtgtttgctacactgacctcttgcggtcttgattaggtttcagtcaactctggatcatgtcagggactgataatttcatttgtggattacgcagacccctctacttcccctctttcccttctgagattctttccttgtgatctgaatgtctccttttccccctcagagggcaaagaggtgaacataaaggatttggtgaaacatttgtaagggtaggagttgaaaactgcagttcccagtgccacggaagtgtgattggagcctgcagataatgcccagccatcctcccatcctgcactttagccagctgcagggcgggcaaggcaaggaaagctgcttccctggaagtgtatcactttctccggcagctgggaagtctagaaccagccagactgggttaagggagctgctcaagcaatagcagaggtttcacccggcaggatgacacagaccacttcccagggagcacgggcatgccttggaatattgccaagcttccagctgcctcttctcctaaagcattcctaggaatattttccccgccaatgctgggcgtacaccctagccaacgggacaaatcctagagggtataaaatcatctctgctcagataatcatgacttagcaagaataagggcaaaaaatcctgttggcttaacgtcactgttccacctggtgtaatatctctcatgacagtgacaccaagggaagttgactaagtcacatgtaaattaggagtgttttaaagaatgccatagatgttgattcttaactgctacagataacctgtaattgagcagatttaaaattcaggcatacttttccatttatccaagtgctttcatttttccagatggcttcagaagtaggctcgtgggcagggcgcagacctgatctttatagggttgacatagaaagcagtagttgtgggtgaaagggcaggttgtcttcaaactctgtgaggtagaatcctttgtctatacctccatgaacattgactcgtgtgttcagagcctttggcctctctgtggagtctggctctctggctcctgtgcattctttgaatagtcactcgtaaaaactgtcagtgcttgaaactgtttcctttactcatgttgaagggactttgttggcttttagagtttttggagtcttggttgtgactccaagagcagagtgaggaagacccccaagcatagactcgggtactgtgatgatggctgcagtccagttttatgattctgcttttatgtgtcccttgataacagtgacttaacaatatacattcctcataaataaaaaaaaaacaagaatctgaa

SEQ ID NO: 74208 - DNA, 4871 bp, Homo sapiens
  misc_feature (17)..(17): n is a, c, g, or t
  misc_feature (24)..(24): n is a, c, g, or t
  misc_feature (26)..(27): n is a, c, g, or t
gggggggggagggctcncggccgnannggcagcctccgggtgtccggccgtgtcccgaggaagtgcaagacccggggtattccctcagcggatactacacccatccatttcaaggctatgagcacagacagctcagataccagcagcctgggccaggatcttcccccagtagtttcctgcttaagcaaatagaatttctcaaggggcagctcccagaagcaccggtgattggaaagcagacaccgtcactgccaccttccctcccaggactccggccaaggtttccagtactacttgcctccagtaccagaggcaggcaagtggacatcaggggtgtccccaggggcgtgcatctcggaagtcaggggctccagagagggttccagcatccttcaccacgtggcaggagtctgccacagagaggtgttgattgcctttcctcacatttccaggaactgagtatctaccaagatcaggaacaaaggatcttaaagttcctggaagagcttggggaagggaaggccaccacagcacatgatctgtctgggaaacttgggactccgaagaaagaaatcaatcgagttttatactccctggcaaagaagggcaagctacagaaagaggcaggaacaccccctttgtggaaaatcgcggtctccactcaggcttggaaccagcacagcggagtggtaagaccagacggtcatagccaaggagccccaaactcagacccgagtttggaaccggaagacagaaactccacatctgtctcagaagatcttcttgagccttttattgcagtctcagctcaggcttggaaccagcacagcggagtggtaagaccagacagtcatagccaaggatccccaaactcagacccaggtttggaacctgaagacagcaactccacatctgccttggaagatcctcttgagtttttagacatggccgagatcaaggagaaaatctgcgactatctcttcaatgtgtctgactcctctgccctgaatttggctaaaaatattggccttaccaaggcccgagatataaatgctgtgctaattgacatggaaaggcagggggatgtctatagacaagggacaacccctcccatatggcatttgacagacaagaagcgagagaggatgcaaatcaagagaaatacgaacagtgttcctgaaaccgctccagctgcaatccctgagaccagaagaaacgcagagttcctcacctgtaatatacccacatcaaatgcctcaaataacatggtaaccacagaaaaagtggagaatgggcaggaacctgtcataaagttagaaaacaggcaagaggccagaccagaaccagcaagactgaaaccacctgttcattacaatggcccctcaaaagcagggtatgttgactttgaaaatggccagtgggccacagatgacatcccagatgacttgaatagtatccgcgcagcaccaggtgagtttcgagccatcatggagatgccctccttctacagtcatggcttgccacggtgttcaccctacaagaaactgacagagtgccagctgaagaaccccatcagcgggctgttagaatatgcccagttcgctagtcaaacctgtgagttcaacatgatagagcagagtggaccaccccatgaacctcgatttaaattccaggttgtcatcaatggccgagagtttcccccagctgaagctggaagcaagaaagtggccaagcaggatgcagctatgaaagccatgacaattctgctagaggaagccaaagccaaggacagtggaaaatcagaagaatcatcccactattccacagagaaagaatcagagaagactgcagagtcccagacccccaccccttcagccacatccttcttttctgggaagagccccgtcaccacactgcttgagtgtatgcacaaattggggaactcctgcgaattccgtctcctgtccaaagaaggccctgcccatgaacccaagttccaatactgtgttgcagtgggagcccaaactttccccagtgtgagtgctcccagcaagaaagtggcaaagcagatggccgcagaggaagccatgaaggccctgcatggggaggcgaccaactccatggcttctgataaccagcctgaaggtatgatctcagagtcacttgataacttggaatccatgatgcccaacaaggtcaggaagattggcgagctcgtgagatacctgaacaccaaccctgtgggtggccttttggagtacgcccgctcccatggctttgctgctgaattcaagttggtcgaccagtccggacctcctcacgagcccaagttcgtttaccaagcaaaagttgggggtcgctggttcccagccgtctgcgcacacagcaagaagcaaggcaagcaggaagcagcagatgcggctctccgtgtcttgattggggagaacgagaaggcagaacgcatgggtttcacagaggtaaccccagtgacaggggccagtctcagaagaactatgctcctcctctcaaggtccccagaagcacagccaaagacactccctctcactggcagcaccttccatgaccagatagccatgctgagccaccggtgcttcaacactctgactaacagcttccagccctccttgctcggccgcaagattctggccgccatcattatgaaaaaagactctgaggacatgggtgtcgtcgtcagcttgggaacagggaatcgctgtgtgaaaggagattctctcagcctaaaaggagaaactgtcaatgactgccatgcagaaataatctcccggagaggcttcatcaggtttctctacagtgagttaatgaaatacaactcccagactgcgaaggatagtatatttgaacctgctaagggaggagaaaagctccaaataaaaaagactgtgtcattccatctgtatatcagcactgctccgtgtggagatggcgccctctttgacaagtcctgcagcgaccgtgctatggaaagcacagaatcccgccactaccctgtcttcgagaatcccaaacaaggaaagctccgcaccaaggtggagaacggagaaggcacaatccctgtggaatccagtgacattgtgcctacgtgggatggcattcggctcggggagagactccgtaccatgtcctgtagtgacaaaatcctacgctggaacgtgctgggcctgcaaggggcactgttgacccacttcctgcagcccatttatctcaaatctgtcacattgggttaccttttcagccaagggcatctgacccgtgctatttgctgtcgtgtgacaagagatgggagtgcatttgaggatggactacgacatccctttattgtcaaccaccccaaggttggcagagtcagcatatatgattccaaaaggcaatccgggaagactaaggagacaagcgtcaactggtgtctggctgatggctatgacctggagatcctggacggtaccagaggcactgtggatgggccacggaatgaattgtcccgggtctccaaaaagaacatttttcttctatttaagaagctctgctccttccgttaccgcagggatctactgagactctcctatggtgaggccaagaaagctgcccgtgactacgagacggccaagaactacttcaaaaaaggcctgaaggatatgggctatgggaactggattagcaaaccccaggaggaaaagaacttttatctctgcccagtatagtatgctccagtgacagatggattagggtgtgtcatactagggtgtgagagaggtaggtcgtagcattcctcatcacatggtcaggggatttttttttctcctttttttttctttttaagccataattggtgatactgaaaactttgggttcccatttatcctgctttctttgggattgctaggcaaggtctggccaggccccccttttttcccccaagtgaagaggcagaaacctaagaagttatcttttctttctacccaaagcatacatagtcactgagcacctgcggtccatttcctcttaaaagttttgttttgatttgtttccatttcctttccctttgtgtttgctacactgacctcttgcggtcttgattaggtttcagtcaactctggatcatgtcagggactgataatttcatttgtggattacgcagacccctctacttcccctctttcccttctgagattctttccttgtgatctgaatgtctccttttccccctcagagggcaaagaggtgaacataaaggatttggtgaaacatttgtaagggtaggagttgaaaactgcagttcccagtgccacggaagtgtgattggagcctgcagataatgcccagccatcctcccatcctgcactttagccagctgcagggcgggcaaggcaaggaaagctgcttccctggaagtgtatcactttctccggcagctgggaagtctagaaccagccagactgggttaagggagctgctcaagcaatagcagaggtttcacccggcaggatgacacagaccacttcccagggagcacgggcatgccttggaatattgccaagcttccagctgcctcttctcctaaagcattcctaggaatattttccccgccaatgctgggcgtacaccctagccaacgggacaaatcctagagggtataaaatcatctctgctcagataatcatgacttagcaagaataagggcgactctccgaaggcgcggggtggggggacaataatctaagaactgaaggcagagactttctttagaatctttgttcctgtctgcaattataggattttcatgtgtcagcaaaggatagggtgtctctagttatttgtttccagggccatcg

SEQ ID NO: 74209 - DNA, 614 bp, Homo sapiens
tcatagccaaggaggtattccacctcctaccggaatataattaaagggagaaatacactgtatgaagatacatgttaaggcttaaggtgtaaacactttggaaggcaaacagcttagtgaaaaaaattatggttcatttaaaaatgtgtatcatttcataatagacccctgaactttcaaatttacatgtgagaataccacaccacttgagtcacacaggacagaggaggcagagcttctgcccactgttatcttcactttctttgtccagtcttttgtttttaataagcagtgaccctccctactcttctttttaatgatttttgtagttgatttgtctgaactgtggctactgtgcattccttgaataatcacttgtaaaaattgtcagtgcttgaagctgtttcctttactcacattgaagggacttcgttggttttttggagtcttggttgtgactccaagagcagagtgaggaagacccccaagcatagactcgggtactgtgatgatggctgcagtccagttttatgattctgcttttatgtgtcccttgataacagtgacttaacaatatacattcctcataaataaaaaaaaaacaagaatctgaa

SEQ ID NO: 74210 - DNA, 2916 bp, Homo sapiens
  misc_feature (17)..(17): n is a, c, g, or t
  misc_feature (24)..(24): n is a, c, g, or t
  misc_feature (26)..(27): n is a, c, g, or t
gggggggggagggctcncggccgnannggcagcctccgggtgtccggccgtgtcccgaggaagtgcaagacccggggtattccctcagcggatactacacccatccatttcaaggctatgagcacagacagctcagataccagcagcctgggccaggatcttcccccagtagtttcctgcttaagcaaatagaatttctcaaggggcagctcccagaagcaccggtgattggaaagcagacaccgtcactgccaccttccctcccaggactccggccaaggtttccagtactacttgcctccagtaccagaggcaggcaagtggacatcaggggtgtccccaggggcgtgcatctcggaagtcaggggctccagagagggttccagcatccttcaccacgtggcaggagtctgccacagagaggtgttgattgcctttcctcacatttccaggaactgagtatctaccaagatcaggaacaaaggatcttaaagttcctggaagagcttggggaagggaaggccaccacagcacatgatctgtctgggaaacttgggactccgaagaaagaaatcaatcgagttttatactccctggcaaagaagggcaagctacagaaagaggcaggaacaccccctttgtggaaaatcgcggtctccactcaggcttggaaccagcacagcggagtggtaagaccagacggtcatagccaaggagccccaaactcagacccgagtttggaaccggaagacagaaactccacatctgtctcagaagatcttcttgagccttttattgcagtctcagctcaggcttggaaccagcacagcggagtggtaagaccagacagtcatagccaaggatccccaaactcagacccaggtttggaacctgaagacagcaactccacatctgccttggaagatcctcttgagtttttagacatggccgagatcaaggagaaaatctgcgactatctcttcaatgtgtctgactcctctgccctgaatttggctaaaaatattggccttaccaaggcccgagatataaatgctgtgctaattgacatggaaaggcagggggatgtctatagacaagggacaacccctcccatatggcatttgacagacaagaagcgagagaggatgcaaatcaagagaaatacgaacagtgttcctgaaaccgctccagctgcaatccctgagaccagaagaaacgcagagttcctcacctgtaatatacccacatcaaatgcctcaaataacatggtaaccacagaaaaagtggagaatgggcaggaacctgtcataaagttagaaaacaggcaagaggccagaccagaaccagcaagactgaaaccacctgttcattacaatggcccctcaaaagcagggtatgttgactttgaaaatggccagtgggccacagatgacatcccagatgacttgaatagtatccgcgcagcaccaggtgagtttcgagccatcatggagatgccctccttctacagtcatggcttgccacggtgttcaccctacaagaaactgacagagtgccagctgaagaaccccatcagcgggctgttagaatatgcccagttcgctagtcaaacctgtgagttcaacatgatagagcagagtggaccaccccatgaacctcgatttaaattccaggttgtcatcaatggccgagagtttcccccagctgaagctggaagcaagaaagtggccaagcaggatgcagctatgaaagccatgacaattctgctagaggaagccaaagccaaggacagtggaaaatcagaagaatcatcccactattccacagagaaagaatcagagaagactgcagagtcccagacccccaccccttcagccacatccttcttttctgggaagagccccgtcaccacactgcttgagtgtatgcacaaattggggaactcctgcgaattccgtctcctgtccaaagaaggccctgcccatgaacccaagttccaatactgtgttgcagtgggagcccaaactttccccagtgtgagtgctcccagcaagaaagtggcaaagcagatggccgcagaggaagccatgaaggccctgcatggggaggcgaccaactccatggcttctgataaccagcctgaaggtatgatctcagagtcacttgataacttggaatccatgatgcccaacaaggtcaggaagattggcgagctcgtgagatacctgaacaccaaccctgtgggtggccttttggagtacgcccgctcccatggctttgctgctgaattcaagttggtcgaccagtccggacctcctcacgagcccaagttcgtttaccaagcaaaagttgggggtcgctggttcccagccgtctgcgcacacagcaagaagcaaggcaagcaggaagcagcagatgcggctctccgtgtcttgattggggagaacgagaaggcagaacgcatgggtttcacagagctccctctcactggcagcaccttccatgaccagatagccatgctgagccaccggtgcttcaacactctgactaacagcttccagccctccttgctcggccgcaagattctggccgccatcattatgaaaaaagactctgaggacatgggtgtcgtcgtcagcttgggaacagggaatcgctgtgtgaaaggagattctctcagcctaaaaggagaaactgtcaatgactgccatgcagaaataatctcccggagaggcttcatcaggtttctctacagtgagttaatgaaatacaactcccagactgcgaaggatagtatatttgaacctgctaagggaggagaaaagctccaaataaaaaagactgtgtcattccatctgtatatcagccgctccgtgtggagatgcgccctcctacatccgctatctcctgaccggg

SEQ ID NO: 74211 - DNA, 616 bp, Homo sapiens
cccagttcgctagtcaaacctgtgagttcaacatgatagagcagagtggaccaccccatgaacctcggtaagagaccacccaggaactgtacctagggttggggtcaggtgcttttgctcctgacgcagtcttggctgatttgtgagcagtgctgtttggtggcgcctatcttttcctccttcccttctgccttttagctaaattccccttgattggccctttctccagatattgagcagggaatatagaccttggaccagccagaatcttggctgaacaagggggaggttgactctgttggctgtaatgaagcttctttagaaatgattggttttggccgtacgcggtggctcatgcctgtaatcccagcactttttgaggccgaggcaggcatatcacgaggtcaggagtttgagaccagcctggccaacatggtgaaaccctgtctctactaaaaatacaaaaattagctgggcgtggtggcgtgcacctgtagtcccagctactcaggaagctgagacaggagaatcacttgaacccaggaggcagaggttgcagtgaactgagattgcgccactgcactccagcctgggccacagagcaagactccatctc

SEQ ID NO: 74212 - DNA, 6533 bp, Homo sapiens
  misc_feature (1)..(2): n is a, c, g, or t
nngaggaaacgaaagcgaaattgaaccggagccatcttgggcccggcgcgcagacccgcggagtttcccgtgccgacgccccggggccacttccagtgcggagtagcggaggcgtgggggcctcgaggggctggcgcggtccagcggtcgggccagggtcgtgccgccggcgggtcgggccgggcaatgcctcgcgggcgcaatgaatccgcggcaggggtattccctcagcggatactacacccatccatttcaaggctatgagcacagacagctcagataccagcagcctgggccaggatcttcccccagtagtttcctgcttaagcaaatagaatttctcaaggggcagctcccagaagcaccggtgattggaaagcagacaccgtcactgccaccttccctcccaggactccggccaaggtttccagtactacttgcctccagtaccagaggcaggcaagtggacatcaggggtgtccccaggggcgtgcatctcggaagtcaggggctccagagagggttccagcatccttcaccacgtggcaggagtctgccacagagaggtgttgattgcctttcctcacatttccaggaactgagtatctaccaagatcaggaacaaaggatcttaaagttcctggaagagcttggggaagggaaggccaccacagcacatgatctgtctgggaaacttgggactccgaagaaagaaatcaatcgagttttatactccctggcaaagaagggcaagctacagaaagaggcaggaacaccccctttgtggaaaatcgcggtctccactcaggcttggaaccagcacagcggagtggtaagaccagacggtcatagccaaggagccccaaactcagacccgagtttggaaccggaagacagaaactccacatctgtctcagaagatcttcttgagccttttattgcagtctcagctcaggcttggaaccagcacagcggagtggtaagaccagacagtcatagccaaggatccccaaactcagacccaggtttggaacctgaagacagcaactccacatctgccttggaagatcctcttgagtttttagacatggccgagatcaaggagaaaatctgcgactatctcttcaatgtgtctgactcctctgccctgaatttggctaaaaatattggccttaccaaggcccgagatataaatgctgtgctaattgacatggaaaggcagggggatgtctatagacaagggacaacccctcccatatggcatttgacagacaagaagcgagagaggatgcaaatcaagagaaatacgaacagtgttcctgaaaccgctccagctgcaatccctgagaccagaagaaacgcagagttcctcacctgtaatatacccacatcaaatgcctcaaataacatggtaaccacagaaaaagtggagaatgggcaggaacctgtcataaagttagaaaacaggcaagaggccagaccagaaccagcaagactgaaaccacctgttcattacaatggcccctcaaaagcagggtatgttgactttgaaaatggccagtgggccacagatgacatcccagatgacttgaatagtatccgcgcagcaccaggtgagtttcgagccatcatggagatgccctccttctacagtcatggcttgccacggtgttcaccctacaagaaactgacagagtgccagctgaagaaccccatcagcgggctgttagaatatgcccagttcgctagtcaaacctgtgagttcaacatgatagagcagagtggaccaccccatgaacctcgatttaaattccaggttgtcatcaatggccgagagtttcccccagctgaagctggaagcaagaaagtggccaagcaggatgcagctatgaaagccatgacaattctgctagaggaagccaaagccaaggacagtggaaaatcagaagaatcatcccactattccacagagaaagaatcagagaagactgcagagtcccagacccccaccccttcagccacatccttcttttctgggaagagccccgtcaccacactgcttgagtgtatgcacaaattggggaactcctgcgaattccgtctcctgtccaaagaaggccctgcccatgaacccaagttccaatactgtgttgcagtgggagcccaaactttccccagtgtgagtgctcccagcaagaaagtggcaaagcagatggccgcagaggaagccatgaaggccctgcatggggaggcgaccaactccatggcttctgataaccaggtcaggaagattggcgagctcgtgagatacctgaacaccaaccctgtgggtggccttttggagtacgcccgctcccatggctttgctgctgaattcaagttggtcgaccagtccggacctcctcacgagcccaagttcgtttaccaagcaaaagttgggggtcgctggttcccagccgtctgcgcacacagcaagaagcaaggcaagcaggaagcagcagatgcggctctccgtgtcttgattggggagaacgagaaggcagaacgcatgggtttcacagagctccctctcactggcagcaccttccatgaccagatagccatgctgagccaccggtgcttcaacactctgactaacagcttccagccctccttgctcggccgcaagattctggccgccatcattatgaaaaaagactctgaggacatgggtgtcgtcgtcagcttgggaacagggaatcgctgtgtgaaaggagattctctcagcctaaaaggagaaactgtcaatgactgccatgcagaaataatctcccggagaggcttcatcaggtttctctacagtgagttaatgaaatacaactcccagactgcgaaggatagtatatttgaacctgctaagggaggagaaaagctccaaataaaaaagactgtgtcattccatctgtatatcagcactgctccgtgtggagatggcgccctctttgacaagtcctgcagcgaccgtgctatggaaagcacagaatcccgccactaccctgtcttcgagaatcccaaacaaggaaagctccgcaccaaggtggagaacggagaaggcacaatccctgtggaatccagtgacattgtgcctacgtgggatggcattcggctcggggagagactccgtaccatgtcctgtagtgacaaaatcctacgctggaacgtgctgggcctgcaaggggcactgttgacccacttcctgcagcccatttatctcaaatctgtcacattgggttaccttttcagccaagggcatctgacccgtgctatttgctgtcgtgtgacaagagatgggagtgcatttgaggatggactacgacatccctttattgtcaaccaccccaaggttggcagagtcagcatatatgattccaaaaggcaatccgggaagactaaggagacaagcgtcaactggtgtctggctgatggctatgacctggagatcctggacggtaccagaggcactgtggatgggccacggaatgaattgtcccgggtctccaaaaagaacatttttcttctatttaagaagctctgctccttccgttaccgcagggatctactgagactctcctatggtgaggccaagaaagctgcccgtgactacgagacggccaagaactacttcaaaaaaggcctgaaggatatgggctatgggaactggattagcaaaccccaggaggaaaagaacttttatctctgcccagtatagtatgctccagtgacagatggattagggtgtgtcatactagggtgtgagagaggtaggtcgtagcattcctcatcacatggtcaggggatttttttttctcctttttttttctttttaagccataattggtgatactgaaaactttgggttcccatttatcctgctttctttgggattgctaggcaaggtctggccaggccccccttttttcccccaagtgaagaggcagaaacctaagaagttatcttttctttctacccaaagcatacatagtcactgagcacctgcggtccatttcctcttaaaagttttgttttgatttgtttccatttcctttccctttgtgtttgctacactgacctcttgcggtcttgattaggtttcagtcaactctggatcatgtcagggactgataatttcatttgtggattacgcagacccctctacttcccctctttcccttctgagattctttccttgtgatctgaatgtctccttttccccctcagagggcaaagaggtgaacataaaggatttggtgaaacatttgtaagggtaggagttgaaaactgcagttcccagtgccacggaagtgtgattggagcctgcagataatgcccagccatcctcccatcctgcactttagccagctgcagggcgggcaaggcaaggaaagctgcttccctggaagtgtatcactttctccggcagctgggaagtctagaaccagccagactgggttaagggagctgctcaagcaatagcagaggtttcacccggcaggatgacacagaccacttcccagggagcacgggcatgccttggaatattgccaagcttccagctgcctcttctcctaaagcattcctaggaatattttccccgccaatgctgggcgtacaccctagccaacgggacaaatcctagagggtataaaatcatctctgctcagataatcatgacttagcaagaataagggcaaaaaatcctgttggcttaacgtcactgttccacctggtgtaatatctctcatgacagtgacaccaagggaagttgactaagtcacatgtaaattaggagtgttttaaagaatgccatagatgttgattcttaactgctacagataacctgtaattgagcagatttaaaattcaggcatacttttccatttatccaagtgctttcatttttccagatggcttcagaagtaggctcgtgggcagggcgcagacctgatctttatagggttgacatagaaagcagtagttgtgggtgaaagggcaggttgtcttcaaactctgtgaggtagaatcctttgtctatacctccatgaacattgactcgtgtgttcagagcctttggcctctctgtggagtctggctctctggctcctgtgcattctttgaatagtcactcgtaaaaactgtcagtgcttgaaactgtttcctttactcatgttgaagggactttgttggcttttagagtgttggtcatgactccaagagcagagcagggaagagcccaagcatagacttggtgccgtggtgatggctgcagtccagttttgtgatgctgcttttacgtgtccctcgataacagtcagctagacacactcaggaggactactgaggctctgcgaccttcaggagctgagcctgcctctctcctttagatgacagaccttcatctgggaacgtgctgagccagcaccctcagatgatttccctccaaactgctgactaggtcatcctctgtctggtagagacattcacatctttgcttttattctatgctctctgtacttttgaccaaaaattgaccaaagtaagaaaatgcaagttctaaaaatagactaaggatgcctttgcagaacaccaaagcatcccaaggaactggtagggaagtggcgcctgtctcctggagtggaagaggcctgctccctggctctgggtctgctgggggcacagtaaatcagtcttggcacccacatccagggcagagaggtctgtggttctcagcatcagaaggcagcgcagcccctctcctcttcaggctacagggttgtcacctgctgagtcctcaggttgtttggcctctctggtccatcttgggcattaggttctccagcagagctctggccagctgcctcttctttaactgggaacacaggctctcacaagatcagaacccccactcacccccaagatcttatctagcaagcctgtagtattcagtttctgttgtaggaagagagcgaggcatccctgaattccacgcatctgctggaaacgagccgtgtcagatcgcacatccctgcgcccccatgcccccatgcccctctgagtcacacaggacagaggaggcagagcttctgcccactgttatcttcactttctttgtccagtcttttgtttttaataagcagtgaccctccctactcttctttttaatgatttttgtagttgatttgtctgaactgtggctactgtgcattccttgaataatcacttgtaaaaattgtcagtgcttgaagctgtttcctttactcacattgaagggacttcgttggttttttggagtcttggttgtgactccaagagcagagtgaggaagacccccaagcatagactcgggtactgtgatgatggctgcagtccagttttatgattctgcttttatgtgtcccttgataacagtgacttaacaatatacattcctcataaataaaaaaaaaacaagaatctgaaaaaaaaaacaagaatctgaattcttaaaaaaaaaaaag

SEQ ID NO: 74213 - DNA, 7252 bp, Homo sapiens
gtaaaggcaaagggggtagtgcttatctcttgatcctaaatatgtgagaccagattaaagtgaaatctgggaggcaatgaatgttaaatgagttgttatgtaatttgcatagaggtgatgctgagagatttagaaaggatcactgtgggttgcttgctcactttcttgctctcctattccgtagctttccaaatggctgtactcaacggtggcttggtgtttaggggatttaaggggggcaaaaagaaagattaataatctcctcctctccctctaaccctactgccctaagatatccttagcaaacttacatctcctttcttttctctgtgttcattccattgtgcgcacacatacacattcatggattttctctttttgtttagggaaaaaaattataatgtacatactattctacaactttttgttgttttattgaacattatatgattcctaaattatccccaggtgaatacaaatagatatgacacattttaaaaaaataaaataactggccgggcgtggtagctcatgcctgtaatcccagcactttgggagcccgaggagggcggatcaggagatcgacaccatcctggccagcatggtgaaaccccatctctactaaaaatacaaaaattagctgggtgtggtggcgtgcgcctgtaatcccagctactccggaggctgaggcaggagaatcacttgaacccgggaggcggagattgcagtgagctgagatcacactgcactccagcctgattgcagtgagccgagatcatgccactgcactccagcttggcaacagagcgagactccgtctcacaagaaaaaaaataaccgggtattccctcagcggatactacacccatccatttcaaggctatgagcacagacagctcagataccagcagcctgggccaggatcttcccccagtagtttcctgcttaagcaaatagaatttctcaaggggcagctcccagaagcaccggtgattggaaagcagacaccgtcactgccaccttccctcccaggactccggccaaggtttccagtactacttgcctccagtaccagaggcaggcaagtggacatcaggggtgtccccaggggcgtgcatctcggaagtcaggggctccagagagggttccagcatccttcaccacgtggcaggagtctgccacagagaggtgttgattgcctttcctcacatttccaggaactgagtatctaccaagatcaggaacaaaggatcttaaagttcctggaagagcttggggaagggaaggccaccacagcacatgatctgtctgggaaacttgggactccgaagaaagaaatcaatcgagttttatactccctggcaaagaagggcaagctacagaaagaggcaggaacaccccctttgtggaaaatcgcggtctccactcaggcttggaaccagcacagcggagtggtaagaccagacggtcatagccaaggagccccaaactcagacccgagtttggaaccggaagacagaaactccacatctgtctcagaagatcttcttgagccttttattgcagtctcagctcaggcttggaaccagcacagcggagtggtaagaccagacagtcatagccaaggatccccaaactcagacccaggtttggaacctgaagacagcaactccacatctgccttggaagatcctcttgagtttttagacatggccgagatcaaggagaaaatctgcgactatctcttcaatgtgtctgactcctctgccctgaatttggctaaaaatattggccttaccaaggcccgagatataaatgctgtgctaattgacatggaaaggcagggggatgtctatagacaagggacaacccctcccatatggcatttgacagacaagaagcgagagaggatgcaaatcaagagaaatacgaacagtgttcctgaaaccgctccagctgcaatccctgagaccagaagaaacgcagagttcctcacctgtaatatacccacatcaaatgcctcaaataacatggtaaccacagaaaaagtggagaatgggcaggaacctgtcataaagttagaaaacaggcaagaggccagaccagaaccagcaagactgaaaccacctgttcattacaatggcccctcaaaagcagggtatgttgactttgaaaatggccagtgggccacagatgacatcccagatgacttgaatagtatccgcgcagcaccaggtgagtttcgagccatcatggagatgccctccttctacagtcatggcttgccacggtgttcaccctacaagaaactgacagagtgccagctgaagaaccccatcagcgggctgttagaatatgcccagttcgctagtcaaacctgtgagttcaacatgatagagcagagtggaccaccccatgaacctcgatttaaattccaggttgtcatcaatggccgagagtttcccccagctgaagctggaagcaagaaagtggccaagcaggatgcagctatgaaagccatgacaattctgctagaggaagccaaagccaaggacagtggaaaatcagaagaatcatcccactattccacagagaaagaatcagagaagactgcagagtcccagacccccaccccttcagccacatccttcttttctgggaagagccccgtcaccacactgcttgagtgtatgcacaaattggggaactcctgcgaattccgtctcctgtccaaagaaggccctgcccatgaacccaagttccaatactgtgttgcagtgggagcccaaactttccccagtgtgagtgctcccagcaagaaagtggcaaagcagatggccgcagaggaagccatgaaggccctgcatggggaggcgaccaactccatggcttctgataaccagcctgaaggtatgatctcagagtcacttgataacttggaatccatgatgcccaacaaggtcaggaagattggcgagctcgtgagatacctgaacaccaaccctgtgggtggccttttggagtacgcccgctcccatggctttgctgctgaattcaagttggtcgaccagtccggacctcctcacgagcccaagttcgtttaccaagcaaaagttgggggtcgctggttcccagccgtctgcgcacacagcaagaagcaaggcaagcaggaagcagcagatgcggctctccgtgtcttgattggggagaacgagaaggcagaacgcatgggtttcacagaggtaaccccagtgacaggggccagtctcagaagaactatgctcctcctctcaaggtccccagaagcacagccaaagacactccctctcactggcagcaccttccatgaccagatagccatgctgagccaccggtgcttcaacactctgactaacagcttccagccctccttgctcggccgcaagattctggccgccatcattatgaaaaaagactctgaggacatgggtgtcgtcgtcagcttgggaacagggaatcgctgtgtgaaaggagattctctcagcctaaaaggagaaactgtcaatgactgccatgcagaaataatctcccggagaggcttcatcaggtttctctacagtgagttaatgaaatacaactcccagactgcgaaggatagtatatttgaacctgctaagggaggagaaaagctccaaataaaaaagactgtgtcattccatctgtatatcagcactgctccgtgtggagatggcgccctctttgacaagtcctgcagcgaccgtgctatggaaagcacagaatcccgccactaccctgtcttcgagaatcccaaacaaggaaagctccgcaccaaggtggagaacggagaaggcacaatccctgtggaatccagtgacattgtgcctacgtgggatggcattcggctcggggagagactccgtaccatgtcctgtagtgacaaaatcctacgctggaacgtgctgggcctgcaaggggcactgttgacccacttcctgcagcccatttatctcaaatctgtcacattgggttaccttttcagccaagggcatctgacccgtgctatttgctgtcgtgtgacaagagatgggagtgcatttgaggatggactacgacatccctttattgtcaaccaccccaaggttggcagagtcagcatatatgattccaaaaggcaatccgggaagactaaggagacaagcgtcaactggtgtctggctgatggctatgacctggagatcctggacggtaccagaggcactgtggatgggccacggaatgaattgtcccgggtctccaaaaagaacatttttcttctatttaagaagctctgctccttccgttaccgcagggatctactgagactctcctatggtgaggccaagaaagctgcccgtgactacgagacggccaagaactacttcaaaaaaggcctgaaggatatgggctatgggaactggattagcaaaccccaggaggaaaagaacttttatctctgcccagtatagtatgctccagtgacagatggattagggtgtgtcatactagggtgtgagagaggtaggtcgtagcattcctcatcacatggtcaggggatttttttttctcctttttttttctttttaagccataattggtgatactgaaaactttgggttcccatttatcctgctttctttgggattgctaggcaaggtctggccaggccccccttttttcccccaagtgaagaggcagaaacctaagaagttatcttttctttctacccaaagcatacatagtcactgagcacctgcggtccatttcctcttaaaagttttgttttgatttgtttccatttcctttccctttgtgtttgctacactgacctcttgcggtcttgattaggtttcagtcaactctggatcatgtcagggactgataatttcatttgtggattacgcagacccctctacttcccctctttcccttctgagattctttccttgtgatctgaatgtctccttttccccctcagagggcaaagaggtgaacataaaggatttggtgaaacatttgtaagggtaggagttgaaaactgcagttcccagtgccacggaagtgtgattggagcctgcagataatgcccagccatcctcccatcctgcactttagccagctgcagggcgggcaaggcaaggaaagctgcttccctggaagtgtatcactttctccggcagctgggaagtctagaaccagccagactgggttaagggagctgctcaagcaatagcagaggtttcacccggcaggatgacacagaccacttcccagggagcacgggcatgccttggaatattgccaagcttccagctgcctcttctcctaaagcattcctaggaatattttccccgccaatgctgggcgtacaccctagccaacgggacaaatcctagagggtataaaatcatctctgctcagataatcatgacttagcaagaataagggcaaaaaatcctgttggcttaacgtcactgttccacctggtgtaatatctctcatgacagtgacaccaagggaagttgactaagtcacatgtaaattaggagtgttttaaagaatgccatagatgttgattcttaactgctacagataacctgtaattgagcagatttaaaattcaggcatacttttccatttatccaagtgctttcatttttccagatggcttcagaagtaggctcgtgggcagggcgcagacctgatctttatagggttgacatagaaagcagtagttgtgggtgaaagggcaggttgtcttcaaactctgtgaggtagaatcctttgtctatacctccatgaacattgactcgtgtgttcagagcctttggcctctctgtggagtctggctctctggctcctgtgcattctttgaatagtcactcgtaaaaactgtcagtgcttgaaactgtttcctttactcatgttgaagggactttgttggcttttagagtgttggtcatgactccaagagcagagcagggaagagcccaagcatagacttggtgccgtggtgatggctgcagtccagttttgtgatgctgcttttacgtgtccctcgataacagtcagctagacacactcaggaggactactgaggctctgcgaccttcaggagctgagcctgcctctctcctttagatgacagaccttcatctgggaacgtgctgagccagcaccctcagatgatttccctccaaactgctgactaggtcatcctctgtctggtagagacattcacatctttgcttttattctatgctctctgtacttttgaccaaaaattgaccaaagtaagaaaatgcaagttctaaaaatagactaaggatgcctttgcagaacaccaaagcatcccaaggaactggtagggaagtggcgcctgtctcctggagtggaagaggcctgctccctggctctgggtctgctgggggcacagtaaatcagtcttggcacccacatccagggcagagaggtctgtggttctcagcatcagaaggcagcgcagcccctctcctcttcaggctacagggttgtcacctgctgagtcctcaggttgtttggcctctctggtccatcttgggcattaggttctccagcagagctctggccagctgcctcttctttaactgggaacacaggctctcacaagatcagaacccccactcacccccaagatcttatctagcaagcctgtagtattcagtttctgttgtaggaagagagcgaggcatccctgaattccacgcatctgctggaaacgagccgtgtcagatcgcacatccctgcgcccccatgcccccatgcccctctgagtcacacaggacagaggaggcagagcttctgcccactgttatcttcactttctttgtccagtcttttgtttttaataagcagtgaccctccctactcttctttttaatgatttttgtagttgatttgtctgaactgtggctactgtgcattccttgaataatcacttgtaaaaattgtcagtgcttgaagctgtttcctttactcacattgaagggacttcgttggttttttggagtcttggttgtgactccaagagcagagtgaggaagacccccaagcatagactcgggtactgtgatgatggctgcagtccagttttatgattctgcttttatgtgtcccttgataacagtgacttaacaatatacattcctcataaataaaaaaaaaacaagaatctgaa

SEQ ID NO: 74214 - DNA, 6741 bp, Homo sapiens
  misc_feature (17)..(17): n is a, c, g, or t
  misc_feature (24)..(24): n is a, c, g, or t
  misc_feature (26)..(27): n is a, c, g, or t
gggggggggagggctcncggccgnannggcagcctccgggtgtccggccgtgtcccgaggaagtgcaagacccggggtattccctcagcggatactacacccatccatttcaaggctatgagcacagacagctcagataccagcagcctgggccaggatcttcccccagtagtttcctgcttaagcaaatagaatttctcaaggggcagctcccagaagcaccggtgattggaaagcagacaccgtcactgccaccttccctcccaggactccggccaaggtttccagtactacttgcctccagtaccagaggcaggcaagtggacatcaggggtgtccccaggggcgtgcatctcggaagtcaggggctccagagagggttccagcatccttcaccacgtggcaggagtctgccacagagaggtgttgattgcctttcctcacatttccaggaactgagtatctaccaagatcaggaacaaaggatcttaaagttcctggaagagcttggggaagggaaggccaccacagcacatgatctgtctgggaaacttgggactccgaagaaagaaatcaatcgagttttatactccctggcaaagaagggcaagctacagaaagaggcaggaacaccccctttgtggaaaatcgcggtctccactcaggcttggaaccagcacagcggagtggtaagaccagacggtcatagccaaggagccccaaactcagacccgagtttggaaccggaagacagaaactccacatctgtctcagaagatcttcttgagccttttattgcagtctcagctcaggcttggaaccagcacagcggagtggtaagaccagacagtcatagccaaggatccccaaactcagacccaggtttggaacctgaagacagcaactccacatctgccttggaagatcctcttgagtttttagacatggccgagatcaaggagaaaatctgcgactatctcttcaatgtgtctgactcctctgccctgaatttggctaaaaatattggccttaccaaggcccgagatataaatgctgtgctaattgacatggaaaggcagggggatgtctatagacaagggacaacccctcccatatggcatttgacagacaagaagcgagagaggatgcaaatcaagagaaatacgaacagtgttcctgaaaccgctccagctgcaatccctgagaccagaagaaacgcagagttcctcacctgtaatatacccacatcaaatgcctcaaataacatggtaaccacagaaaaagtggagaatgggcaggaacctgtcataaagttagaaaacaggcaagaggccagaccagaaccagcaagactgaaaccacctgttcattacaatggcccctcaaaagcagggtatgttgactttgaaaatggccagtgggccacagatgacatcccagatgacttgaatagtatccgcgcagcaccaggtgagtttcgagccatcatggagatgccctccttctacagtcatggcttgccacggtgttcaccctacaagaaactgacagagtgccagctgaagaaccccatcagcgggctgttagaatatgcccagttcgctagtcaaacctgtgagttcaacatgatagagcagagtggaccaccccatgaacctcgatttaaattccaggttgtcatcaatggccgagagtttcccccagctgaagctggaagcaagaaagtggccaagcaggatgcagctatgaaagccatgacaattctgctagaggaagccaaagccaaggacagtggaaaatcagaagaatcatcccactattccacagagaaagaatcagagaagactgcagagtcccagacccccaccccttcagccacatccttcttttctgggaagagccccgtcaccacactgcttgagtgtatgcacaaattggggaactcctgcgaattccgtctcctgtccaaagaaggccctgcccatgaacccaagttccaatactgtgttgcagtgggagcccaaactttccccagtgtgagtgctcccagcaagaaagtggcaaagcagatggccgcagaggaagccatgaaggccctgcatggggaggcgaccaactccatggcttctgataaccagcctgaaggtatgatctcagagtcacttgataacttggaatccatgatgcccaacaaggtcaggaagattggcgagctcgtgagatacctgaacaccaaccctgtgggtggccttttggagtacgcccgctcccatggctttgctgctgaattcaagttggtcgaccagtccggacctcctcacgagcccaagttcgtttaccaagcaaaagttgggggtcgctggttcccagccgtctgcgcacacagcaagaagcaaggcaagcaggaagcagcagatgcggctctccgtgtcttgattggggagaacgagaaggcagaacgcatgggtttcacagaggtaaccccagtgacaggggccagtctcagaagaactatgctcctcctctcaaggtccccagaagcacagccaaagacagttaagacgtctacttttggtgccttttttggggggggggggtcctcctaactcctaagtggaggtggctcttgctgtcatgcgagttattcctaggctttactcttagcctcgagagagcagtaactgggacactagatgtaagaaggaaaagatgactcacacgacaagtagagcttgatctccctgcccacggtgaatatggtggacacagcctcagctttgtggtgctgacacagcctcttttccccacactccctctcactggcagcaccttccatgaccagatagccatgctgagccaccggtgcttcaacactctgactaacagcttccagccctccttgctcggccgcaagattctggccgccatcattatgaaaaaagactctgaggacatgggtgtcgtcgtcagcttgggaacagggaatcgctgtgtgaaaggagattctctcagcctaaaaggagaaactgtcaatgactgccatgcagaaataatctcccggagaggcttcatcaggtttctctacagtgagttaatgaaatacaactcccagactgcgaaggatagtatatttgaacctgctaagggaggagaaaagctccaaataaaaaagactgtgtcattccatctgtatatcagcactgctccgtgtggagatggcgccctctttgacaagtcctgcagcgaccgtgctatggaaagcacagaatcccgccactaccctgtcttcgagaatcccaaacaaggaaagctccgcaccaaggtggagaacggagaaggcacaatccctgtggaatccagtgacattgtgcctacgtgggatggcattcggctcggggagagactccgtaccatgtcctgtagtgacaaaatcctacgctggaacgtgctgggcctgcaaggggcactgttgacccacttcctgcagcccatttatctcaaatctgtcacattgggttaccttttcagccaagggcatctgacccgtgctatttgctgtcgtgtgacaagagatgggagtgcatttgaggatggactacgacatccctttattgtcaaccaccccaaggttggcagagtcagcatatatgattccaaaaggcaatccgggaagactaaggagacaagcgtcaactggtgtctggctgatggctatgacctggagatcctggacggtaccagaggcactgtggatgggccacggaatgaattgtcccgggtctccaaaaagaacatttttcttctatttaagaagctctgctccttccgttaccgcagggatctactgagactctcctatggtgaggccaagaaagctgcccgtgactacgagacggccaagaactacttcaaaaaaggcctgaaggatatgggctatgggaactggattagcaaaccccaggaggaaaagaacttttatctctgcccagtatagtatgctccagtgacagatggattagggtgtgtcatactagggtgtgagagaggtaggtcgtagcattcctcatcacatggtcaggggatttttttttctcctttttttttctttttaagccataattggtgatactgaaaactttgggttcccatttatcctgctttctttgggattgctaggcaaggtctggccaggccccccttttttcccccaagtgaagaggcagaaacctaagaagttatcttttctttctacccaaagcatacatagtcactgagcacctgcggtccatttcctcttaaaagttttgttttgatttgtttccatttcctttccctttgtgtttgctacactgacctcttgcggtcttgattaggtttcagtcaactctggatcatgtcagggactgataatttcatttgtggattacgcagacccctctacttcccctctttcccttctgagattctttccttgtgatctgaatgtctccttttccccctcagagggcaaagaggtgaacataaaggatttggtgaaacatttgtaagggtaggagttgaaaactgcagttcccagtgccacggaagtgtgattggagcctgcagataatgcccagccatcctcccatcctgcactttagccagctgcagggcgggcaaggcaaggaaagctgcttccctggaagtgtatcactttctccggcagctgggaagtctagaaccagccagactgggttaagggagctgctcaagcaatagcagaggtttcacccggcaggatgacacagaccacttcccagggagcacgggcatgccttggaatattgccaagcttccagctgcctcttctcctaaagcattcctaggaatattttccccgccaatgctgggcgtacaccctagccaacgggacaaatcctagagggtataaaatcatctctgctcagataatcatgacttagcaagaataagggcaaaaaatcctgttggcttaacgtcactgttccacctggtgtaatatctctcatgacagtgacaccaagggaagttgactaagtcacatgtaaattaggagtgttttaaagaatgccatagatgttgattcttaactgctacagataacctgtaattgagcagatttaaaattcaggcatacttttccatttatccaagtgctttcatttttccagatggcttcagaagtaggctcgtgggcagggcgcagacctgatctttatagggttgacatagaaagcagtagttgtgggtgaaagggcaggttgtcttcaaactctgtgaggtagaatcctttgtctatacctccatgaacattgactcgtgtgttcagagcctttggcctctctgtggagtctggctctctggctcctgtgcattctttgaatagtcactcgtaaaaactgtcagtgcttgaaactgtttcctttactcatgttgaagggactttgttggcttttagagtgttggtcatgactccaagagcagagcagggaagagcccaagcatagacttggtgccgtggtgatggctgcagtccagttttgtgatgctgcttttacgtgtccctcgataacagtcagctagacacactcaggaggactactgaggctctgcgaccttcaggagctgagcctgcctctctcctttagatgacagaccttcatctgggaacgtgctgagccagcaccctcagatgatttccctccaaactgctgactaggtcatcctctgtctggtagagacattcacatctttgcttttattctatgctctctgtacttttgaccaaaaattgaccaaagtaagaaaatgcaagttctaaaaatagactaaggatgcctttgcagaacaccaaagcatcccaaggaactggtagggaagtggcgcctgtctcctggagtggaagaggcctgctccctggctctgggtctgctgggggcacagtaaatcagtcttggcacccacatccagggcagagaggtctgtggttctcagcatcagaaggcagcgcagcccctctcctcttcaggctacagggttgtcacctgctgagtcctcaggttgtttggcctctctggtccatcttgggcattaggttctccagcagagctctggccagctgcctcttctttaactgggaacacaggctctcacaagatcagaacccccactcacccccaagatcttatctagcaagcctgtagtattcagtttctgttgtaggaagagagcgaggcatccctgaattccacgcatctgctggaaacgagccgtgtcagatcgcacatccctgcgcccccatgcccccatgcccctctgagtcacacaggacagaggaggcagagcttctgcccactgttatcttcactttctttgtccagtcttttgtttttaataagcagtgaccctccctactcttctttttaatgatttttgtagttgatttgtctgaactgtggctactgtgcattccttgaataatcacttgtaaaaattgtcagtgcttgaagctgtttcctttactcacattgaagggacttcgttggttttttggagtcttggttgtgactccaagagcagagtgaggaagacccccaagcatagactcgggtactgtgatgatggctgcagtccagttttatgattctgcttttatgtgtcccttgataacagtgacttaacaatatacattcctcataaataaaaaaaaaacaagaatctgaa

SEQ ID NO: 74215 - DNA, 6779 bp, Homo sapiens
  misc_feature (17)..(17): n is a, c, g, or t
  misc_feature (24)..(24): n is a, c, g, or t
  misc_feature (26)..(27): n is a, c, g, or t
gggggggggagggctcncggccgnannggcagcctccgggtgtccggccgtgtcccgaggaagtgcaagacccggggtattccctcagcggatactacacccatccatttcaaggctatgagcacagacagctcagataccagcagcctgggccaggatcttcccccagtagtttcctgcttaagcaaatagaatttctcaaggggcagctcccagaagcaccggtgattggaaagcagacaccgtcactgccaccttccctcccaggactccggccaaggtttccagtactacttgcctccagtaccagaggcaggcaagtggacatcaggggtgtccccaggggcgtgcatctcggaagtcaggggctccagagagggttccagcatccttcaccacgtggcaggagtctgccacagagaggtgttgattgcctttcctcacatttccaggaactgagtatctaccaagatcaggaacaaaggatcttaaagttcctggaagagcttggggaagggaaggccaccacagcacatgatctgtctgggaaacttgggactccgaagaaagaaatcaatcgagttttatactccctggcaaagaagggcaagctacagaaagaggcaggaacaccccctttgtggaaaatcgcggtctccactcaggcttggaaccagcacagcggagtggtaagaccagacggtcatagccaaggagccccaaactcagacccgagtttggaaccggaagacagaaactccacatctgtctcagaagatcttcttgagccttttattgcagtctcagctcaggcttggaaccagcacagcggagtggtaagaccagacagtcatagccaaggatccccaaactcagacccaggtttggaacctgaagacagcaactccacatctgccttggaagatcctcttgagtttttagacatggccgagatcaaggagaaaatctgcgactatctcttcaatgtgtctgactcctctgccctgaatttggctaaaaatattggccttaccaaggcccgagatataaatgctgtgctaattgacatggaaaggcagggggatgtctatagacaagggacaacccctcccatatggcatttgacagacaagaagcgagagaggatgcaaatcaagagaaatacgaacagtgttcctgaaaccgctccagctgcaatccctgagaccagaagaaacgcagagttcctcacctgtaatatacccacatcaaatgcctcaaataacatggtaaccacagaaaaagtggagaatgggcaggaacctgtcataaagttagaaaacaggcaagaggccagaccagaaccagcaagactgaaaccacctgttcattacaatggcccctcaaaagcagggtatgttgactttgaaaatggccagtgggccacagatgacatcccagatgacttgaatagtatccgcgcagcaccaggtgagtttcgagccatcatggagatgccctccttctacagtcatggcttgccacggtgttcaccctacaagaaactgacagagtgccagctgaagaaccccatcagcgggctgttagaatatgcccagttcgctagtcaaacctgtgagttcaacatgatagagcagagtggaccaccccatgaacctcgatttaaattccaggttgtcatcaatggccgagagtttcccccagctgaagctggaagcaagaaagtggccaagcaggatgcagctatgaaagccatgacaattctgctagaggaagccaaagccaaggacagtggaaaatcagaagaatcatcccactattccacagagaaagaatcagagaagactgcagagtcccagacccccaccccttcagccacatccttcttttctgggaagagccccgtcaccacactgcttgagtgtatgcacaaattggggaactcctgcgaattccgtctcctgtccaaagaaggccctgcccatgaacccaagttccaatactgtgttgcagtgggagcccaaactttccccagtgtgagtgctcccagcaagaaagtggcaaagcagatggccgcagaggaagccatgaaggccctgcatggggaggcgaccaactccatggcttctgataaccagcctgaaggtatgatctcagagtcacttgataacttggaatccatgatgcccaacaaggtcaggaagattggcgagctcgtgagatacctgaacaccaaccctgtgggtggccttttggagtacgcccgctcccatggctttgctgctgaattcaagttggtcgaccagtccggacctcctcacgagcccaagttcgtttaccaagcaaaagttgggggtcgctggttcccagccgtctgcgcacacagcaagaagcaaggcaagcaggaagcagcagatgcggctctccgtgtcttgattggggagaacgagaaggcagaacgcatgggtttcacagaggtaaccccagtgacaggggccagtctcagaagaactatgctcctcctctcaaggtccccagaagcacagccaaagacactccctctcactggcagcaccttccatgaccagatagccatgctgagccaccggtgcttcaacactctgactaacagcttccagccctccttgctcggccgcaagattctggccgccatcattatgaaaaaagactctgaggacatgggtgtcgtcgtcagcttgggaacagggaatcgctgtgtgaaaggagattctctcagcctaaaaggagaaactgtcaatgactgccatgcagaaataatctcccggagaggcttcatcaggtttctctacagtgagttaatgaaatacaactcccagactgcgaaggatagtatatttgaacctgctaagggaggagaaaagctccaaataaaaaagactgtgtcattccatctgtatatcaggtctgtacagttcctgttgctgccagggtgggccctgccaggctgttagaattgggtatccaaatgctctcctggcctgtaaatcgaacctgatacaataagccacactccactgtgggtttgaggtccatattcaggcgtagataactcacatgtactgctgtccacctccagtctcccatggtaggccttagaaaacatcccttgcctctgtcacatctgactgttttggagccccacgaaattgcagatttcccacaggtgagttttaacagccacccctgtttttcagcactgctccgtgtggagatggcgccctctttgacaagtcctgcagcgaccgtgctatggaaagcacagaatcccgccactaccctgtcttcgagaatcccaaacaaggaaagctccgcaccaaggtggagaacggagaaggcacaatccctgtggaatccagtgacattgtgcctacgtgggatggcattcggctcggggagagactccgtaccatgtcctgtagtgacaaaatcctacgctggaacgtgctgggcctgcaaggggcactgttgacccacttcctgcagcccatttatctcaaatctgtcacattgggttaccttttcagccaagggcatctgacccgtgctatttgctgtcgtgtgacaagagatgggagtgcatttgaggatggactacgacatccctttattgtcaaccaccccaaggttggcagagtcagcatatatgattccaaaaggcaatccgggaagactaaggagacaagcgtcaactggtgtctggctgatggctatgacctggagatcctggacggtaccagaggcactgtggatgggccacggaatgaattgtcccgggtctccaaaaagaacatttttcttctatttaagaagctctgctccttccgttaccgcagggatctactgagactctcctatggtgaggccaagaaagctgcccgtgactacgagacggccaagaactacttcaaaaaaggcctgaaggatatgggctatgggaactggattagcaaaccccaggaggaaaagaacttttatctctgcccagtatagtatgctccagtgacagatggattagggtgtgtcatactagggtgtgagagaggtaggtcgtagcattcctcatcacatggtcaggggatttttttttctcctttttttttctttttaagccataattggtgatactgaaaactttgggttcccatttatcctgctttctttgggattgctaggcaaggtctggccaggccccccttttttcccccaagtgaagaggcagaaacctaagaagttatcttttctttctacccaaagcatacatagtcactgagcacctgcggtccatttcctcttaaaagttttgttttgatttgtttccatttcctttccctttgtgtttgctacactgacctcttgcggtcttgattaggtttcagtcaactctggatcatgtcagggactgataatttcatttgtggattacgcagacccctctacttcccctctttcccttctgagattctttccttgtgatctgaatgtctccttttccccctcagagggcaaagaggtgaacataaaggatttggtgaaacatttgtaagggtaggagttgaaaactgcagttcccagtgccacggaagtgtgattggagcctgcagataatgcccagccatcctcccatcctgcactttagccagctgcagggcgggcaaggcaaggaaagctgcttccctggaagtgtatcactttctccggcagctgggaagtctagaaccagccagactgggttaagggagctgctcaagcaatagcagaggtttcacccggcaggatgacacagaccacttcccagggagcacgggcatgccttggaatattgccaagcttccagctgcctcttctcctaaagcattcctaggaatattttccccgccaatgctgggcgtacaccctagccaacgggacaaatcctagagggtataaaatcatctctgctcagataatcatgacttagcaagaataagggcaaaaaatcctgttggcttaacgtcactgttccacctggtgtaatatctctcatgacagtgacaccaagggaagttgactaagtcacatgtaaattaggagtgttttaaagaatgccatagatgttgattcttaactgctacagataacctgtaattgagcagatttaaaattcaggcatacttttccatttatccaagtgctttcatttttccagatggcttcagaagtaggctcgtgggcagggcgcagacctgatctttatagggttgacatagaaagcagtagttgtgggtgaaagggcaggttgtcttcaaactctgtgaggtagaatcctttgtctatacctccatgaacattgactcgtgtgttcagagcctttggcctctctgtggagtctggctctctggctcctgtgcattctttgaatagtcactcgtaaaaactgtcagtgcttgaaactgtttcctttactcatgttgaagggactttgttggcttttagagtgttggtcatgactccaagagcagagcagggaagagcccaagcatagacttggtgccgtggtgatggctgcagtccagttttgtgatgctgcttttacgtgtccctcgataacagtcagctagacacactcaggaggactactgaggctctgcgaccttcaggagctgagcctgcctctctcctttagatgacagaccttcatctgggaacgtgctgagccagcaccctcagatgatttccctccaaactgctgactaggtcatcctctgtctggtagagacattcacatctttgcttttattctatgctctctgtacttttgaccaaaaattgaccaaagtaagaaaatgcaagttctaaaaatagactaaggatgcctttgcagaacaccaaagcatcccaaggaactggtagggaagtggcgcctgtctcctggagtggaagaggcctgctccctggctctgggtctgctgggggcacagtaaatcagtcttggcacccacatccagggcagagaggtctgtggttctcagcatcagaaggcagcgcagcccctctcctcttcaggctacagggttgtcacctgctgagtcctcaggttgtttggcctctctggtccatcttgggcattaggttctccagcagagctctggccagctgcctcttctttaactgggaacacaggctctcacaagatcagaacccccactcacccccaagatcttatctagcaagcctgtagtattcagtttctgttgtaggaagagagcgaggcatccctgaattccacgcatctgctggaaacgagccgtgtcagatcgcacatccctgcgcccccatgcccccatgcccctctgagtcacacaggacagaggaggcagagcttctgcccactgttatcttcactttctttgtccagtcttttgtttttaataagcagtgaccctccctactcttctttttaatgatttttgtagttgatttgtctgaactgtggctactgtgcattccttgaataatcacttgtaaaaattgtcagtgcttgaagctgtttcctttactcacattgaagggacttcgttggttttttggagtcttggttgtgactccaagagcagagtgaggaagacccccaagcatagactcgggtactgtgatgatggctgcagtccagttttatgattctgcttttatgtgtcccttgataacagtgacttaacaatatacattcctcataaataaaaaaaaaacaagaatctgaa

SEQ ID NO: 74216 - DNA, 4156 bp, Homo sapiens
  misc_feature (17)..(17): n is a, c, g, or t
  misc_feature (24)..(24): n is a, c, g, or t
  misc_feature (26)..(27): n is a, c, g, or t
gggggggggagggctcncggccgnannggcagcctccgggtgtccggccgtgtcccgaggaagtgcaagacccggggtattccctcagcggatactacacccatccatttcaaggctatgagcacagacagctcagataccagcagcctgggccaggatcttcccccagtagtttcctgcttaagcaaatagaatttctcaaggggcagctcccagaagcaccgctccctctcactggcagcaccttccatgaccagatagccatgctgagccaccggtgcttcaacactctgactaacagcttccagccctccttgctcggccgcaagattctggccgccatcattatgaaaaaagactctgaggacatgggtgtcgtcgtcagcttgggaacagggaatcgctgtgtgaaaggagattctctcagcctaaaaggagaaactgtcaatgactgccatgcagaaataatctcccggagaggcttcatcaggtttctctacagtgagttaatgaaatacaactcccagactgcgaaggatagtatatttgaacctgctaagggaggagaaaagctccaaataaaaaagactgtgtcattccatctgtatatcagcactgctccgtgtggagatggcgccctctttgacaagtcctgcagcgaccgtgctatggaaagcacagaatcccgccactaccctgtcttcgagaatcccaaacaaggaaagctccgcaccaaggtggagaacggagaaggcacaatccctgtggaatccagtgacattgtgcctacgtgggatggcattcggctcggggagagactccgtaccatgtcctgtagtgacaaaatcctacgctggaacgtgctgggcctgcaaggggcactgttgacccacttcctgcagcccatttatctcaaatctgtcacattgggttaccttttcagccaagggcatctgacccgtgctatttgctgtcgtgtgacaagagatgggagtgcatttgaggatggactacgacatccctttattgtcaaccaccccaaggttggcagagtcagcatatatgattccaaaaggcaatccgggaagactaaggagacaagcgtcaactggtgtctggctgatggctatgacctggagatcctggacggtaccagaggcactgtggatgggccacggaatgaattgtcccgggtctccaaaaagaacatttttcttctatttaagaagctctgctccttccgttaccgcagggatctactgagactctcctatggtgaggccaagaaagctgcccgtgactacgagacggccaagaactacttcaaaaaaggcctgaaggatatgggctatgggaactggattagcaaaccccaggaggaaaagaacttttatctctgcccagtatagtatgctccagtgacagatggattagggtgtgtcatactagggtgtgagagaggtaggtcgtagcattcctcatcacatggtcaggggatttttttttctcctttttttttctttttaagccataattggtgatactgaaaactttgggttcccatttatcctgctttctttgggattgctaggcaaggtctggccaggccccccttttttcccccaagtgaagaggcagaaacctaagaagttatcttttctttctacccaaagcatacatagtcactgagcacctgcggtccatttcctcttaaaagttttgttttgatttgtttccatttcctttccctttgtgtttgctacactgacctcttgcggtcttgattaggtttcagtcaactctggatcatgtcagggactgataatttcatttgtggattacgcagacccctctacttcccctctttcccttctgagattctttccttgtgatctgaatgtctccttttccccctcagagggcaaagaggtgaacataaaggatttggtgaaacatttgtaagggtaggagttgaaaactgcagttcccagtgccacggaagtgtgattggagcctgcagataatgcccagccatcctcccatcctgcactttagccagctgcagggcgggcaaggcaaggaaagctgcttccctggaagtgtatcactttctccggcagctgggaagtctagaaccagccagactgggttaagggagctgctcaagcaatagcagaggtttcacccggcaggatgacacagaccacttcccagggagcacgggcatgccttggaatattgccaagcttccagctgcctcttctcctaaagcattcctaggaatattttccccgccaatgctgggcgtacaccctagccaacgggacaaatcctagagggtataaaatcatctctgctcagataatcatgacttagcaagaataagggcaaaaaatcctgttggcttaacgtcactgttccacctggtgtaatatctctcatgacagtgacaccaagggaagttgactaagtcacatgtaaattaggagtgttttaaagaatgccatagatgttgattcttaactgctacagataacctgtaattgagcagatttaaaattcaggcatacttttccatttatccaagtgctttcatttttccagatggcttcagaagtaggctcgtgggcagggcgcagacctgatctttatagggttgacatagaaagcagtagttgtgggtgaaagggcaggttgtcttcaaactctgtgaggtagaatcctttgtctatacctccatgaacattgactcgtgtgttcagagcctttggcctctctgtggagtctggctctctggctcctgtgcattctttgaatagtcactcgtaaaaactgtcagtgcttgaaactgtttcctttactcatgttgaagggactttgttggcttttagagtgttggtcatgactccaagagcagagcagggaagagcccaagcatagacttggtgccgtggtgatggctgcagtccagttttgtgatgctgcttttacgtgtccctcgataacagtcagctagacacactcaggaggactactgaggctctgcgaccttcaggagctgagcctgcctctctcctttagatgacagaccttcatctgggaacgtgctgagccagcaccctcagatgatttccctccaaactgctgactaggtcatcctctgtctggtagagacattcacatctttgcttttattctatgctctctgtacttttgaccaaaaattgaccaaagtaagaaaatgcaagttctaaaaatagactaaggatgcctttgcagaacaccaaagcatcccaaggaactggtagggaagtggcgcctgtctcctggagtggaagaggcctgctccctggctctgggtctgctgggggcacagtaaatcagtcttggcacccacatccagggcagagaggtctgtggttctcagcatcagaaggcagcgcagcccctctcctcttcaggctacagggttgtcacctgctgagtcctcaggttgtttggcctctctggtccatcttgggcattaggttctccagcagagctctggccagctgcctcttctttaactgggaacacaggctctcacaagatcagaacccccactcacccccaagatcttatctagcaagcctgtagtattcagtttctgttgtaggaagagagcgaggcatccctgaattccacgcatctgctggaaacgagccgtgtcagatcgcacatccctgcgcccccatgcccccatgcccctctgagtcacacaggacagaggaggcagagcttctgcccactgttatcttcactttctttgtccagtcttttgtttttaataagcagtgaccctccctactcttctttttaatgatttttgtagttgatttgtctgaactgtggctactgtgcattccttgaataatcacttgtaaaaattgtcagtgcttgaagctgtttcctttactcacattgaagggacttcgttggttttttggagtcttggttgtgactccaagagcagagtgaggaagacccccaagcatagactcgggtactgtgatgatggctgcagtccagttttatgattctgcttttatgtgtcccttgataacagtgacttaacaatatacattcctcataaataaaaaaaaaacaagaatctgaa

SEQ ID NO: 74217 - DNA, 6433 bp, Homo sapiens
  misc_feature (17)..(17): n is a, c, g, or t
  misc_feature (24)..(24): n is a, c, g, or t
  misc_feature (26)..(27): n is a, c, g, or t
gggggggggagggctcncggccgnannggcagcctccgggtgtccggccgtgtcccgaggaagtgcaagacccggggtattccctcagcggatactacacccatccatttcaaggctatgagcacagacagctcagataccagcagcctgggccaggatcttcccccagtagtttcctgcttaagcaaatagaatttctcaaggggcagctcccagaagcaccggtgattggaaagcagacaccgtcactgccaccttccctcccaggactccggccaaggtttccagtactacttgcctccagtaccagaggcaggcaagtggacatcaggggtgtccccaggggcgtgcatctcggaagtcaggggctccagagagggttccagcatccttcaccacgtggcaggagtctgccacagagaggtgttgattgcctttcctcacatttccaggaactgagtatctaccaagatcaggaacaaaggatcttaaagttcctggaagagcttggggaagggaaggccaccacagcacatgatctgtctgggaaacttgggactccgaagaaagaaatcaatcgagttttatactccctggcaaagaagggcaagctacagaaagaggcaggaacaccccctttgtggaaaatcgcggtctccactcaggcttggaaccagcacagcggagtggtaagaccagacggtcatagccaaggagccccaaactcagacccgagtttggaaccggaagacagaaactccacatctgtctcagaagatcttcttgagccttttattgcagtctcagctcaggcttggaaccagcacagcggagtggtaagaccagacagtcatagccaaggatccccaaactcagacccaggtttggaacctgaagacagcaactccacatctgccttggaagatcctcttgagtttttagacatggccgagatcaaggagaaaatctgcgactatctcttcaatgtgtctgactcctctgccctgaatttggctaaaaatattggccttaccaaggcccgagatataaatgctgtgctaattgacatggaaaggcagggggatgtctatagacaagggacaacccctcccatatggcatttgacagacaagaagcgagagaggatgcaaatcaagagaaatacgaacagtgttcctgaaaccgctccagctgcaatccctgagaccagaagaaacgcagagttcctcacctgtaatatacccacatcaaatgcctcaaataacatggtaaccacagaaaaagtggagaatgggcaggaacctgtcataaagttagaaaacaggcaagaggccagaccagaaccagcaagactgaaaccacctgttcattacaatggcccctcaaaagcagggtatgttgactttgaaaatggccagtgggccacagatgacatcccagatgacttgaatagtatccgcgcagcaccaggtgagtttcgagccatcatggagatgccctccttctacagtcatggcttgccacggtgttcaccctacaagaaactgacagagtgccagctgaagaaccccatcagcgggctgttagaatatgcccagttcgctagtcaaacctgtgagttcaacatgatagagcagagtggaccaccccatgaacctcgatttaaattccaggttgtcatcaatggccgagagtttcccccagctgaagctggaagcaagaaagtggccaagcaggatgcagctatgaaagccatgacaattctgctagaggaagccaaagccaaggacagtggaaaatcagaagaatcatcccactattccacagagaaagaatcagagaagactgcagagtcccagacccccaccccttcagccacatccttcttttctgggaagagccccgtcaccacactgcttgagtgtatgcacaaattggggaactcctgcgaattccgtctcctgtccaaagaaggccctgcccatgaacccaagttccaatactgtgttgcagtgggagcccaaactttccccagtgtgagtgctcccagcaagaaagtggcaaagcagatggccgcagaggaagccatgaaggccctgcatggggaggcgaccaactccatggcttctgataaccagcctgaaggtatgatctcagagtcacttgataacttggaatccatgatgcccaacaaggtcaggaagattggcgagctcgtgagatacctgaacaccaaccctgtgggtggccttttggagtacgcccgctcccatggctttgctgctgaattcaagttggtcgaccagtccggacctcctcacgagcccaagttcgtttaccaagcaaaagttgggggtcgctggttcccagccgtctgcgcacacagcaagaagcaaggcaagcaggaagcagcagatgcggctctccgtgtcttgattggggagaacgagaaggcagaacgcatgggtttcacagaggtaaccccagtgacaggggccagtctcagaagaactatgctcctcctctcaaggtccccagaagcacagccaaagacactccctctcactggcagcaccttccatgaccagatagccatgctgagccaccggtgcttcaacactctgactaacagcttccagccctccttgctcggccgcaagattctggccgccatcattatgaaaaaagactctgaggacatgggtgtcgtcgtcagcttgggaacagggaatcgctgtgtgaaaggagattctctcagcctaaaaggagaaactgtcaatgactgccatgcagaaataatctcccggagaggcttcatcaggtttctctacagtgagttaatgaaatacaactcccagactgcgaaggatagtatatttgaacctgctaagggaggagaaaagctccaaataaaaaagactgtgtcattccatctgtatatcagcactgctccgtgtggagatggcgccctctttgacaagtcctgcagcgaccgtgctatggaaagcacagaatcccgccactaccctgtcttcgagaatcccaaacaaggaaagctccgcaccaaggtggagaacggagaaggcacaatccctgtggaatccagtgacattgtgcctacgtgggatggcattcggctcggggagagactccgtaccatgtcctgtagtgacaaaatcctacgctggaacgtgctgggcctgcaaggggcactgttgacccacttcctgcagcccatttatctcaaatctgtcacattgggttaccttttcagccaagggcatctgacccgtgctatttgctgtcgtgtgacaagagatgggagtgcatttgaggatggactacgacatccctttattgtcaaccaccccaaggttggcagagtcagcatatatgattccaaaaggcaatccgggaagactaaggagacaagcgtcaactggtgtctggctgatggctatgacctggagatcctggacggtaccagaggcactgtggatgggccacggaatgaattgtcccgggtctccaaaaagaacatttttcttctatttaagaagctctgctccttccgttaccgcagggatctactgagactctcctatggtgaggccaagaaagctgcccgtgactacgagacggccaagaactacttcaaaaaaggcctgaaggatatgggctatgggaactggattagcaaaccccaggaggaaaagaacttttatctctgcccagtatagtatgctccagtgacagatggattagggtgtgtcatactagggtgtgagagaggtaggtcgtagcattcctcatcacatggtcaggggatttttttttctcctttttttttctttttaagccataattggtgatactgaaaactttgggttcccatttatcctgctttctttgggattgctaggcaaggtctggccaggccccccttttttcccccaagtgaagaggcagaaacctaagaagttatcttttctttctacccaaagcatacatagtcactgagcacctgcggtccatttcctcttaaaagttttgttttgatttgtttccatttcctttccctttgtgtttgctacactgacctcttgcggtcttgattaggtttcagtcaactctggatcatgtcagggactgataatttcatttgtggattacgcagacccctctacttcccctctttcccttctgagattctttccttgtgatctgaatgtctccttttccccctcagagggcaaagaggtgaacataaaggatttggtgaaacatttgtaagggtaggagttgaaaactgcagttcccagtgccacggaagtgtgattggagcctgcagataatgcccagccatcctcccatcctgcactttagccagctgcagggcgggcaaggcaaggaaagctgcttccctggaagtgtatcactttctccggcagctgggaagtctagaaccagccagactgggttaagggagctgctcaagcaatagcagaggtttcacccggcaggatgacacagaccacttcccagggagcacgggcatgccttggaccccgccaatgctgggcgtacaccctagccaacgggacaaatcctagagggtataaaatcatctctgctcagataatcatgacttagcaagaataagggcaaaaaatcctgttggcttaacgtcactgttccacctggtgtaatatctctcatgacagtgacaccaagggaagttgactaagtcacatgtaaattaggagtgttttaaagaatgccatagatgttgattcttaactgctacagataacctgtaattgagcagatttaaaattcaggcatacttttccatttatccaagtgctttcatttttccagatggcttcagaagtaggctcgtgggcagggcgcagacctgatctttatagggttgacatagaaagcagtagttgtgggtgaaagggcaggttgtcttcaaactctgtgaggtagaatcctttgtctatacctccatgaacattgactcgtgtgttcagagcctttggcctctctgtggagtctggctctctggctcctgtgcattctttgaatagtcactcgtaaaaactgtcagtgcttgaaactgtttcctttactcatgttgaagggactttgttggcttttagagtgttggtcatgactccaagagcagagcagggaagagcccaagcatagacttggtgccgtggtgatggctgcagtccagttttgtgatgctgcttttacgtgtccctcgataacagtcagctagacacactcaggaggactactgaggctctgcgaccttcaggagctgagcctgcctctctcctttagatgacagaccttcatctgggaacgtgctgagccagcaccctcagatgatttccctccaaactgctgactaggtcatcctctgtctggtagagacattcacatctttgcttttattctatgctctctgtacttttgaccaaaaattgaccaaagtaagaaaatgcaagttctaaaaatagactaaggatgcctttgcagaacaccaaagcatcccaaggaactggtagggaagtggcgcctgtctcctggagtggaagaggcctgctccctggctctgggtctgctgggggcacagtaaatcagtcttggcacccacatccagggcagagaggtctgtggttctcagcatcagaaggcagcgcagcccctctcctcttcaggctacagggttgtcacctgctgagtcctcaggttgtttggcctctctggtccatcttgggcattaggttctccagcagagctctggccagctgcctcttctttaactgggaacacaggctctcacaagatcagaacccccactcacccccaagatcttatctagcaagcctgtagtattcagtttctgttgtaggaagagagcgaggcatccctgaattccacgcatctgctggaaacgagccgtgtcagatcgcacatccctgcgcccccatgcccccatgcccctctgagtcacacaggacagaggaggcagagcttctgcccactgttatcttcactttctttgtccagtcttttgtttttaataagcagtgaccctccctactcttctttttaatgatttttgtagttgatttgtctgaactgtggctactgtgcattccttgaataatcacttgtaaaaattgtcagtgcttgaagctgtttcctttactcacattgaagggacttcgttggttttttggagtcttggttgtgactccaagagcagagtgaggaagacccccaagcatagactcgggtactgtgatgatggctgcagtccagttttatgattctgcttttatgtgtcccttgataacagtgacttaacaatatacattcctcataaataaaaaaaaaacaagaatctgaa

SEQ ID NO: 74218 - DNA, 2977 bp, Homo sapiens
aaagcaaggctgtacgcccggaattagggatttttcttctatttaagaagctctgctccttccgttaccgcagggatctactgagactctcctatggtgaggccaagaaagctgcccgtgactacgagacggccaagaactacttcaaaaaaggcctgaaggatatgggctatgggaactggattagcaaaccccaggaggaaaagaacttttatctctgcccagtatagtatgctccagtgacagatggattagggtgtgtcatactagggtgtgagagaggtaggtcgtagcattcctcatcacatggtcaggggatttttttttctcctttttttttctttttaagccataattggtgatactgaaaactttgggttcccatttatcctgctttctttgggattgctaggcaaggtctggccaggccccccttttttcccccaagtgaagaggcagaaacctaagaagttatcttttctttctacccaaagcatacatagtcactgagcacctgcggtccatttcctcttaaaagttttgttttgatttgtttccatttcctttccctttgtgtttgctacactgacctcttgcggtcttgattaggtttcagtcaactctggatcatgtcagggactgataatttcatttgtggattacgcagacccctctacttcccctctttcccttctgagattctttccttgtgatctgaatgtctccttttccccctcagagggcaaagaggtgaacataaaggatttggtgaaacatttgtaagggtaggagttgaaaactgcagttcccagtgccacggaagtgtgattggagcctgcagataatgcccagccatcctcccatcctgcactttagccagctgcagggcgggcaaggcaaggaaagctgcttccctggaagtgtatcactttctccggcagctgggaagtctagaaccagccagactgggttaagggagctgctcaagcaatagcagaggtttcacccggcaggatgacacagaccacttcccagggagcacgggcatgccttggaatattgccaagcttccagctgcctcttctcctaaagcattcctaggaatattttccccgccaatgctgggcgtacaccctagccaacgggacaaatcctagagggtataaaatcatctctgctcagataatcatgacttagcaagaataagggcaaaaaatcctgttggcttaacgtcactgttccacctggtgtaatatctctcatgacagtgacaccaagggaagttgactaagtcacatgtaaattaggagtgttttaaagaatgccatagatgttgattcttaactgctacagataacctgtaattgagcagatttaaaattcaggcatacttttccatttatccaagtgctttcatttttccagatggcttcagaagtaggctcgtgggcagggcgcagacctgatctttatagggttgacatagaaagcagtagttgtgggtgaaagggcaggttgtcttcaaactctgtgaggtagaatcctttgtctatacctccatgaacattgactcgtgtgttcagagcctttggcctctctgtggagtctggctctctggctcctgtgcattctttgaatagtcactcgtaaaaactgtcagtgcttgaaactgtttcctttactcatgttgaagggactttgttggcttttagagtgttggtcatgactccaagagcagagcagggaagagcccaagcatagacttggtgccgtggtgatggctgcagtccagttttgtgatgctgcttttacgtgtccctcgataacagtcagctagacacactcaggaggactactgaggctctgcgaccttcaggagctgagcctgcctctctcctttagatgacagaccttcatctgggaacgtgctgagccagcaccctcagatgatttccctccaaactgctgactaggtcatcctctgtctggtagagacattcacatctttgcttttattctatgctctctgtacttttgaccaaaaattgaccaaagtaagaaaatgcaagttctaaaaatagactaaggatgcctttgcagaacaccaaagcatcccaaggaactggtagggaagtggcgcctgtctcctggagtggaagaggcctgctccctggctctgggtctgctgggggcacagtaaatcagtcttggcacccacatccagggcagagaggtctgtggttctcagcatcagaaggcagcgcagcccctctcctcttcaggctacagggttgtcacctgctgagtcctcaggttgtttggcctctctggtccatcttgggcattaggttctccagcagagctctggccagctgcctcttctttaactgggaacacaggctctcacaagatcagaacccccactcacccccaagatcttatctagcaagcctgtagtattcagtttctgttgtaggaagagagcgaggcatccctgaattccacgcatctgctggaaacgagccgtgtcagatcgcacatccctgcgcccccatgcccccatgcccctctgagtcacacaggacagaggaggcagagcttctgcccactgttatcttcactttctttgtccagtcttttgtttttaataagcagtgaccctccctactcttctttttaatgatttttgtagttgatttgtctgaactgtggctactgtgcattccttgaataatcacttgtaaaaattgtcagtgcttgaagctgtttcctttactcacattgaagggacttcgttggttttttggagtcttggttgtgactccaagagcagagtgaggaagacccccaagcatagactcgggtactgtgatgatggctgcagtccagttttatgattctgcttttatgtgtcccttgataacagtgacttaacaatatacattcctcataaataaaaaaaaaacaagaatctgaa

SEQ ID NO: 74219 - DNA, 6522 bp, Homo sapiens
  misc_feature (17)..(17): n is a, c, g, or t
  misc_feature (24)..(24): n is a, c, g, or t
  misc_feature (26)..(27): n is a, c, g, or t
gggggggggagggctcncggccgnannggcagcctccgggtgtccggccgtgtcccgaggaagtgcaagacccggggtattccctcagcggatactacacccatccatttcaaggctatgagcacagacagctcagataccagcagcctgggccaggatcttcccccagtagtttcctgcttaagcaaatagaatttctcaaggggcagctcccagaagcaccggtgattggaaagcagacaccgtcactgccaccttccctcccaggactccggccaaggtttccagtactacttgcctccagtaccagaggcaggcaagtggacatcaggggtgtccccaggggcgtgcatctcggaagtcaggggctccagagagggttccagcatccttcaccacgtggcaggagtctgccacagagaggtgttgattgcctttcctcacatttccaggaactgagtatctaccaagatcaggaacaaaggatcttaaagttcctggaagagcttggggaagggaaggccaccacagcacatgatctgtctgggaaacttgggactccgaagaaagaaatcaatcgagttttatactccctggcaaagaagggcaagctacagaaagaggcaggaacaccccctttgtggaaaatcgcggtctccactcaggcttggaaccagcacagcggagtggtaagaccagacggtcatagccaaggagccccaaactcagacccgagtttggaaccggaagacagaaactccacatctgtctcagaagatcttcttgagccttttattgcagtctcagctcaggcttggaaccagcacagcggagtggtaagaccagacagtcatagccaaggatccccaaactcagacccaggtttggaacctgaagacagcaactccacatctgccttggaagatcctcttgagtttttagacatggccgagatcaaggagaaaatctgcgactatctcttcaatgtgtctgactcctctgccctgaatttggctaaaaatattggccttaccaaggcccgagatataaatgctgtgctaattgacatggaaaggcagggggatgtctatagacaagggacaacccctcccatatggcatttgacagacaagaagcgagagaggatgcaaatcaagagaaatacgaacagtgttcctgaaaccgctccagctgcaatccctgagaccagaagaaacgcagagttcctcacctgtaatatacccacatcaaatgcctcaaataacatggtaaccacagaaaaagtggagaatgggcaggaacctgtcataaagttagaaaacaggcaagaggccagaccagaaccagcaagactgaaaccacctgttcattacaatggcccctcaaaagcagggtatgttgactttgaaaatggccagtgggccacagatgacatcccagatgacttgaatagtatccgcgcagcaccaggtgagtttcgagccatcatggagatgccctccttctacagtcatggcttgccacggtgttcaccctacaagaaactgacagagtgccagctgaagaaccccatcagcgggctgttagaatatgcccagttcgctagtcaaacctgtgagttcaacatgatagagcagagtggaccaccccatgaacctcgatttaaattccaggttgtcatcaatggccgagagtttcccccagctgaagctggaagcaagaaagtggccaagcaggatgcagctatgaaagccatgacaattctgctagaggaagccaaagccaaggacagtggaaaatcagaagaatcatcccactattccacagagaaagaatcagagaagactgcagagtcccagacccccaccccttcagccacatccttcttttctgggaagagccccgtcaccacactgcttgagtgtatgcacaaattggggaactcctgcgaattccgtctcctgtccaaagaaggccctgcccatgaacccaagttccaatactgtgttgcagtgggagcccaaactttccccagtgtgagtgctcccagcaagaaagtggcaaagcagatggccgcagaggaagccatgaaggccctgcatggggaggcgaccaactccatggcttctgataaccagcctgaaggtatgatctcagagtcacttgataacttggaatccatgatgcccaacaaggtcaggaagattggcgagctcgtgagatacctgaacaccaaccctgtgggtggccttttggagtacgcccgctcccatggctttgctgctgaattcaagttggtcgaccagtccggacctcctcacgagcccaagttcgtttaccaagcaaaagttgggggtcgctggttcccagccgtctgcgcacacagcaagaagcaaggcaagcaggaagcagcagatgcggctctccgtgtcttgattggggagaacgagaaggcagaacgcatgggtttcacagaggtaaccccagtgacaggggccagtctcagaagaactatgctcctcctctcaaggtccccagaagcacagccaaagacactccctctcactggcagcaccttccatgaccagatagccatgctgagccaccggtgcttcaacactctgactaacagcttccagccctccttgctcggccgcaagattctggccgccatcattatgaaaaaagactctgaggacatgggtgtcgtcgtcagcttgggaacagggaatcgctgtgtgaaaggagattctctcagcctaaaaggagaaactgtcaatgactgccatgcagaaataatctcccggagaggcttcatcaggtttctctacagtgagttaatgaaatacaactcccagactgcgaaggatagtatatttgaacctgctaagggaggagaaaagctccaaataaaaaagactgtgtcattccatctgtatatcagcactgctccgtgtggagatggcgccctctttgacaagtcctgcagcgaccgtgctatggaaagcacagaatcccgccactaccctgtcttcgagaatcccaaacaaggaaagctccgcaccaaggtggagaacggagaaggcacaatccctgtggaatccagtgacattgtgcctacgtgggatggcattcggctcggggagagactccgtaccatgtcctgtagtgacaaaatcctacgctggaacgtgctgggcctgcaaggggcactgttgacccacttcctgcagcccatttatctcaaatctgtcacattgggttaccttttcagccaagggcatctgacccgtgctatttgctgtcgtgtgacaagagatgggagtgcatttgaggatggactacgacatccctttattgtcaaccaccccaaggttggcagagtcagcatatatgattccaaaaggcaatccgggaagactaaggagacaagcgtcaactggtgtctggctgatggctatgacctggagatcctggacggtaccagaggcactgtggatgggccacggaatgaattgtcccgggtctccaaaaagaacatttttcttctatttaagaagctctgctccttccgttaccgcagggatctactgagactctcctatggtgaggccaagaaagctgcccgtgactacgagacggccaagaactacttcaaaaaaggcctgaaggatatgggctatgggaactggattagcaaaccccaggaggaaaagaacttttatctctgcccagtatagtatgctccagtgacagatggattagggtgtgtcatactagggtgtgagagaggtaggtcgtagcattcctcatcacatggtcaggggatttttttttctcctttttttttctttttaagccataattggtgatactgaaaactttgggttcccatttatcctgctttctttgggattgctaggcaaggtctggccaggccccccttttttcccccaagtgaagaggcagaaacctaagaagttatcttttctttctacccaaagcatacatagtcactgagcacctgcggtccatttcctcttaaaagttttgttttgatttgtttccatttcctttccctttgtgtttgctacactgacctcttgcggtcttgattaggtttcagtcaactctggatcatgtcagggactgataatttcatttgtggattacgcagacccctctacttcccctctttcccttctgagattctttccttgtgatctgaatgtctccttttccccctcagagggcaaagaggtgaacataaaggatttggtgaaacatttgtaagggtaggagttgaaaactgcagttcccagtgccacggaagtgtgattggagcctgcagataatgcccagccatcctcccatcctgcactttagccagctgcagggcgggcaaggcaaggaaagctgcttccctggaagtgtatcactttctccggcagctgggaagtctagaaccagccagactgggttaagggagctgctcaagcaatagcagaggtttcacccggcaggatgacacagaccacttcccagggagcacgggcatgccttggaatattgccaagcttccagctgcctcttctcctaaagcattcctaggaatattttccccgccaatgctgggcgtacaccctagccaacgggacaaatcctagagggtataaaatcatctctgctcagataatcatgacttagcaagaataagggcaaaaaatcctgttggcttaacgtcactgttccacctggtgtaatatctctcatgacagtgacaccaagggaagttgactaagtcacatgtaaattaggagtgttttaaagaatgccatagatgttgattcttaactgctacagataacctgtaattgagcagatttaaaattcaggcatacttttccatttatccaagtgctttcatttttccagatggcttcagaagtaggctcgtgggcagggcgcagacctgatctttatagggttgacatagaaagcagtagttgtgggtgaaagggcaggttgtcttcaaactctgtgaggtagaatcctttgtctatacctccatgaacattgactcgtgtgttcagagcctttggcctctctgtggagtctggctctctggctcctgtgcattctttgaatagtcactcgtaaaaactgtcagtgcttgaaactgtttcctttactcatgttgaagggactttgttggcttttagagtgttggtcatgactccaagagcagagcagggaagagcccaagcatagacttggtgccgtggtgatggctgcagtccagttttgtgatgctgcttttacgtgtccctcgataacagtcagctagacacactcaggaggactactgaggctctgcgaccttcaggagctgagcctgcctctctcctttagatgacagaccttcatctgggaacgtgctgagccagcaccctcagatgatttccctccaaactgctgactaggtcatcctctgtctggtagagacattcacatctttgcttttattctatgctctctgtacttttgaccaaaaattgaccaaagtaagaaaatgcaagttctaaaaatagactaaggatgcctttgcagaacaccaaagcatcccaaggaactggtagggaagtggcgcctgtctcctggagtggaagaggcctgctccctggctctgggtctgctgggggcacagtaaatcagtcttggcacccacatccagggcagagaggtctgtggttctcagcatcagaaggcagcgcagcccctctcctcttcaggctacagggttgtcacctgctgagtcctcaggttgtttggcctctctggtccatcttgggcattaggttctccagcagagctctggccagctgcctcttctttaactgggaacacaggctctcacaagatcagaacccccactcacccccaagatcttatctagcaagcctgtagtattcagtttctgttgtaggaagagagcgaggcatccctgaattccacgcatctgctggaaacgagccgtgtcagatcgcacatccctgcgcccccatgcccccatgcccctctgagtcacacaggacagaggaggcagagcttctgcccactgttatcttcactttctttgtccagtcttttgtttttaataagcagtgaccctccctactcttctttttaatgatttttgtagttgatttgtctgaactgtggctactgtgcattccttgaataatcacttgtaaaaattgtcagtgcttgaagctgtttcctttactcacattgaagggacttcgttggttttttggagtcttggttgtgactccaagagcagagtgaggaagacccccaagcatagactcgggtactgtgatgatggctgcagtccagttttatgattctgcttttatgtgtcccttgataacagtgacttaacaatatacattcctcataaataaaaaaaaaacaagaatctgaaacactcggcattatttgttttcttcttttcttctt

SEQ ID NO: 74220 - DNA, 2064 bp, Homo sapiens
tctagaggatccctgtggagccttaaccctgggaagtctagaaccagccagactgggttaagggagctgctcaagcaatagcagaggtttcacccggcaggatgacacagaccacttcccagggagcacgggcatgccttggaatattgccaagcttccagctgcctcttctcctaaagcattcctaggaatattttccccgccaatgctgggcgtacaccctagccaacgggacaaatcctagagggtataaaatcatctctgctcagataatcatgacttagcaagaataagggcaaaaaatcctgttggcttaacgtcactgttccacctggtgtaatatctctcatgacagtgacaccaagggaagttgactaagtcacatgtaaattaggagtgttttaaagaatgccatagatgttgattcttaactgctacagataacctgtaattgagcagatttaaaattcaggcatacttttccatttatccaagtgctttcatttttccagatggcttcagaagtaggctcgtgggcagggcgcagacctgatctttatagggttgacatagaaagcagtagttgtgggtgaaagggcaggttgtcttcaaactctgtgaggtagaatcctttgtctatacctccatgaacattgactcgtgtgttcagagcctttggcctctctgtggagtctggctctctggctcctgtgcattctttgaatagtcactcgtaaaaactgtcagtgcttgaaactgtttcctttactcatgttgaagggactttgttggcttttagagtgttggtcatgactccaagagcagagcagggaagagcccaagcatagacttggtgccgtggtgatggctgcagtccagttttgtgatgctgcttttacgtgtccctcgataacagtcagctagacacactcaggaggactactgaggctctgcgaccttcaggagctgagcctgcctctctcctttagatgacagaccttcatctgggaacgtgctgagccagcaccctcagatgatttccctccaaactgctgactaggtcatcctctgtctggtagagacattcacatctttgcttttattctatgctctctgtacttttgaccaaaaattgaccaaagtaagaaaatgcaagttctaaaaatagactaaggatgcctttgcagaacaccaaagcatcccaaggaactggtagggaagtggcgcctgtctcctggagtggaagaggcctgctccctggctctgggtctgctgggggcacagtaaatcagtcttggcacccacatccagggcagagaggtctgtggttctcagcatcagaaggcagcgcagcccctctcctcttcaggctacagggttgtcacctgctgagtcctcaggttgtttggcctctctggtccatcttgggcattaggttctccagcagagctctggccagctgcctcttctttaactgggaacacaggctctcacaagatcagaacccccactcacccccaagatcttatctagcaagcctgtagtattcagtttctgttgtaggaagagagcgaggcatccctgaattccacgcatctgctggaaacgagccgtgtcagatcgcacatccctgcgcccccatgcccccatgcccctctgagtcacacaggacagaggaggcagagcttctgcccactgttatcttcactttctttgtccagtcttttgtttttaataagcagtgaccctccctactcttctttttaatgatttttgtagttgatttgtctgaactgtggctactgtgcattccttgaataatcacttgtaaaaattgtcagtgcttgaagctgtttcctttactcacattgaagggacttcgttggttttttggagtcttggttgtgactccaagagcagagtgaggaagacccccaagcatagactcgggtactgtgatgatggctgcagtccagttttatgattctgcttttatgtgtcccttgataacagtgacttaacaatatacattcctcataaataaaaaaaaaacaagaatctgaa

SEQ ID NO: 74221 - DNA, 1471 bp, Homo sapiens
tcggctaggtggaggctgggtgttaatcggccgaatcctttgtctatacctccatgaacattgactcgtgtgttcagagcctttggcctctctgtggagtctggctctctggctcctgtgcattctttgaatagtcactcgtaaaaactgtcagtgcttgaaactgtttcctttactcatgttgaagggactttgttggcttttagagtgttggtcatgactccaagagcagagcagggaagagcccaagcatagacttggtgccgtggtgatggctgcagtccagttttgtgatgctgcttttacgtgtccctcgataacagtcagctagacacactcaggaggactactgaggctctgcgaccttcaggagctgagcctgcctctctcctttagatgacagaccttcatctgggaacgtgctgagccagcaccctcagatgatttccctccaaactgctgactaggtcatcctctgtctggtagagacattcacatctttgcttttattctatgctctctgtacttttgaccaaaaattgaccaaagtaagaaaatgcaagttctaaaaatagactaaggatgcctttgcagaacaccaaagcatcccaaggaactggtagggaagtggcgcctgtctcctggagtggaagaggcctgctccctggctctgggtctgctgggggcacagtaaatcagtcttggcacccacatccagggcagagaggtctgtggttctcagcatcagaaggcagcgcagcccctctcctcttcaggctacagggttgtcacctgctgagtcctcaggttgtttggcctctctggtccatcttgggcattaggttctccagcagagctctggccagctgcctcttctttaactgggaacacaggctctcacaagatcagaacccccactcacccccaagatcttatctagcaagcctgtagtattcagtttctgttgtaggaagagagcgaggcatccctgaattccacgcatctgctggaaacgagccgtgtcagatcgcacatccctgcgcccccatgcccccatgcccctctgagtcacacaggacagaggaggcagagcttctgcccactgttatcttcactttctttgtccagtcttttgtttttaataagcagtgaccctccctactcttctttttaatgatttttgtagttgatttgtctgaactgtggctactgtgcattccttgaataatcacttgtaaaaattgtcagtgcttgaagctgtttcctttactcacattgaagggacttcgttggttttttggagtcttggttgtgactccaagagcagagtgaggaagacccccaagcatagactcgggtactgtgatgatggctgcagtccagttttatgattctgcttttatgtgtcccttgataacagtgacttaacaatatacattcctcataaataaaaaaaaaacaagaatctgaa

SEQ ID NO: 74222 - DNA, 5389 bp, Homo sapiens
  misc_feature (17)..(17): n is a, c, g, or t
  misc_feature (24)..(24): n is a, c, g, or t
  misc_feature (26)..(27): n is a, c, g, or t
gggggggggagggctcncggccgnannggcagcctccgggtgtccggccgtgtcccgaggaagtgcaagacccggggtattccctcagcggatactacacccatccatttcaaggctatgagcacagacagctcagataccagcagcctgggccaggatcttcccccagtagtttcctgcttaagcaaatagaatttctcaaggggcagctcccagaagcaccggtgattggaaagcagacaccgtcactgccaccttccctcccaggactccggccaaggtttccagtactacttgcctccagtaccagaggcaggcaagtggacatcaggggtgtccccaggggcgtgcatctcggaagtcaggggctccagagagggttccagcatccttcaccacgtggcaggagtctgccacagagaggtgttgattgcctttcctcacatttccaggaactgagtatctaccaagatcaggaacaaaggatcttaaagttcctggaagagcttggggaagggaaggccaccacagcacatgatctgtctgggaaacttgggactccgaagaaagaaatcaatcgagttttatactccctggcaaagaagggcaagctacagaaagaggcaggaacaccccctttgtggaaaatcgcggtctccactcaggcttggaaccagcacagcggagtggtaagaccagacggtcatagccaaggagccccaaactcagacccgagtttggaaccggaagacagaaactccacatctgtctcagaagatcttcttgagccttttattgcagtctcagctcaggcttggaaccagcacagcggagtggtaagaccagacagtcatagccaaggatccccaaactcagacccaggtttggaacctgaagacagcaactccacatctgccttggaagatcctcttgagtttttagacatggccgagatcaaggagaaaatctgcgactatctcttcaatgtgtctgactcctctgccctgaatttggctaaaaatattggccttaccaaggcccgagatataaatgctgtgctaattgacatggaaaggcagggggatgtctatagacaagggacaacccctcccatatggcatttgacagacaagaagcgagagaggatgcaaatcaagagaaatacgaacagtgttcctgaaaccgctccagctgcaatccctgagaccagaagaaacgcagagttcctcacctgtaatatacccacatcaaatgcctcaaataacatggtaaccacagaaaaagtggagaatgggcaggaacctgtcataaagttagaaaacaggcaagaggccagaccagaaccagcaagactgaaaccacctgttcattacaatggcccctcaaaagcagggtatgttgactttgaaaatggccagtgggccacagatgacatcccagatgacttgaatagtatccgcgcagcaccaggtgagtttcgagccatcatggagatgccctccttctacagtcatggcttgccacggtgttcaccctacaagaaactgacagagtgccagctgaagaaccccatcagcgggctgttagaatatgcccagttcgctagtcaaacctgtgagttcaacatgatagagcagagtggaccaccccatgaacctcgatttaaattccaggttgtcatcaatggccgagagtttcccccagctgaagctggaagcaagaaagtggccaagcaggatgcagctatgaaagccatgacaattctgctagaggaagccaaagccaaggacagtggaaaatcagaagaatcatcccactattccacagagaaagaatcagagaagactgcagagtcccagacccccaccccttcagccacatccttcttttctgggaagagccccgtcaccacactgcttgagtgtatgcacaaattggggaactcctgcgaattccgtctcctgtccaaagaaggccctgcccatgaacccaagttccaatactgtgttgcagtgggagcccaaactttccccagtgtgagtgctcccagcaagaaagtggcaaagcagatggccgcagaggaagccatgaaggccctgcatggggaggcgaccaactccatggcttctgataaccagcctgaaggtatgatctcagagtcacttgataacttggaatccatgatgcccaacaaggtcaggaagattggcgagctcgtgagatacctgaacaccaaccctgtgggtggccttttggagtacgcccgctcccatggctttgctgctgaattcaagttggtcgaccagtccggacctcctcacgagcccaagttcgtttaccaagcaaaagttgggggtcgctggttcccagccgtctgcgcacacagcaagaagcaaggcaagcaggaagcagcagatgcggctctccgtgtcttgattggggagaacgagaaggcagaacgcatgggtttcacagaggtaaccccagtgacaggggccagtctcagaagaactatgctcctcctctcaaggtccccagaagcacagccaaagacactccctctcactggcagcaccttccatgaccagatagccatgctgagccaccggtgcttcaacactctgactaacagcttccagccctccttgctcggccgcaagattctggccgccatcattatgaaaaaagactctgaggacatgggtgtcgtcgtcagcttgggaacagggaatcgctgtgtgaaaggagattctctcagcctaaaaggagaaactgtcaatgactgccatgcagaaataatctcccggagaggcttcatcaggtttctctacagtgagttaatgaaatacaactcccagactgcgaaggatagtatatttgaacctgctaagggaggagaaaagctccaaataaaaaagactgtgtcattccatctgtatatcagcactgctccgtgtggagatggcgccctctttgacaagtcctgcagcgaccgtgctatggaaagcacagaatcccgccactaccctgtcttcgagaatcccaaacaaggaaagctccgcaccaaggtggagaacggagaaggcacaatccctgtggaatccagtgacattgtgcctacgtgggatggcattcggctcggggagagactccgtaccatgtcctgtagtgacaaaatcctacgctggaacgtgctgggcctgcaaggggcactgttgacccacttcctgcagcccatttatctcaaatctgtcacattgggttaccttttcagccaagggcatctgacccgtgctatttgctgtcgtgtgacaagagatgggagtgcatttgaggatggactacgacatccctttattgtcaaccaccccaaggttggcagagtcagcatatatgattccaaaaggcaatccgggaagactaaggagacaagcgtcaactggtgtctggctgatggctatgacctggagatcctggacggtaccagaggcactgtggatgggccacggaatgaattgtcccgggtctccaaaaagaacatttttcttctatttaagaagctctgctccttccgttaccgcagggatctactgagactctcctatggtgaggccaagaaagctgcccgtgactacgagacggccaagaactacttcaaaaaaggcctgaaggatatgggctatgggaactggattagcaaaccccaggaggaaaagaacttttatctctgcccagtatagtatgctccagtgacagatggattagggtgtgtcatactagggtgtgagagaggtaggtcgtagcattcctcatcacatggtcaggggatttttttttctcctttttttttctttttaagccataattggtgatactgaaaactttgggttcccatttatcctgctttctttgggattgctaggcaaggtctggccaggccccccttttttcccccaagtgaagaggcagaaacctaagaagttatcttttctttctacccaaagcatacatagtcactgagcacctgcggtccatttcctcttaaaagttttgttttgatttgtttccatttcctttccctttgtgtttgctacactgacctcttgcggtcttgattaggtttcagtcaactctggatcatgtcagggactgataatttcatttgtggattacgcagacccctctacttcccctctttcccttctgagattctttccttgtgatctgaatgtctccttttccccctcagagggcaaagaggtgaacataaaggatttggtgaaacatttgtaagggtaggagttgaaaactgcagttcccagtgccacggaagtgtgattggagcctgcagataatgcccagccatcctcccatcctgcactttagccagctgcagggcgggcaaggcaaggaaagctgcttccctggaagtgtatcactttctccggcagctgggaagtctagaaccagccagactgggttaagggagctgctcaagcaatagcagaggtttcacccggcaggatgacacagaccacttcccagggagcacgggcatgccttggaatattgccaagcttccagctgcctcttctcctaaagcattcctaggaatattttccccgccaatgctgggcgtacaccctagccaacgggacaaatcctagagggtataaaatcatctctgctcagataatcatgacttagcaagaataagggcaaaaaatcctgttggcttaacgtcactgttccacctggtgtaatatctctcatgacagtgacaccaagggaagttgactaagtcacatgtaaattaggagtgttttaaagaatgccatagatgttgattcttaactgctacagataacctgtaattgagcagatttaaaattcaggcatacttttccatttatccaagtgctttcatttttccagatggcttcagaagtaggctcgtgggcagggcgcagacctgatctttatagggttgacatagaaagcagtagttgtgggtgaaagggcaggttgtcttcaaactctgtgaggtagaatcctttgtctatacctccatgaacattgactcaggtggtgtgcaccacctgagtcacaccacctgagtcacaccacctgagtcctgtaagtaggagagtgatatttgatcaggagaacgtggttactagcacagagagttctcccagtaggttaatagtggggggtaaggcgaggttagcgaggcttgctagaagtcatcaaaaagctaatagtgggagtagagtttgaagtccttgagagaggattatgatgcgactgtgagtgcgttcgtagtttgagtttgctaggcagaatagtaatgaggatgtaagtccgtgggcgattatgagaatgactg

SEQ ID NO: 74223 - DNA, 4550 bp, Homo sapiens
  misc_feature (17)..(17): n is a, c, g, or t
  misc_feature (24)..(24): n is a, c, g, or t
  misc_feature (26)..(27): n is a, c, g, or t
gggggggggagggctcncggccgnannggcagcctccgggtgtccggccgtgtcccgaggaagtgcaagacccggggtattccctcagcggatactacacccatccatttcaaggctatgagcacagacagctcagataccagcagcctgggccaggatcttcccccagtagtttcctgcttaagcaaatagaatttctcaaggggcagctcccagaagcaccggtgattggaaagcagacaccgtcactgccaccttccctcccaggactccggccaaggtttccagtactacttgcctccagtaccagaggcaggcaagtggacatcaggggtgtccccaggggcgtgcatctcggaagtcaggggctccagagagggttccagcatccttcaccacgtggcaggagtctgccacagagaggtgttgattgcctttcctcacatttccaggaactgagtatctaccaagatcaggaacaaaggatcttaaagttcctggaagagcttggggaagggaaggccaccacagcacatgatctgtctgggaaacttgggactccgaagaaagaaatcaatcgagttttatactccctggcaaagaagggcaagctacagaaagaggcaggaacaccccctttgtggaaaatcgcggtctccactcaggcttggaaccagcacagcggagtggtaagaccagacggtcatagccaaggagccccaaactcagacccgagtttggaaccggaagacagaaactccacatctgtctcagaagatcttcttgagccttttattgcagtctcagctcaggcttggaaccagcacagcggagtggtaagaccagacagtcatagccaaggatccccaaactcagacccaggtttggaacctgaagacagcaactccacatctgccttggaagatcctcttgagtttttagacatggccgagatcaaggagaaaatctgcgactatctcttcaatgtgtctgactcctctgccctgaatttggctaaaaatattggccttaccaaggcccgagatataaatgctgtgctaattgacatggaaaggcagggggatgtctatagacaagggacaacccctcccatatggcatttgacagacaagaagcgagagaggatgcaaatcaagagaaatacgaacagtgttcctgaaaccgctccagctgcaatccctgagaccagaagaaacgcagagttcctcacctgtaatatacccacatcaaatgcctcaaataacatggtaaccacagaaaaagtggagaatgggcaggaacctgtcataaagttagaaaacaggcaagaggccagaccagaaccagcaagactgaaaccacctgttcattacaatggcccctcaaaagcagggtatgttgactttgaaaatggccagtgggccacagatgacatcccagatgacttgaatagtatccgcgcagcaccaggtgagtttcgagccatcatggagatgccctccttctacagtcatggcttgccacggtgttcaccctacaagaaactgacagagtgccagctgaagaaccccatcagcgggctgttagaatatgcccagttcgctagtcaaacctgtgagttcaacatgatagagcagagtggaccaccccatgaacctcgatttaaattccaggttgtcatcaatggccgagagtttcccccagctgaagctggaagcaagaaagtggccaagcaggatgcagctatgaaagccatgacaattctgctagaggaagccaaagccaaggacagtggaaaatcagaagaatcatcccactattccacagagaaagaatcagagaagactgcagagtcccagacccccaccccttcagccacatccttcttttctgggaagagccccgtcaccacactgcttgagtgtatgcacaaattggggaactcctgcgaattccgtctcctgtccaaagaaggccctgcccatgaacccaagttccaatactgtgttgcagtgggagcccaaactttccccagtgtgagtgctcccagcaagaaagtggcaaagcagatggccgcagaggaagccatgaaggccctgcatggggaggcgaccaactccatggcttctgataaccagcctgaaggtatgatctcagagtcacttgataacttggaatccatgatgcccaacaaggtcaggaagattggcgagctcgtgagatacctgaacaccaaccctgtgggtggccttttggagtacgcccgctcccatggctttgctgctgaattcaagttggtcgaccagtccggacctcctcacgagcccaagttcgtttaccaagcaaaagttgggggtcgctggttcccagccgtctgcgcacacagcaagaagcaaggcaagcaggaagcagcagatgcggctctccgtgtcttgattggggagaacgagaaggcagaacgcatgggtttcacagaggtaaccccagtgacaggggccagtctcagaagaactatgctcctcctctcaaggtccccagaagcacagccaaagacactccctctcactggcagcaccttccatgaccagatagccatgctgagccaccggtgcttcaacactctgactaacagcttccagccctccttgctcggccgcaagattctggccgccatcattatgaaaaaagactctgaggacatgggtgtcgtcgtcagcttgggaacagggaatcgctgtgtgaaaggagattctctcagcctaaaaggagaaactgtcaatgactgccatgcagaaataatctcccggagaggcttcatcaggtttctctacagtgagttaatgaaatacaactcccagactgcgaaggatagtatatttgaacctgctaagggaggagaaaagctccaaataaaaaagactgtgtcattccatctgtatatcagcactgctccgtgtggagatggcgccctctttgacaagtcctgcagcgaccgtgctatggaaagcacagaatcccgccactaccctgtcttcgagaatcccaaacaaggaaagctccgcaccaaggtggagaacggagaaggcacaatccctgtggaatccagtgacattgtgcctacgtgggatggcattcggctcggggagagactccgtaccatgtcctgtagtgacaaaatcctacgctggaacgtgctgggcctgcaaggggcactgttgacccacttcctgcagcccatttatctcaaatctgtcacattgggttaccttttcagccaagggcatctgacccgtgctatttgctgtcgtgtgacaagagatgggagtgcatttgaggatggactacgacatccctttattgtcaaccaccccaaggttggcagagtcagcatatatgattccaaaaggcaatccgggaagactaaggagacaagcgtcaactggtgtctggctgatggctatgacctggagatcctggacggtaccagaggcactgtggatgggccacggaatgaattgtcccgggtctccaaaaagaacatttttcttctatttaagaagctctgctccttccgttaccgcagggatctactgagactctcctatggtgaggccaagaaagctgcccgtgactacgagacggccaagaactacttcaaaaaaggcctgaaggatatgggctatgggaactggattagcaaaccccaggaggaaaagaacttttatctctgcccagtatagtatgctccagtgacagatggattagggtgtgtcatactagggtgtgagagaggtaggtcgtagcattcctcatcacatggtcaggggatttttttttctcctttttttttctttttaagccataattggtgatactgaaaactttgggttcccatttatcctgctttctttgggattgctaggcaaggtctggccaggccccccttttttcccccaagtgaagaggcagaaacctaagaagttatcttttctttctacccaaagcatacatagtcactgagcacctgcggtccatttcctcttaaaagttttgttttgatttgtttccatttcctttccctttgtgtttgctacactgacctcttgcggtcttgattaggtttcagtcaactctggatcatgtcagggactgataatttcatttgtggattacgcagacccctctacttcccctctttcccttctgagattctttccttgtgatctgaatgtctccttttccccctcagagggcaaagaggtgaacataaaggatttggtgaaacatttgtaagggtaggagttgaaaactgcagttcccagtgccacggaagtgtgattggagcctgcagataatgcccagccatcctcccatcctgcactttagccagctgcagggcgggcaaggcaaggaaagctgcttccctggaagtgtatcactttctccggcagctgggaagtctagaaccagccagactgggttaagggagctgctcaagcaatagcagagttcacgcgcagatatacgtcgcgaggggtctcaagagcagc

SEQ ID NO: 74224 - DNA, 424 bp, Homo sapiens
ctcacatgttcaagagaagtgttcctggaagaggtgaaactaggttgatgcttaaatgttgaaaggggtcagccaggctaagagacactggctgttcaaggcagaagtgactgcatgagatgtgactgcacagaggtgatgtgttcaaggaaattaccagtagtggaggatggcagcctggcagaggctaggtcaggctcctcagtcaaaaccattttaatccttctacgtgcttcatctcctgtcaggttccaatactgtgttgcagtgggagcccaaactttccccagtgtgagtgctcccagcaagaaagtggcaaagcagatggccgcagaggaagccatgaaggccctgcatggggaggcgaccaactccatggcttctgataaccaggtagggcgttttcctactcaaaagatacagg

SEQ ID NO: 74225 - DNA, 364 bp, Homo sapiens
atagactgttacttgtagatttccatgtaatcattgaggttatcacccagattagaaagacatatttgttatcagtgtacattctaattgagagcatatatccagtagtatcaaacaataatgtctactgtttatagtccacttaataaaaatagaagcatttaccatttgccttaggctgataggaatgtgaatattcttgaccaaatatatcagcatctaattgaaatgaccaaatagcattcttagacttctgtattatgaatataattgatatttaaattaatgtcttgttcatatatgtgtactttcatatttgattttaaaatatacattataacctgtatggtattttatttaaagg

SEQ ID NO: 74226 - DNA, 498 bp, Homo sapiens
ttgctgtgatcttgctgtaaactccatgggattgttctttaattcagggccttatcctgtcataaaatatgagataagaatgtgctgcgaagcactagactggctggaagcctgcccccatacatatctcattaaatccttaaaggaacacgggcaaaagataaaccaagggcaagaaaacctgcagtcgcgaaggcaacacggcccattagtaagtgacagagccgatctagagtacagagccactcaacccataataggcgcaaggcggtctgctttgcccgcagcgctccggaacacccggctacgggatagcgatccatccttggggctcggcggagcgagtggtagtgggcaacacaggtaacaggcaaagccaaccaccaaccgagagcggaagtcggggaacctagccaataagagtgcgggcaattttctgtgcttcacaatggtgggttctttccagtccgctggagacaaaggcggggcaacgttggg

SEQ ID NO: 74227 - DNA, 2211 bp, Homo sapiens
ttttttttttcgtcttagccacgcagaagtcgcgtgtctagtttgtttcgacgccggaccgcgtaagagacgatgatgttgggcacggaaggtggagagggattcgtggtgaaggtccggggcttgccctggtcttgctcggccgatgaagtgcagaggtttttttctgactgcaaaattcaaaatggggctcaaggtattcgtttcatctacaccagagaaggcagaccaagtggcgaggcttttgttgaacttgaatcagaagatgaagtcaaattggccctgaaaaaagacagagaaactatgggacacagatatgttgaagtattcaagtcaaacaacgttgaaatggattgggtgttgaagcatactggtccaaatagtcctgacacggccaatgatggctttgtacggcttagaggacttccctttggatgtagcaaggaagaaattgttcagttcttctcagggttggaaatcgtgccaaatgggataacattgccggtggacttccaggggaggagtacgggggaggccttcgtgcagtttgcttcacaggaaatagctgaaaaggctctaaagaaacacaaggaaagaatagggcacaggtatattgaaatctttaagagcagtagagctgaagttagaactcattatgatccaccacgaaagcttatggccatgcagcggccaggtccttatgacagacctggggctggtagagggtataacagcattggcagaggagctggctttgagaggatgaggcgtggtgcttatggtggaggctatggaggctatgatgattacaatggctataatgatggctatggatttgggtcagatagatttggaagagacctcaattactgtttttcaggaatgtctgatcacagatacggggatggtggctctactttccagagcacaacaggacactgtgtacacatgcggggattaccttacagagctactgagaatgacatttataattttttttcaccgctcaaccctgtgagagtacacattgaaattggtcctgatggcagagtaactggtgaagcagatgtcgagttcgcaactcatgaagatgctgtggcagctatgtcaaaagacaaagcaaatatgcaacacagatatgtagaactcttcttgaattctacagcaggagcaagcggtggtgcttacgaacacagatatgtagaactcttcttgaattctacagcaggagcaagcggtggtgcttatggtagccaaatgatgggaggcatgggcttgtcaaaccagtccagctacgggggcccagccagccagcagctgagtgggggttacggaggcggctacggtggccagagcagcatgagtggatacgaccaagttttacaggaaaactccagtgattttcaatcaaacattgcataggtaaccaaggagcagtgaacagcagctactacagtagtggaagccgtgcatctatgggcgtgaacggaatgggagggttgtctagcatgtccagtatgagtggtggatggggaatgtaattgatcgatcctgatcactgactcttggtcaacctttttttttttttttttttctttaagaaaacttcagtttaacagtttctgcaatacaagcttgtgatttatgcttactctaagtggaaatcaggattgttatgaagacttaaggcccagtatttttgaatacaatactcatctaggatgtaacagtgaagctgagtaaactataactgttaaacttaagttccagcttttctcaagttagttataggatgtacttaagcagtaagcgtatttaggtaaaagcagttgaattatgttaaatgttgccctttgccacgttaaattgaacactgttttggatgcatgttgaaagacatgcttttatttttttgtaaaacaatataggagctgtgtctactattaaaagtgaaacattttggcatgtttgttaattctagtttcatttaataacctgtaaggcacgtaagtttaagctttttttttttttaagttaatgggaaaaatttgagacgcaataccaatacttaggattttggtcttggtgtttgtatgaaattctgaggccttgatttaaatctttcattgtattgtgatttccttttaggtatattgcgctaagtgaaacttgtcaaataaatcctccttttaaaaactgcaaaaaaaaaaa

SEQ ID NO: 74228 - DNA, 2244 bp, Homo sapiens
ggcacgagggccacgcagaagtcgcgtgtctaggtgagtcgcggtgggtcctcgcttgcagttcagcgaccacgtttgtttcgacgccggaccgcgtaagagacgatgatgttgggcacggaaggtggagagggattcgtggtgaaggtccggggcttgccctggtcttgctcggccgatgaagtgcagaggtttttttctgactgcaaaattcaaaatggggctcaaggtattcgtttcatctacaccagagaaggcagaccaagtggcgaggcttttgttgaacttgaatcagaagatgaagtcaaattggccctgaaaaaagacagagaaactatgggacacagatatgttgaagtattcaagtcaaacaacgttgaaatggattgggtgttgaagcatactggtccaaatagtcctgacacggccaatgatggctttgtacggcttagaggacttccctttggatgtagcaaggaagaaattgttcagttcttctcagggttggaaatcgtgccaaatgggataacattgccggtggacttccaggggaggagtacgggggaggccttcgtgcagtttgcttcacaggaaatagctgaaaaggctctaaagaaacacaaggaaagaatagggcacaggtatattgaaatctttaagagcagtagagctgaagttagaactcattatgatccaccacgaaagcttatggccatgcagcggccaggtccttatgacagacctggggctggtagagggtataacagcattggcagaggagctggctttgagaggatgaggcgtggtgcttatggtggaggctatggaggctatgatgattacaatggctataatgatggctatggatttgggtcagatagatttggaagagacctcaattactgtttttcaggaatgtctgatcacagatacggggatggtggctctactttccagagcacaacaggacactgtgtacacatgcggggattaccttacagagctactgagaatgacatttataattttttttcaccgctcaaccctgtgagagtacacattgaaattggtcctgatggcagagtaactggtgaagcagatgtcgagttcgcaactcatgaagatgctgtggcagctatgtcaaaagacaaagcaaatatgcaacacagatatgtagaactcttcttgaattctacagcaggagcaagcggtggtgcttacgaacacagatatgtagaactcttcttgaattctacagcaggagcaagcggtggtgcttatggtagccaaatgatgggaggcatgggcttgtcaaaccagtccagctacgggggcccagccagccagcagctgagtgggggttacggaggcggctacggtggccagagcagcatgagtggatacgaccaagttttacaggaaaactccagtgattttcaatcaaacattgcataggtaaccaaggagcagtgaacagcagctactacagtagtggaagccgtgcatctatgggcgtgaacggaatgggagggttgtctagcatgtccagtatgagtggtggatggggaatgtaattgatcgatcctgatcactgactcttggtcaacctttttttttttttttttttctttaagaaaacttcagtttaacagtttctgcaatacaagcttgtgatttatgcttactctaagtggaaatcaggattgttatgaagacttaaggcccagtatttttgaatacaatactcatctaggatgtaacagtgaagctgagtaaactataactgttaaacttaagttccagcttttctcaagttagttataggatgtacttaagcagtaagcgtatttaggtaaaagcagttgaattatgttaaatgttgccctttgccacgttaaattgaacactgttttggatgcatgttgaaagacatgcttttatttttttgtaaaacaatataggagctgtgtctactattaaaagtgaaacattttggcatgtttgttaattctagtttcatttaataacctgtaaggcacgtaagtttaagctttttttttttttaagttaatgggaaaaatttgagacgcaataccaatacttaggattttggtcttggtgtttgtatgaaattctgaggccttgatttaaatctttcattgtattgtgatttccttttaggtatattgcgctaagtgaaacttgtcaaataaatcctccttttaaaaactgcaaaaaaaaaaa

SEQ ID NO: 74229 - DNA, 601 bp, Homo sapiens
  misc_feature (13)..(13): n is a, c, g, or t
  misc_feature (34)..(34): n is a, c, g, or t
  misc_feature (70)..(70): n is a, c, g, or t
cccatccccacangggggtgtgagggattaaagnagatggagggatgtggagcacctagataagtgcccngaaacattgaaagggcctcaagaattgtagttcctgttgtattaccttaatgtccataatagaactataactgttaaacttaagttccagcttttctcaagttagttataggatgtacttaagcagtaagcgtatttaggtaaaagcagttgaattatgttaaatgttgccctttgccacgttaaattgaacactgttttggatgcatgttgaaagacatgcttttatttttttgtaaaacaatataggagctgtgtctactattaaaagtgaaacattttggcatgtttgttaattctagtttcatttaataacctgtaaggcacgtaagtttaagctttttttttttttaagttaatgggaaaaatttgagacgcaataccaatacttaggattttggtcttggtgtttgtatgaaattctgaggccttgatttaaatctttcattgtattgtgatttccttttaggtatattgcgctaagtgaaacttgtcaaataaatcctccttttaaaaactgcaaaaaaaaaaa

SEQ ID NO: 74230 - DNA, 1260 bp, Homo sapiens
  misc_feature (216)..(216): n is a, c, g, or t
gtccattcgatctgctttccttcgtgcgctgttgtgtctgtggcgcgtcggctgtgggggttagtctggtgtcgtggtctgggctcttctgggttgtcggtaggtggtcggcgggaggttcggtggtgtctcggtcggtgttgtaggtggggtgtggtgcggtttgcgggcgtctcttgtggtcggtggtgggtgctgctcgggtggcggtgctgnagattgttgctattggcaacgtgcctcgtattctcctgagacaggttagattgcatggtgcatgagggctcttgcagcccattcccgtgtgacttggataccgggcgctggtctcgccgatgggactcttgattccgcagacagcgtggccttggtacccatatggagcttgcctgcaaaccagtccagctacgggggcccagccagccagcagctgagtgggggttacggaggcggctacggtggccagagcagcatgagtggatacgaccaagttttacaggaaaactccagtgattttcaatcaaacattgcataggtaaccaaggagcagtgaacagcagctactacagtagtggaagccgtgcatctatgggcgtgaacggaatgggagggttgtctagcatgtccagtatgagtggtggatggggaatgaaacttcagtttaacagtttctgcaatacaagcttgtgatttatgcttactctaagtggaaatcaggattgttatgaagacttaaggcccagtatttttgaatacaatactcatctaggatgtaacagtgaagctgagtaaactataactgttaaacttaagttccagcttttctcaagttagttataggatgtacttaagcagtaagcgtatttaggtaaaagcagttgaattatgttaaatgttgccctttgccacgttaaattgaacactgttttggatgcatgttgaaagacatgcttttatttttttgtaaaacaatataggagctgtgtctactattaaaagtgaaacattttggcatgtttgttaattctagtttcatttaataacctgtaaggcacgtaagtttaagctttttttttttttaagttaatgggaaaaatttgagacgcaataccaatacttaggattttggtcttggtgtttgtatgaaattctgaggccttgatttaaatctttcattgtattgtgatttccttttaggtatattgcgctaagtgaaacttgtcaaataaatcctccttttaaaaactgcaaaaaaaaaaa

SEQ ID NO: 74231 - DNA, 917 bp, Homo sapiens
ggacaccccagcccaccgtggtcatgtacccaatgatgggagcctggcccaaaccagtccagctacgggggcccagccagccagcagctgagtgggggttacggaggcggctacggtggccagagcagcatgagtggatacgaccaagttttacaggaaaactccagtgattttcaatcaaacattgcataggtaaccaaggagcagtgaacagcagctactacagtagtggaagccgtgcatctatgggcgtgaacggaatgggagggttgtctagcatgtccagtatgagtggtggatggggaatgaaacttcagtttaacagtttctgcaatacaagcttgtgatttatgcttactctaagtggaaatcaggattgttatgaagacttaaggcccagtatttttgaatacaatactcatctaggatgtaacagtgaagctgagtaaactataactgttaaacttaagttccagcttttctcaagttagttataggatgtacttaagcagtaagcgtatttaggtaaaagcagttgaattatgttaaatgttgccctttgccacgttaaattgaacactgttttggatgcatgttgaaagacatgcttttatttttttgtaaaacaatataggagctgtgtctactattaaaagtgaaacattttggcatgtttgttaattctagtttcatttaataacctgtaaggcacgtaagtttaagctttttttttttttaagttaatgggaaaaatttgagacgcaataccaatacttaggattttggtcttggtgtttgtatgaaattctgaggccttgatttaaatctttcattgtattgtgatttccttttaggtatattgcgctaagtgaaacttgtcaaataaatcctccttttaaaaactgcaaaaaaaaaaa

SEQ ID NO: 74232 - DNA, 3275 bp, Homo sapiens
ggcacgagggccacgcagaagtcgcgtgtctaggtgagtcgcggtgggtcctcgcttgcagttcagcgaccacgtttgtttcgacgccggaccgcgtaagagacgatgatgttgggcacggaaggtggagagggattcgtggtgaaggtccggggcttgccctggtcttgctcggccgatgaagtgcagaggtttttttctgactgcaaaattcaaaatggggctcaaggtattcgtttcatctacaccagagaaggcagaccaagtggcgaggcttttgttgaacttgaatcagaagatgaagtcaaattggccctgaaaaaagacagagaaactatgggacacagatatgttgaagtattcaagtcaaacaacgttgaaatggattgggtgttgaagcatactggtccaaatagtcctgacacggccaatgatggctttgtacggcttagaggacttccctttggatgtagcaaggaagaaattgttcagttcttctcagggttggaaatcgtgccaaatgggataacattgccggtggacttccaggggaggagtacgggggaggccttcgtgcagtttgcttcacaggaaatagctgaaaaggctctaaagaaacacaaggaaagaatagggcacaggtatattgaaatctttaagagcagtagagctgaagttagaactcattatgatccaccacgaaagcttatggccatgcagcggccaggtccttatgacagacctggggctggtagagggtataacagcattggcagaggagctggctttgagaggatgaggcgtggtgcttatggtggaggctatggaggctatgatgattacaatggctataatgatggctatggatttgggtcagatagatttggaagagacctcaattactgtttttcaggaatgtctgatcacagatacggggatggtggctctactttccagagcacaacaggacactgtgtacacatgcggggattaccttacagagctactgagaatgacatttataattttttttcaccgctcaaccctgtgagagtacacattgaaattggtcctgatggcagagtaactggtgaagcagatgtcgagttcgcaactcatgaagatgctgtggcagctatgtcaaaagacaaagcaaatatgcaacacagatatgtagaactcttcttgaattctacagcaggagcaagcggtggtgcttacgaacacagatatgtagaactcttcttgaattctacagcaggagcaagcggtggtgcttatggtagccaaatgatgggaggcatgggcttgtcaaaccagtccagctacgggggcccagccagccagcagctgagtgggggttacggaggcggctacggtggccagagcagcatgagtggatacgaccaagttttacaggaaaactccagtgattttcaatcaaacattgcataggtaaccaaggagcagtgaacagcagctactacagtagtggaagccgtgcatctatgggcgtgaacggaatgggagggttgtctagcatgtccagtatgagtggtggatggggaatgtaattgatcgatcctgatcactgactcttggtcaacctttttttttttttttttttctttaagaaaacttcagtttaacagtttctgcaatacaagcttgtgatttatgcttactctaagtggaaatcaggattgttatgaagacttaaggcccagtatttttgaatacaatactcatctaggatgtaacagtgaagctgagtaaactataactgttaaacttaagttccagcttttctcaagttagttataggatgtacttaagcagtaagcgtatttaggtaaaagcagttgaattatgttaaatgttgccctttgccacgttaaattgaacactgttttggatgcatgttgaaagacatgcttttatttttttgtaaaacaatataggagctgtgtctactattaaaagtgaaacattttggcatgtttgttaattctagtttcatttaataacctgtaaggcacgtaagtttaagctttttttttttttaagttaatgggaaaaatttgagacgcaataccaatacttaggattttggtcttggtgtttgtatgaaattctgaggccttgatttaaatctttcattgtattgtgatttccttttaggtatattgcgctaagtgaaacttgtcaaataaatcctccttttaaaaactgcaaaaaaaaaaaaaaaaaaaaaaaaaaaaaaaaaaaaaaaaaaaaaaaaaaaaaaaaaaaaaaaaaaaaaaaaaaaaaaaaaaaaaaaaagagagagagagagagagagagagaagcgggcggggggggggggcgggcggattgcactggggagggaggacttgtgtgagcggcgctgcggtgggagtgtctgtttagtaggtgagagagggtgcggtgaattgaggagggaggaggatagtgatagagaggaagagggggaggcggatgaacgaactagatatttataaccagcaaacatcatgatcgcagaatagccaattatataattatttgtgggaacagtacaacatatcccctctatttaatgactatcaaacatggagacatagcaaaaatacacacaaaaatatattaacaataatcaactatctacagaattaagacaaataataagtaaattagataaaaatatactattaatctacacatagttgtcaaaaaccagccgctgcatatacatatctcacaatacagcatctatagtcaaacacataaataactaaatactataataaagtataaatttgcagagcaccatatcatatatcattaacaagactgtcgaggtggccgcatcttatggattagaagggccaggcggagacaggatagagcgaagaagaagcatggacctgatgtaggggaggaatagagagaggacgagccgggagtgcaatgccacgatgagaacacatgcaagaatacggaggacgggggatggagcttagggacgggagtaggagggaaagggtgaggaagtgaaggagggtaggagatgatagggaagagagaagaaaggaggatgtgaggagagaggggtggaaagagaggagagatgggcatgaaatcgaaggagtaggaagtggtcgaaaatgagataagatagagaggggaggaaggagtaaggagagggagaaaggtgaagagtgaggaagaaagtggatagaggagagaggaggagaggaggtggagcgtggtga

SEQ ID NO: 74233 - DNA, 3221 bp, Homo sapiens
ggcacgagggccacgcagaagtcgcgtgtctaggtgagtcgcggtgggtcctcgcttgcagttcagcgaccacgtttgtttcgacgccggaccgcgtaagagacgatgatgttgggcacggaaggtggagagggattcgtggtgaaggtccggggcttgccctggtcttgctcggccgatgaagtgcagaggtttttttctgactgcaaaattcaaaatggggctcaaggtattcgtttcatctacaccagagaaggcagaccaagtggcgaggcttttgttgaacttgaatcagaagatgaagtcaaattggccctgaaaaaagacagagaaactatgggacacagatatgttgaagtattcaagtcaaacaacgttgaaatggattgggtgttgaagcatactggtccaaatagtcctgacacggccaatgatggctttgtacggcttagaggacttccctttggatgtagcaaggaagaaattgttcagttcttctcagggttggaaatcgtgccaaatgggataacattgccggtggacttccaggggaggagtacgggggaggccttcgtgcagtttgcttcacaggaaatagctgaaaaggctctaaagaaacacaaggaaagaatagggcacaggtatattgaaatctttaagagcagtagagctgaagttagaactcattatgatccaccacgaaagcttatggccatgcagcggccaggtccttatgacagacctggggctggtagagggtataacagcattggcagaggagctggctttgagaggatgaggcgtggtgcttatggtggaggctatggaggctatgatgattacaatggctataatgatggctatggatttgggtcagatagatttggaagagacctcaattactgtttttcaggaatgtctgatcacagatacggggatggtggctctactttccagagcacaacaggacactgtgtacacatgcggggattaccttacagagctactgagaatgacatttataattttttttcaccgctcaaccctgtgagagtacacattgaaattggtcctgatggcagagtaactggtgaagcagatgtcgagttcgcaactcatgaagatgctgtggcagctatgtcaaaagacaaagcaaatatgcaacacagatatgtagaactcttcttgaattctacagcaggagcaagcggtggtgcttacgaacacagatatgtagaactcttcttgaattctacagcaggagcaagcggtggtgcttatggtagccaaatgatgggaggcatgggcttgtcaaaccagtccagctacgggggcccagccagccagcagctgagtgggggttacggaggcggctacggtggccagagcagcatgagtggatacgaccaagttttacaggaaaactccagtgattttcaatcaaacattgcataggtaaccaaggagcagtgaacagcagctactacagtagtggaagccgtgcatctatgggcgtgaacggaatgggagggttgtctagcatgtccagtatgagtggtggatggggaatgtaattgatcgatcctgatcactgactcttggtcaacctttttttttttttttttttctttaagaaaacttcagtttaacagtttctgcaatacaagcttgtgatttatgcttactctaagtggaaatcaggattgttatgaagacttaaggcccagtatttttgaatacaatactcatctaggatgtaacagtgaagctgagtaaactataactgttaaacttaagttccagcttttctcaagttagttataggatgtacttaagcagtaagcgtatttaggtaaaagcagttgaattatgttaaatgttgccctttgccacgttaaattgaacactgttttggatgcatgttgaaagacatgcttttatttttttgtaaaacaatataggagctgtgtctactattaaaagtgaaacattttggcatgtttgttaattctagtttcatttaataacctgtaaggcacgtaagtttaagctttttttttttttaagttaatgggaaattctgaggccttgatttaaatctttcattgtattgtgatttccttttaggtatattgcgctaagtgaaacttgtcaaataaatcctccttttaaaaactgcaaaaaaaaaaaaaaaaaaaaaaaaaaaaaaaaaaaaaaaaaaaaaaaaaaaaaaaaaaaaaaaaaaaaaaaaaaaaaaaaaaaaaaaaagagagagagagagagagagagagaagcgggcggggggggggggcgggcggattgcactggggagggaggacttgtgtgagcggcgctgcggtgggagtgtctgtttagtaggtgagagagggtgcggtgaattgaggagggaggaggatagtgatagagaggaagagggggaggcggatgaacgaactagatatttataaccagcaaacatcatgatcgcagaatagccaattatataattatttgtgggaacagtacaacatatcccctctatttaatgactatcaaacatggagacatagcaaaaatacacacaaaaatatattaacaataatcaactatctacagaattaagacaaataataagtaaattagataaaaatatactattaatctacacatagttgtcaaaaaccagccgctgcatatacatatctcacaatacagcatctatagtcaaacacataaataactaaatactataataaagtataaatttgcagagcaccatatcatatatcattaacaagactgtcgaggtggccgcatcttatggattagaagggccaggcggagacaggatagagcgaagaagaagcatggacctgatgtaggggaggaatagagagaggacgagccgggagtgcaatgccacgatgagaacacatgcaagaatacggaggacgggggatggagcttagggacgggagtaggagggaaagggtgaggaagtgaaggagggtaggagatgatagggaagagagaagaaaggaggatgtgaggagagaggggtggaaagagaggagagatgggcatgaaatcgaaggagtaggaagtggtcgaaaatgagataagatagagaggggaggaaggagtaaggagagggagaaaggtgaagagtgaggaagaaagtggatagaggagagaggaggagaggaggtggagcgtggtga

SEQ ID NO: 74234 - DNA, 2237 bp, Homo sapiens
  misc_feature (216)..(216): n is a, c, g, or t
gtccattcgatctgctttccttcgtgcgctgttgtgtctgtggcgcgtcggctgtgggggttagtctggtgtcgtggtctgggctcttctgggttgtcggtaggtggtcggcgggaggttcggtggtgtctcggtcggtgttgtaggtggggtgtggtgcggtttgcgggcgtctcttgtggtcggtggtgggtgctgctcgggtggcggtgctgnagattgttgctattggcaacgtgcctcgtattctcctgagacaggttagattgcatggtgcatgagggctcttgcagcccattcccgtgtgacttggataccgggcgctggtctcgccgatgggactcttgattccgcagacagcgtggccttggtacccatatggagcttgcctgcaaaccagtccagctacgggggcccagccagccagcagctgagtgggggttacggaggcggctacggtggccagagcagcatgagtggatacgaccaagttttacaggaaaactccagtgattttcaatcaaacattgcataggtaaccaaggagcagtgaacagcagctactacagtagtggaagccgtgcatctatgggcgtgaacggaatgggagggttgtctagcatgtccagtatgagtggtggatggggaatgaaacttcagtttaacagtttctgcaatacaagcttgtgatttatgcttactctaagtggaaatcaggattgttatgaagacttaaggcccagtatttttgaatacaatactcatctaggatgtaacagtgaagctgagtaaactataactgttaaacttaagttccagcttttctcaagttagttataggatgtacttaagcagtaagcgtatttaggtaaaagcagttgaattatgttaaatgttgccctttgccacgttaaattgaacactgttttggatgcatgttgaaagacatgcttttatttttttgtaaaacaatataggagctgtgtctactattaaaagtgaaacattttggcatgtttgttaattctagtttcatttaataacctgtaaggcacgtaagtttaagctttttttttttttaagttaatgggaaattctgaggccttgatttaaatctttcattgtattgtgatttccttttaggtatattgcgctaagtgaaacttgtcaaataaatcctccttttaaaaactgcaaaaaaaaaaaaaaaaaaaaaaaaaaaaaaaaaaaaaaaaaaaaaaaaaaaaaaaaaaaaaaaaaaaaaaaaaaaaaaaaaaaaaaaaagagagagagagagagagagagagaagcgggcggggggggggggcgggcggattgcactggggagggaggacttgtgtgagcggcgctgcggtgggagtgtctgtttagtaggtgagagagggtgcggtgaattgaggagggaggaggatagtgatagagaggaagagggggaggcggatgaacgaactagatatttataaccagcaaacatcatgatcgcagaatagccaattatataattatttgtgggaacagtacaacatatcccctctatttaatgactatcaaacatggagacatagcaaaaatacacacaaaaatatattaacaataatcaactatctacagaattaagacaaataataagtaaattagataaaaatatactattaatctacacatagttgtcaaaaaccagccgctgcatatacatatctcacaatacagcatctatagtcaaacacataaataactaaatactataataaagtataaatttgcagagcaccatatcatatatcattaacaagactgtcgaggtggccgcatcttatggattagaagggccaggcggagacaggatagagcgaagaagaagcatggacctgatgtaggggaggaatagagagaggacgagccgggagtgcaatgccacgatgagaacacatgcaagaatacggaggacgggggatggagcttagggacgggagtaggagggaaagggtgaggaagtgaaggagggtaggagatgatagggaagagagaagaaaggaggatgtgaggagagaggggtggaaagagaggagagatgggcatgaaatcgaaggagtaggaagtggtcgaaaatgagataagatagagaggggaggaaggagtaaggagagggagaaaggtgaagagtgaggaagaaagtggatagaggagagaggaggagaggaggtggagcgtggtga

SEQ ID NO: 74235 - DNA, 623 bp, Homo sapiens
gcggccgcctactactactaaattcgcggccgcgtcgacaacaactataactgttaaacttaagttccagcttttctcaagttagttataggatgtacttaagcagtaagcgtatttaggtaaaagcagttgaattatgttaaatgttgccctttgccacgttaaattgaacactgttttggatgcatgttgaaagacatgcttttatttttttgtaaaacaatataggaggctgtgtctactattaaaagtgaaacattttggcatgtttgttaattctagtttcatttaataacctgtaaggcacgtaagtttattttatttttttgtaaaacaatataggctgtgtctactattaaaagtgaaacattttggcatgtttgttaattctagtttcatttaataacctgtaaggcacgtaagtttaagctttttttttttttaagttaatgggaaaaatttgagacgcaataccaatacttaggattttggtcttggtgtttgtatgaaattctgaggccttgatttaaatctttcattgtattgtgatttccttttaggtatattgcgctaagtgaaacttgtcaaataaatcctccttttaaaaactgcaaaaaaaaaaa

SEQ ID NO: 74236 - DNA, 2035 bp, Homo sapiens
ggcacgagggccacgcagaagtcgcgtgtctaggtgagtcgcggtgggtcctcgcttgcagttcagcgaccacgtttgtttcgacgccggaccgcgtaagagacgatgatgttgggcacggaaggtggagagggattcgtggtgaaggtccggggcttgccctggtcttgctcggccgatgaagtgcagaggtttttttctgactgcaaaattcaaaatggggctcaaggtattcgtttcatctacaccagagaaggcagaccaagtggcgaggcttttgttgaacttgaatcagaagatgaagtcaaattggccctgaaaaaagacagagaaactatgggacacagatatgttgaagtattcaagtcaaacaacgttgaaatggattgggtgttgaagcatactggtccaaatagtcctgacacggccaatgatggctttgtacggcttagaggacttccctttggatgtagcaaggaagaaattgttcagttcttctcagggttggaaatcgtgccaaatgggataacattgccggtggacttccaggggaggagtacgggggaggccttcgtgcagtttgcttcacaggaaatagctgaaaaggctctaaagaaacacaaggaaagaatagggcacaggtatattgaaatctttaagagcagtagagctgaagttagaactcattatgatccaccacgaaagcttatggccatgcagcggccaggtccttatgacagacctggggctggtagagggtataacagcattggcagaggagctggctttgagaggatgaggcgtggtgcttatggtggaggctatggaggctatgatgattacaatggctataatgatggctatggatttgggtcagatagatttggaagagacctcaattactgtttttcaggaatgtctgatcacagatacggggatggtggctctactttccagagcacaacaggacactgtgtacacatgcggggattaccttacagagctactgagaatgacatttataattttttttcaccgctcaaccctgtgagagtacacattgaaattggtcctgatggcagagtaactggtgaagcagatgtcgagttcgcaactcatgaagatgctgtggcagctatgtcaaaagacaaagcaaatatgcaacacagatatgtagaactcttcttgaattctacagcaggagcaagcggtggtgcttacgaacacagatatgtagaactcttcttgaattctacagcaggagcaagcggtggtgcttatggtagccaaatgatgggaggcatgggcttgtcaaaccagtccagctacgggggcccagccagccagcagctgagtgggggttacggaggcggctacggtggccagagcagcatgagtggatacgaccaagttttacaggaaaactccagtgattttcaatcaaacattgcataggtaaccaaggagcagtgaacagcagctactacagtagtggaagccgtgcatctatgggcgtgaacggaatgggagggttgtctagcatgtccagtatgagtggtggatggggaatgtaattgatcgatcctgatcactgactcttggtcaacctttttttttttttttttttctttaagaaaacttcagtttaacagtttctgcaatacaagcttgtgatttatgcttactctaagtggaaatcaggattgttatgaagacttaaggcccagtatttttgaatacaatactcatctaggatgtaacagtgaagctgagtaaactataactgttaaacttaagttccagcttttctcaagttagttataggatgtacttaagcagtaagcgtatttaggtaaaagcagttgaattatgttaaatgttgccctttgccacgttaaattgaacactgttttggatgcatgttgaaagacatgcttttatttttttgtaaaacaatataggagtgtaactggagctgttgtaacagaggctaggagggatcctgctagtgtcgacgggaaaacacgcgggttta

SEQ ID NO: 74237 - DNA, 3762 bp, Homo sapiens
gctgctctgggtgcacgtccacttggacttgttctcttcatagtgagcactggtcttaatgtatctggccagctctatctgcatgtcgccgaaaaggggcaacacatgcagctgcctggagagagggagccggtgtcctacgtcagagccgccgccgccgcggagccgccgccggggaggagcagccgctgccgcccaggactgggcccttagggaggaggaggcgagaagatggcggacgaccccagtgctgccgacaggaacgtggagatctggaagatcaagaagctcattaagagcttggaggcggcccgcggcaatggcaccagcatgatatcattgatcattcctcccaaagaccagatttcacgagtggcaaaaatgttagcggatgagtttggaactgcatctaacattaagtcacgagtaaaccgcctttcagtcctgggagccattacatctgtacaacaaagactcaaactttataacaaagtacctccaaatggtctggttgtatactgtggaacaattgtaacagaagaaggaaaggaaaagaaagtcaacattgactttgaacctttcaaaccaattaatacgtcattgtatttgtgtgacaacaaattccatacagaggctcttacagcactactttcagatgatagcaagtttggattcattgtaatagatggtagtggtgcactttttggcacactccaaggaaacacaagagaagtcctgcacaaattcactgtggatctcccaaagaaacacggtagaggaggtcagtcagccttgcgttttgcccgtttaagaatggaaaagcgacataactatgttcggaaagtagcagagactgctgtgcagctgtttatttctggggacaaagtgaatgtggctggtctagttttagctggatccgctgactttaaaactgaactaagtcaatctgatatgtttgatcagaggttacaatcaaaagttttaaaattagttgatatatcctatggtggtgaaaatggattcaaccaagctattgagttatctactgaagtcctctccaacgtgaaattcattcaagagaagaaattaataggacgatactttgatgaaatcagccaggacacgggcaagtactgttttggcgttgaagatacactaaaggctttggaaatgggagctgtagaaattctaatagtctatgaaaatctggatataatgagatatgttcttcattgccaaggcacagaagaggagaaaattctctatctaactccagagcaagaaaaggataaatctcatttcacagacaaagagaccggacaggaacatgagcttatcgagagcatgcccctgttggaatggtttgctaacaactataaaaaatttggagctacgttggaaattgtcacagataaatcacaagaagggtctcagtttgtgaaaggatttggtggaattggaggtatcttgcggtaccgagtagatttccagggaatggaataccaaggaggagacgatgaattttttgaccttgatgactactaggtagtcgacatgggtccggcaaaacgtgcctcaccctccagcatccaacccaaggagcatacccatggtggaatccaaacagatccctgccttacaattggaacatttccagaacttaatccatgagcattggatattgaaaagaaaaccgaaacaaaaccagacccagccctacactttggtttgtcatggtgtcagcgcagcagcctacaactaagttcctaaacgccactttggactaatttaaaaaagaatcccagtttttacttttactggatggtgaaattggttgctcttgtattttatgaaaaaaaatgatttttttaaccttcatacatagaagcaaaaatactttaactgctgtaaaccttcaaaagttaatagaagtgagatcatactggtttgtttcttattttgattggagaaaaattaaattgctgcatttcgcagtgacccatttacatggcattctcagcttagactgcgtaagaagaaatatatgtggtgaaatgttggaaccatttctctcttggtctctgtttaatgttgaaagggtgagctaataggaggcactttcaacttcactccctcacgctaccccgtccccctccagactggcagtttcaaggatgcaaattgcattgcaaaatcaaactgactcatgaagcatttgggccagtgcactgtttacttccatctgtttgcagacacatttgtgcccggcgtttgggagccctttgtatcaatgttctgacaagggtccctataaccttaacctactcgaaaccggtttgggatggatatgatggggcttctgtgctattgctgggattgggagaaataaaacatgcaatttaagtggaagcgaagaaatttaaagaggattttattttgcttgggtcaatccttgttaaaagggaggtggatgtgttttccttgtgttggatggcatgagattatgtgaatgttttgatttattaaaatgaactgcaaggtttttcacaggaacgacagacatgtatgactgcatgtaattataaactcctgacctcctggtggggttggagcatctgtttcaaatgtgggacttacaagcacttctcacatgagaaattaggggcgggtgggaagggatgggacacagcttctggcaccatggatttaagaccatgttggatccaaaagttggcctgaaaccctgaagctgatgcttcacagctgggctgtaagtcagacttgaacccagctgatatgcaaggtcatggcgtgcccagggtggtgacagttgaacaaagtgtatagtacgtgcccagtggtagcgatggaaaaaagtataccaaatggactttgaaggaccaaaggttttaaaagtcaattggtatcacctccacactgactagggtagtggggtgcatttggttttcaaattgggtacttttaacactttagtgcctgactgctgttctttactgacttgattcagtcactcgtagctttattggtctgaaccagctccttgttcccaggttacagacctgcctatcgttccaataatcctgtttcacttgaatgaagggagtatgtcttaaatgtaaagtttctggttctcacactgtactctgaggtccaaatactgtctgtcaatgtgtaacctgatgtctcaaccccctgtgagaagagtccattatttggtgttcaccaacgtgggagacttcaccggaacaggcttttttgctttgggctctgctatttgtttgcagaacacccaagagcgagcaaacatgctctcttcacagcagtaccttagggttttgccattgtaaatgggtctgatgtgatatgacaagaccagagaaattggatgtaaatttacatttttgaatatgcttgttgtttcacatgatacatttagggtatgcagctccttttgtagtttttatttttactatttaagtttggaaatgatgccaaatttttgtatttctttaatcaatgtgttctcttcggtgatatatattgcattatatattgatgtgtgtatcaatatatattgatatgtattacacttacacatacaaacacatataagagggggtgaaaaccgtagcctttgcattctctatagcctctgcagagagatactaagcagcaaaatcttggtgttgtgatgtacagaaatggagaagagtattaaaccatatttaagaataaaaaatg

SEQ ID NO: 74238 - DNA, 3893 bp, Homo sapiens
agcgggtcacaggccccatgtgagcggattgcaacacatgcagctgcctggagagagggagccggtgtcctacgtcagagccgccgccgccgcggagccgccgccggggaggagcagccgctgccgcccaggactgggcccttagggaggaggaggcgagaagatggcggacgaccccagtgctgccgacaggaacgtggagatctggaagatcaagaagctcattaagagcttggaggcggcccgcgggtgagcgccgcgtccggcaccctccgtgccctcttggttcccggacccctcaggatggacgcccccgcgccgcatggccggatgaggagaaccaggcactagccaactcccgccttctggatctctgggtagtagcccctgacccaggggcgagggtcggcgcggttggcccgagaaggggtcctttccccgcatggggcaatggcaccagcatgatatcattgatcattcctcccaaagaccagatttcacgagtggcaaaaatgttagcggatgagtttggaactgcatctaacattaagtcacgagtaaaccgcctttcagtcctgggagccattacatctgtacaacaaagactcaaactttataacaaagtacctccaaatggtctggttgtatactgtggaacaattgtaacagaagaaggaaaggaaaagaaagtcaacattgactttgaacctttcaaaccaattaatacgtcattgtatttgtgtgacaacaaattccatacagaggctcttacagcactactttcagatgatagcaagtttggattcattgtaatagatggtagtggtgcactttttggcacactccaaggaaacacaagagaagtcctgcacaaattcactgtggatctcccaaagaaacacggtagaggaggtcagtcagccttgcgttttgcccgtttaagaatggaaaagcgacataactatgttcggaaagtagcagagactgctgtgcagctgtttatttctggggacaaagtgaatgtggctggtctagttttagctggatccgctgactttaaaactgaactaagtcaatctgatatgtttgatcagaggttacaatcaaaagttttaaaattagttgatatatcctatggtggtgaaaatggattcaaccaagctattgagttatctactgaagtcctctccaacgtgaaattcattcaagagaagaaattaataggacgatactttgatgaaatcagccaggacacgggcaagtactgttttggcgttgaagatacactaaaggctttggaaatgggagctgtagaaattctaatagtctatgaaaatctggatataatgagatatgttcttcattgccaaggcacagaagaggagaaaattctctatctaactccagagcaagaaaaggataaatctcatttcacagacaaagagaccggacaggaacatgagcttatcgagagcatgcccctgttggaatggtttgctaacaactataaaaaatttggagctacgttggaaattgtcacagataaatcacaagaagggtctcagtttgtgaaaggatttggtggaattggaggtatcttgcggtaccgagtagatttccagggaatggaataccaaggaggagacgatgaattttttgaccttgatgactactaggtagtcgacatgggtccggcaaaacgtgcctcaccctccagcatccaacccaaggagcatacccatggtggaatccaaacagatccctgccttacaattggaacatttccagaacttaatccatgagcattggatattgaaaagaaaaccgaaacaaaaccagacccagccctacactttggtttgtcatggtgtcagcgcagcagcctacaactaagttcctaaacgccactttggactaatttaaaaaagaatcccagtttttacttttactggatggtgaaattggttgctcttgtattttatgaaaaaaaatgatttttttaaccttcatacatagaagcaaaaatactttaactgctgtaaaccttcaaaagttaatagaagtgagatcatactggtttgtttcttattttgattggagaaaaattaaattgctgcatttcgcagtgacccatttacatggcattctcagcttagactgcgtaagaagaaatatatgtggtgaaatgttggaaccatttctctcttggtctctgtttaatgttgaaagggtgagctaataggaggcactttcaacttcactccctcacgctaccccgtccccctccagactggcagtttcaaggatgcaaattgcattgcaaaatcaaactgactcatgaagcatttgggccagtgcactgtttacttccatctgtttgcagacacatttgtgcccggcgtttgggagccctttgtatcaatgttctgacaagggtccctataaccttaacctactcgaaaccggtttgggatggatatgatggggcttctgtgctattgctgggattgggagaaataaaacatgcaatttaagtggaagcgaagaaatttaaagaggattttattttgcttgggtcaatccttgttaaaagggaggtggatgtgttttccttgtgttggatggcatgagattatgtgaatgttttgatttattaaaatgaactgcaaggtttttcacaggaacgacagacatgtatgactgcatgtaattataaactcctgacctcctggtggggttggagcatctgtttcaaatgtgggacttacaagcacttctcacatgagaaattaggggcgggtgggaagggatgggacacagcttctggcaccatggatttaagaccatgttggatccaaaagttggcctgaaaccctgaagctgatgcttcacagctgggctgtaagtcagacttgaacccagctgatatgcaaggtcatggcgtgcccagggtggtgacagttgaacaaagtgtatagtacgtgcccagtggtagcgatggaaaaaagtataccaaatggactttgaaggaccaaaggttttaaaagtcaattggtatcacctccacactgactagggtagtggggtgcatttggttttcaaattgggtacttttaacactttagtgcctgactgctgttctttactgacttgattcagtcactcgtagctttattggtctgaaccagctccttgttcccaggttacagacctgcctatcgttccaataatcctgtttcacttgaatgaagggagtatgtcttaaatgtaaagtttctggttctcacactgtactctgaggtccaaatactgtctgtcaatgtgtaacctgatgtctcaaccccctgtgagaagagtccattatttggtgttcaccaacgtgggagacttcaccggaacaggcttttttgctttgggctctgctatttgtttgcagaacacccaagagcgagcaaacatgctctcttcacagcagtaccttagggttttgccattgtaaatgggtctgatgtgatatgacaagaccagagaaattggatgtaaatttacatttttgaatatgcttgttgtttcacatgatacatttagggtatgcagctccttttgtagtttttatttttactatttaagtttggaaatgatgccaaatttttgtatttctttaatcaatgtgttctcttcggtgatatatattgcattatatattgatgtgtgtatcaatatatattgatatgtattacacttacacatacaaacacatataagagggggtgaaaaccgtagcctttgcattctctatagcctctgcagagagatactaagcagcaaaatcttggtgttgtgatgtacagaaatggagaagagtattaaaccatatttaagaataaaaaatg

SEQ ID NO: 74239 - DNA, 3694 bp, Homo sapiens
agcgggtcacaggccccatgtgagcggattgcaacacatgcagctgcctggagagagggagccggtgtcctacgtcagagccgccgccgccgcggagccgccgccggggaggagcagccgctgccgcccaggactgggcccttagggaggaggaggcgagaagatggcggacgaccccagtgctgccgacaggaacgtggagatctggaagatcaagaagctcattaagagcttggaggcggcccgcggcaatggcaccagcatgatatcattgatcattcctcccaaagaccagatttcacgagtggcaaaaatgttagcggatgagtttggaactgcatctaacattaagtcacgagtaaaccgcctttcagtcctgggagccattacatctgtacaacaaagactcaaactttataacaaagtacctccaaatggtctggttgtatactgtggaacaattgtaacagaagaaggaaaggaaaagaaagtcaacattgactttgaacctttcaaaccaattaatacgtcattgtatttgtgtgacaacaaattccatacagaggctcttacagcactactttcagatgatagcaagtttggattcattgtaatagatggtagtggtgcactttttggcacactccaaggaaacacaagagaagtcctgcacaaattcactgtggatctcccaaagaaacacggtagaggaggtcagtcagccttgcgttttgcccgtttaagaatggaaaagcgacataactatgttcggaaagtagcagagactgctgtgcagctgtttatttctggggacaaagtgaatgtggctggtctagttttagctggatccgctgactttaaaactgaactaagtcaatctgatatgtttgatcagaggttacaatcaaaagttttaaaattagttgatatatcctatggtggtgaaaatggattcaaccaagctattgagttatctactgaagtcctctccaacgtgaaattcattcaagagaagaaattaataggacgatactttgatgaaatcagccaggacacgggcaagtactgttttggcgttgaagatacactaaaggctttggaaatgggagctgtagaaattctaatagtctatgaaaatctggatataatgagatatgttcttcattgccaaggcacagaagaggagaaaattctctatctaactccagagcaagaaaaggataaatctcatttcacagacaaagagaccggacaggaacatgagcttatcgagagcatgcccctgttggaatggtttgctaacaactataaaaaatttggagctacgttggaaattgtcacagataaatcacaagaagggtctcagtttgtgaaaggatttggtggaattggaggtatcttgcggtaccgagtagatttccagggaatggaataccaaggaggagacgatgaattttttgaccttgatgactactaggtagtcgacatgggtccggcaaaacgtgcctcaccctccagcatccaacccaaggagcatacccatggtggaatccaaacagatccctgccttacaattggaacatttccagaacttaatccatgagcattggatattgaaaagaaaaccgaaacaaaaccagacccagccctacactttggtttgtcatggtgtcagcgcagcagcctacaactaagttcctaaacgccactttggactaatttaaaaaagaatcccagtttttacttttactggatggtgaaattggttgctcttgtattttatgaaaaaaaatgatttttttaaccttcatacatagaagcaaaaatactttaactgctgtaaaccttcaaaagttaatagaagtgagatcatactggtttgtttcttattttgattggagaaaaattaaattgctgcatttcgcagtgacccatttacatggcattctcagcttagactgcgtaagaagaaatatatgtggtgaaatgttggaaccatttctctcttggtctctgtttaatgttgaaagggtgagctaataggaggcactttcaacttcactccctcacgctaccccgtccccctccagactggcagtttcaaggatgcaaattgcattgcaaaatcaaactgactcatgaagcatttgggccagtgcactgtttacttccatctgtttgcagacacatttgtgcccggcgtttgggagccctttgtatcaatgttctgacaagggtccctataaccttaacctactcgaaaccggtttgggatggatatgatggggcttctgtgctattgctgggattgggagaaataaaacatgcaatttaagtggaagcgaagaaatttaaagaggattttattttgcttgggtcaatccttgttaaaagggaggtggatgtgttttccttgtgttggatggcatgagattatgtgaatgttttgatttattaaaatgaactgcaaggtttttcacaggaacgacagacatgtatgactgcatgtaattataaactcctgacctcctggtggggttggagcatctgtttcaaatgtgggacttacaagcacttctcacatgagaaattaggggcgggtgggaagggatgggacacagcttctggcaccatggatttaagaccatgttggatccaaaagttggcctgaaaccctgaagctgatgcttcacagctgggctgtaagtcagacttgaacccagctgatatgcaaggtcatggcgtgcccagggtggtgacagttgaacaaagtgtatagtacgtgcccagtggtagcgatggaaaaaagtataccaaatggactttgaaggaccaaaggttttaaaagtcaattggtatcacctccacactgactagggtagtggggtgcatttggttttcaaattgggtacttttaacactttagtgcctgactgctgttctttactgacttgattcagtcactcgtagctttattggtctgaaccagctccttgttcccaggttacagacctgcctatcgttccaataatcctgtttcacttgaatgaagggagtatgtcttaaatgtaaagtttctggttctcacactgtactctgaggtccaaatactgtctgtcaatgtgtaacctgatgtctcaaccccctgtgagaagagtccattatttggtgttcaccaacgtgggagacttcaccggaacaggcttttttgctttgggctctgctatttgtttgcagaacacccaagagcgagcaaacatgctctcttcacagcagtaccttagggttttgccattgtaaatgggtctgatgtgatatgacaagaccagagaaattggatgtaaatttacatttttgaatatgcttgttgtttcacatgatacatttagggtatgcagctccttttgtagtttttatttttactatttaagtttggaaatgatgccaaatttttgtatttctttaatcaatgtgttctcttcggtgatatatattgcattatatattgatgtgtgtatcaatatatattgatatgtattacacttacacatacaaacacatataagagggggtgaaaaccgtagcctttgcattctctatagcctctgcagagagatactaagcagcaaaatcttggtgttgtgatgtacagaaatggagaagagtattaaaccatatttaagaataaaaaatg

SEQ ID NO: 74240 - DNA, 3532 bp, Homo sapiens
gctgctctgggtgcacgtccacttggacttgttctcttcatagtgagcactggtcttaatgtatctggccagctctatctgcatgtcgccgaaaaggggcaacacatgcagctgcctggagagagggagccggtgtcctacgtcagagccgccgccgccgcggagccgccgccggggaggagcagccgctgccgcccaggactgggcccttagggaggaggaggcgagaagatggcggacgaccccagtgctgccgacaggaacgtggagatctggaagatcaagaagctcattaagagcttggaggcggcccgcggcaatggcaccagcatgatatcattgatcattcctcccaaagaccagatttcacgagtggcaaaaatgttagcggatgagtttggaactgcatctaacattaagtcacgagtaaaccgcctttcagtcctgggagccattacatctgtacaacaaagactcaaactttataacaaagtacctccaaatggtctggttgtatactgtggaacaattgtaacagaagaaggaaaggaaaagaaagtcaacattgactttgaacctttcaaaccaattaatacgtcattgtatttgtgtgacaacaaattccatacagaggctcttacagcactactttcagatgatagcaagtttggattcattgtaatagatggtagtggtgcactttttggcacactccaaggaaacacaagagaagtcctgcacaaattcactgtggatctcccaaagaaacacggtagaggaggtcagtcagccttgcgttttgcccgtttaagaatggaaaagcgacataactatgttcggaaagtagcagagactgctgtgcagctgtttatttctggggacaaagtgaatgtggctggtctagttttagctggatccgctgactttaaaactgaactaagtcaatctgatatgtttgatcagaggttacaatcaaaagttttaaaattagttgatatatcctatggtggtgaaaatggattcaaccaagctattgagttatctactgaagtcctctccaacgtgaaattcattcaagagaagaaattaataggacgatactttgatgaaatcagccaggacacgggcaagtactgttttggcgttgaagatacactaaaggctttggaaatgggagctgtagaaattctaatagtctatgaaaatctggatataatgagatatgttcttcattgccaaggcacagaagaggagaaaattctctatctaactccagagcaagaaaaggataaatctcatttcacagacaaagagaccggacaggaacatgagcttatcgagagcatgcccctgttggaatggtttgctaacaactataaaaaatttggagctacgttggaaattgtcacagataaatcacaagaagggtctcagtttgtgaaaggatttggtggaattggaggtatcttgcggtaccgagtagatttccagggaatggaataccaaggaggagacgatgaattttttgaccttgatgactactaggtagtcgacatgggtccggcaaaacgtgcctcaccctccagcatccaacccaaggagcatacccatggtggaatccaaacagatccctgccttacaattggaacatttccagaacttaatccatgagcattggatattgaaaagaaaaccgaaacaaaaccagacccagccctacactttggtttgtcatggtgtcagcgcagcagcctacaactaagttcctaaacgccactttggactaatttaaaaaagaatcccagtttttacttttactggatggtgaaattggttgctcttgtattttatgaaaaaaaatgatttttttaaccttcatacatagaagcaaaaatactttaactgctgtaaaccttcaaaagttaatagaagtgagatcatactggtttgtttcttattttgattggagaaaaattaaattgctgcatttcgcagtgacccatttacatggcattctcagcttagactgcgtaagaagaaatatatgtggtgaaatgttggaaccatttctctcttggtctctgtttaatgttgaaagggtgagctaataggaggcactttcaacttcactccctcacgctaccccgtccccctccagactggcagtttcaaggatgcaaattgcattgcaaaatcaaactgactcatgaagcatttgggccagtgcactgtttacttccatctgtttgcagacacatttgtgcccggcgtttgggagccctttgtatcaatgttctgacaagggtccctataaccttaacctactcgaaaccggtttgggatggatatgatggggcttctgtgctattgctgggattgggagaaataaaacatgcaatttaagtggaagcgaagaaatttaaagaggattttattttgcttgggtcaatccttgttaaaagggaggtggatgtgttttccttgtgttggatggcatgagattatgtgaatgttttgatttattaaaatgaactgcaaggtttttcacaggaacgacagacatgtatgactgcatgtaattataaactcctgacctcctggtggggttggagcatctgtttcaaatgtgggacttacaagcacttctcacatgagaaattaggggcgggtgggaagggatgggacacagcttctggcaccatggatttaagaccatgttggatccaaaagttggcctgaaaccctgaagctgatgcttcacagctgggctgtaagtcagacttgaacccagctgatatgcaaggtcatggcgtgcccagggtggtgacagttgaacaaagtgtatagtacgtgcccagtggtagcgatggaaaaaagtataccaaatggactttgaaggaccaaaggttttaaaagtcaattggtatcacctccacactgactagggtagtggggtgcatttggttttcaaattgggtacttttaacactttagtgcctgactgctgttctttactgacttgattcagtcactcgtagctttattggtctgaaccagctccttgttcccaggttacagacctgcctatcgttccaataatcctgtttcaagcagtaccttagggttttgccattgtaaatgggtctgatgtgatatgacaagaccagagaaattggatgtaaatttacatttttgaatatgcttgttgtttcacatgatacatttagggtatgcagctccttttgtagtttttatttttactatttaagtttggaaatgatgccaaatttttgtatttctttaatcaatgtgttctcttcggtgatatatattgcattatatattgatgtgtgtatcaatatatattgatatgtattacacttacacatacaaacacatataagagggggtgaaaaccgtagcctttgcattctctatagcctctgcagagagatactaagcagcaaaatcttggtgttgtgatgtacagaaatggagaagagtattaaaccatatttaagaataaaaaatg

SEQ ID NO: 74241 - DNA, 3317 bp, Homo sapiens
gctgctctgggtgcacgtccacttggacttgttctcttcatagtgagcactggtcttaatgtatctggccagctctatctgcatgtcgccgaaaaggggcaacacatgcagctgcctggagagagggagccggtgtcctacgtcagagccgccgccgccgcggagccgccgccggggaggagcagccgctgccgcccaggactgggcccttagggaggaggaggcgagaagatggcggacgaccccagtgctgccgacaggaacgtggagatctggaagatcaagaagctcattaagagcttggaggcggcccgcggcaatggcaccagcatgatatcattgatcattcctcccaaagaccagatttcacgagtggcaaaaatgttagcggatgagtttggaactgcatctaacattaagtcacgagtaaaccgcctttcagtcctgggagccattacatctgtacaacaaagactcaaactttataacaaagtacctccaaatggtctggttgtatactgtggaacaattgtaacagaagaaggaaaggaaaagaaagtcaacattgactttgaacctttcaaaccaattaatacgtcattgtatttgtgtgacaacaaattccatacagaggctcttacagcactactttcagatgatagcaagtttggattcattgtaatagatggtagtggtgcactttttggcacactccaaggaaacacaagagaagtcctgcacaaattcactgtggatctcccaaagaaacacggtagaggaggtcagtcagccttgcgttttgcccgtttaagaatggaaaagcgacataactatgttcggaaagtagcagagactgctgtgcagctgtttatttctggggacaaagtgaatgtggctggtctagttttagctggatccgctgactttaaaactgaactaagtcaatctgatatgtttgatcagaggttacaatcaaaagttttaaaattagttgatatatcctatggtggtgaaaatggattcaaccaagctattgagttatctactgaagtcctctccaacgtgaaattcattcaagagaagaaattaataggacgatactttgatgaaatcagccaggacacgggcaagtactgttttggcgttgaagatacactaaaggctttggaaatgggagctgtagaaattctaatagtctatgaaaatctggatataatgagatatgttcttcattgccaaggcacagaagaggagaaaattctctatctaactccagagcaagaaaaggataaatctcatttcacagacaaagagaccggacaggaacatgagcttatcgagagcatgcccctgttggaatggtttgctaacaactataaaaaatttggagctacgttggaaattgtcacagataaatcacaagaagggtctcagtttgtgaaaggatttggtggaattggaggtatcttgcggtaccgagtagatttccagggaatggaataccaaggaggagacgatgaattttttgaccttgatgactactaggtagtcgacatgggtccggcaaaacgtgcctcaccctccagcatccaacccaaggagcatacccatggtggaatccaaacagatccctgccttacaattggaacatttccagaacttaatccatgagcattggatattgaaaagaaaaccgaaacaaaaccagacccagccctacactttggtttgtcatggtgtcagcgcagcagcctacaactaagttcctaaacgccactttggactaatttaaaaaagaatcccagtttttacttttactggatggtgaaattggttgctcttgtattttatgaaaaaaaatgatttttttaaccttcatacatagaagcaaaaatactttaactgctgtaaaccttcaaaagttaatagaagtgagatcatactggtttgtttcttattttgattggagaaaaattaaattgctgcatttcgcagtgacccatttacatggcattctcagcttagactgcgtaagaagaaatatatgtggtgaaatgttggaaccatttctctcttggtctctgtttaatgttgaaagggtgagctaataggaggcactttcaacttcactccctcacgctaccccgtccccctccagactggcagtttcaaggatgcaaattgcattgcaaaatcaaactgactcatgaagcatttgggccagtgcactgtttacttccatctgtttgcagacacatttgtgcccggcgtttgggagccctttgtatcaatgttctgacaagggtccctataaccttaacctactcgaaaccggtttgggatggatatgatggggcttctgtgctattgctgggattgggagaaataaaacatgcaatttaagtggaagcgaagaaatttaaagaggattttattttgcttgggtcaatccttgttaaaagggaggtggatgtgttttccttgtgttggatggcatgagattatgtgaatgttttgatttattaaaatgaactgcaaggtttttcacaggaacgacagacatgtatgactgcatgtaattataaactcctgacctcctggtggggttggagcatctgtttcaaatgtgggacttacaagcacttctcacatgagaaattaggggcgggtgggaagggatgggacacagcttctggcaccatggatttaagaccatgttggatccaaaagttggcctgaaaccctgaagctgatgcttcacagctgggctgtaagtcagacttgaacccagctgatatgcaaggtcatggcgtgcccagggtggtgacagttgaacaaagtgtatagtacgtgcccagtggtagcgatggaaaaaagtataccaaatggactttgaaggaccaaaggttttaaaagtcaattggtatcacctccacactgactagggtagtggggtgcatttggttttcaaattgggtacttttaacactttagtgcctgactgctgttctttactgacttgattcagtcactcgtagctttattggtctgaaccagctccttgttcccaggttacagacctgcctatcgttccaataatcctgtttcacttgaatgaagggagtatgtcttaaatgtaaagtttctggttctcacactgtactctgaggtccaaatactgtctgtcaatgtgtaacctgatgtctcaaccccctgtgagaagagtccattatttggtgttcaccaacgtgggagacttcaccggaacaggcttttttgctttgggcgtcgacgcggccgcgaatttagtagtagta

SEQ ID NO: 74242 - DNA, 3890 bp, Homo sapiens
gctgctctgggtgcacgtccacttggacttgttctcttcatagtgagcactggtcttaatgtatctggccagctctatctgcatgtcgccgaaaaggggcaacacatgcagctgcctggagagagggagccggtgtcctacgtcagagccgccgccgccgcggagccgccgccggggaggagcagccgctgccgcccaggactgggcccttagggaggaggaggcgagaagatggcggacgaccccagtgctgccgacaggaacgtggagatctggaagatcaagaagctcattaagagcttggaggcggcccgcgggtgagcgccgcgtccggcaccctccgtgccctcttggttcccggacccctcaggatggacgcccccgcgccgcatggccggatgaggagaaccaggcactagccaactcccgccttctggatctctggcaatggcaccagcatgatatcattgatcattcctcccaaagaccagatttcacgagtggcaaaaatgttagcggatgagtttggaactgcatctaacattaagtcacgagtaaaccgcctttcagtcctgggagccattacatctgtacaacaaagactcaaactttataacaaagtacctccaaatggtctggttgtatactgtggaacaattgtaacagaagaaggaaaggaaaagaaagtcaacattgactttgaacctttcaaaccaattaatacgtcattgtatttgtgtgacaacaaattccatacagaggctcttacagcactactttcagatgatagcaagtttggattcattgtaatagatggtagtggtgcactttttggcacactccaaggaaacacaagagaagtcctgcacaaattcactgtggatctcccaaagaaacacggtagaggaggtcagtcagccttgcgttttgcccgtttaagaatggaaaagcgacataactatgttcggaaagtagcagagactgctgtgcagctgtttatttctggggacaaagtgaatgtggctggtctagttttagctggatccgctgactttaaaactgaactaagtcaatctgatatgtttgatcagaggttacaatcaaaagttttaaaattagttgatatatcctatggtggtgaaaatggattcaaccaagctattgagttatctactgaagtcctctccaacgtgaaattcattcaagagaagaaattaataggacgatactttgatgaaatcagccaggacacgggcaagtactgttttggcgttgaagatacactaaaggctttggaaatgggagctgtagaaattctaatagtctatgaaaatctggatataatgagatatgttcttcattgccaaggcacagaagaggagaaaattctctatctaactccagagcaagaaaaggataaatctcatttcacagacaaagagaccggacaggaacatgagcttatcgagagcatgcccctgttggaatggtttgctaacaactataaaaaatttggagctacgttggaaattgtcacagataaatcacaagaagggtctcagtttgtgaaaggatttggtggaattggaggtatcttgcggtaccgagtagatttccagggaatggaataccaaggaggagacgatgaattttttgaccttgatgactactaggtagtcgacatgggtccggcaaaacgtgcctcaccctccagcatccaacccaaggagcatacccatggtggaatccaaacagatccctgccttacaattggaacatttccagaacttaatccatgagcattggatattgaaaagaaaaccgaaacaaaaccagacccagccctacactttggtttgtcatggtgtcagcgcagcagcctacaactaagttcctaaacgccactttggactaatttaaaaaagaatcccagtttttacttttactggatggtgaaattggttgctcttgtattttatgaaaaaaaatgatttttttaaccttcatacatagaagcaaaaatactttaactgctgtaaaccttcaaaagttaatagaagtgagatcatactggtttgtttcttattttgattggagaaaaattaaattgctgcatttcgcagtgacccatttacatggcattctcagcttagactgcgtaagaagaaatatatgtggtgaaatgttggaaccatttctctcttggtctctgtttaatgttgaaagggtgagctaataggaggcactttcaacttcactccctcacgctaccccgtccccctccagactggcagtttcaaggatgcaaattgcattgcaaaatcaaactgactcatgaagcatttgggccagtgcactgtttacttccatctgtttgcagacacatttgtgcccggcgtttgggagccctttgtatcaatgttctgacaagggtccctataaccttaacctactcgaaaccggtttgggatggatatgatggggcttctgtgctattgctgggattgggagaaataaaacatgcaatttaagtggaagcgaagaaatttaaagaggattttattttgcttgggtcaatccttgttaaaagggaggtggatgtgttttccttgtgttggatggcatgagattatgtgaatgttttgatttattaaaatgaactgcaaggtttttcacaggaacgacagacatgtatgactgcatgtaattataaactcctgacctcctggtggggttggagcatctgtttcaaatgtgggacttacaagcacttctcacatgagaaattaggggcgggtgggaagggatgggacacagcttctggcaccatggatttaagaccatgttggatccaaaagttggcctgaaaccctgaagctgatgcttcacagctgggctgtaagtcagacttgaacccagctgatatgcaaggtcatggcgtgcccagggtggtgacagttgaacaaagtgtatagtacgtgcccagtggtagcgatggaaaaaagtataccaaatggactttgaaggaccaaaggttttaaaagtcaattggtatcacctccacactgactagggtagtggggtgcatttggttttcaaattgggtacttttaacactttagtgcctgactgctgttctttactgacttgattcagtcactcgtagctttattggtctgaaccagctccttgttcccaggttacagacctgcctatcgttccaataatcctgtttcacttgaatgaagggagtatgtcttaaatgtaaagtttctggttctcacactgtactctgaggtccaaatactgtctgtcaatgtgtaacctgatgtctcaaccccctgtgagaagagtccattatttggtgttcaccaacgtgggagacttcaccggaacaggcttttttgctttgggctctgctatttgtttgcagaacacccaagagcgagcaaacatgctctcttcacagcagtaccttagggttttgccattgtaaatgggtctgatgtgatatgacaagaccagagaaattggatgtaaatttacatttttgaatatgcttgttgtttcacatgatacatttagggtatgcagctccttttgtagtttttatttttactatttaagtttggaaatgatgccaaatttttgtatttctttaatcaatgtgttctcttcggtgatatatattgcattatatattgatgtgtgtatcaatatatattgatatgtattacacttacacatacaaacacatataagagggggtgaaaaccgtagcctttgcattctctatagcctctgcagagagatactaagcagcaaaatcttggtgttgtgatgtacagaaatggagaagagtattaaaccatatttaagaataaaaaatg

SEQ ID NO: 74243 - DNA, 3852 bp, Homo sapiens
agaaactttttacttacaggaagtgcccccccccccaaaaaaaagtgtttggaacattattacatacttgtatgtctgagcattcttagaatagtagaatggcctgcctcaggccatgtgaaaagttgatttcagcacaagaatttgacattctggtttccagcccaggattgtcatttatgggtagatttgcaattttagaatgacagcccctccaagctcttcattattactgttatatgaaacaggatgtgcttaattgtactgaaggcccaattcacagacgttaaccctctgggcgaagcattgatgaaagctttgataagccaaagtgcccctaaaaccaatgagaacaagaagagaatctgagtgcagaggcccctgggagctttgagggatacattgctcaatggcaccagcatgatatcattgatcattcctcccaaagaccagatttcacgagtggcaaaaatgttagcggatgagtttggaactgcatctaacattaagtcacgagtaaaccgcctttcagtcctgggagccattacatctgtacaacaaagactcaaactttataacaaagtacctccaaatggtctggttgtatactgtggaacaattgtaacagaagaaggaaaggaaaagaaagtcaacattgactttgaacctttcaaaccaattaatacgtcattgtatttgtgtgacaacaaattccatacagaggctcttacagcactactttcagatgatagcaagtttggattcattgtaatagatggtagtggtgcactttttggcacactccaaggaaacacaagagaagtcctgcacaaattcactgtggatctcccaaagaaacacggtagaggaggtcagtcagccttgcgttttgcccgtttaagaatggaaaagcgacataactatgttcggaaagtagcagagactgctgtgcagctgtttatttctggggacaaagtgaatgtggctggtctagttttagctggatccgctgactttaaaactgaactaagtcaatctgatatgtttgatcagaggttacaatcaaaagttttaaaattagttgatatatcctatggtggtgaaaatggattcaaccaagctattgagttatctactgaagtcctctccaacgtgaaattcattcaagagaagaaattaataggacgatactttgatgaaatcagccaggacacgggcaagtactgttttggcgttgaagatacactaaaggctttggaaatgggagctgtagaaattctaatagtctatgaaaatctggatataatgagatatgttcttcattgccaaggcacagaagaggagaaaattctctatctaactccagagcaagaaaaggataaatctcatttcacagacaaagagaccggacaggaacatgagcttatcgagagcatgcccctgttggaatggtttgctaacaactataaaaaatttggagctacgttggaaattgtcacagataaatcacaagaagggtctcagtttgtgaaaggatttggtggaattggaggtatcttgcggtaccgagtagatttccagggaatggaataccaaggaggagacgatgaattttttgaccttgatgactactaggtagtcgacatgggtccggcaaaacgtgcctcaccctccagcatccaacccaaggagcatacccatggtggaatccaaacagatccctgccttacaattggaacatttccagaacttaatccatgagcattggatattgaaaagaaaaccgaaacaaaaccagacccagccctacactttggtttgtcatggtgtcagcgcagcagcctacaactaagttcctaaacgccactttggactaatttaaaaaagaatcccagtttttacttttactggatggtgaaattggttgctcttgtattttatgaaaaaaaatgatttttttaaccttcatacatagaagcaaaaatactttaactgctgtaaaccttcaaaagttaatagaagtgagatcatactggtttgtttcttattttgattggagaaaaattaaattgctgcatttcgcagtgacccatttacatggcattctcagcttagactgcgtaagaagaaatatatgtggtgaaatgttggaaccatttctctcttggtctctgtttaatgttgaaagggtgagctaataggaggcactttcaacttcactccctcacgctaccccgtccccctccagactggcagtttcaaggatgcaaattgcattgcaaaatcaaactgactcatgaagcatttgggccagtgcactgtttacttccatctgtttgcagacacatttgtgcccggcgtttgggagccctttgtatcaatgttctgacaagggtccctataaccttaacctactcgaaaccggtttgggatggatatgatggggcttctgtgctattgctgggattgggagaaataaaacatgcaatttaagtggaagcgaagaaatttaaagaggattttattttgcttgggtcaatccttgttaaaagggaggtggatgtgttttccttgtgttggatggcatgagattatgtgaatgttttgatttattaaaatgaactgcaaggtttttcacaggaacgacagacatgtatgactgcatgtaattataaactcctgacctcctggtggggttggagcatctgtttcaaatgtgggacttacaagcacttctcacatgagaaattaggggcgggtgggaagggatgggacacagcttctggcaccatggatttaagaccatgttggatccaaaagttggcctgaaaccctgaagctgatgcttcacagctgggctgtaagtcagacttgaacccagctgatatgcaaggtcatggcgtgcccagggtggtgacagttgaacaaagtgtatagtacgtgcccagtggtagcgatggaaaaaagtataccaaatggactttgaaggaccaaaggttttaaaagtcaattggtatcacctccacactgactagggtagtggggtgcatttggttttcaaattgggtacttttaacactttagtgcctgactgctgttctttactgacttgattcagtcactcgtagctttattggtctgaaccagctccttgttcccaggttacagacctgcctatcgttccaataatcctgtttcacttgaatgaagggagtatgtcttaaatgtaaagtttctggttctcacactgtactctgaggtccaaatactgtctgtcaatgtgtaacctgatgtctcaaccccctgtgagaagagtccattatttggtgttcaccaacgtgggagacttcaccggaacaggcttttttgctttgggctctgctatttgtttgcagaacacccaagagcgagcaaacatgctctcttcacagcagtaccttagggttttgccattgtaaatgggtctgatgtgatatgacaagaccagagaaattggatgtaaatttacatttttgaatatgcttgttgtttcacatgatacatttagggtatgcagctccttttgtagtttttatttttactatttaagtttggaaatgatgccaaatttttgtatttctttaatcaatgtgttctcttcggtgatatatattgcattatatattgatgtgtgtatcaatatatattgatatgtattacacttacacatacaaacacatataagagggggtgaaaaccgtagcctttgcattctctatagcctctgcagagagatactaagcagcaaaatcttggtgttgtgatgtacagaaatggagaagagtattaaaccatatttaagaataaaaaatg

SEQ ID NO: 74244 - DNA, 3639 bp, Homo sapiens
agcgggtcacaggccccatgtgagcggattgcaacacatgcagctgcctggagagagggagccggtgtcctacgtcagagccgccgccgccgcggagccgccgccggggaggagcagccgctgccgcccaggactgggcccttagggaggaggaggcgagaagatggcggacgaccccagtgctgccgacaggaacgtggagatctggaagatcaagaagctcattaagagcttggaggcggcccgcggcaatggcaccagcatgatatcattgatcattcctcccaaagaccagatttcacgataaaccgcctttcagtcctgggagccattacatctgtacaacaaagactcaaactttataacaaagtacctccaaatggtctggttgtatactgtggaacaattgtaacagaagaaggaaaggaaaagaaagtcaacattgactttgaacctttcaaaccaattaatacgtcattgtatttgtgtgacaacaaattccatacagaggctcttacagcactactttcagatgatagcaagtttggattcattgtaatagatggtagtggtgcactttttggcacactccaaggaaacacaagagaagtcctgcacaaattcactgtggatctcccaaagaaacacggtagaggaggtcagtcagccttgcgttttgcccgtttaagaatggaaaagcgacataactatgttcggaaagtagcagagactgctgtgcagctgtttatttctggggacaaagtgaatgtggctggtctagttttagctggatccgctgactttaaaactgaactaagtcaatctgatatgtttgatcagaggttacaatcaaaagttttaaaattagttgatatatcctatggtggtgaaaatggattcaaccaagctattgagttatctactgaagtcctctccaacgtgaaattcattcaagagaagaaattaataggacgatactttgatgaaatcagccaggacacgggcaagtactgttttggcgttgaagatacactaaaggctttggaaatgggagctgtagaaattctaatagtctatgaaaatctggatataatgagatatgttcttcattgccaaggcacagaagaggagaaaattctctatctaactccagagcaagaaaaggataaatctcatttcacagacaaagagaccggacaggaacatgagcttatcgagagcatgcccctgttggaatggtttgctaacaactataaaaaatttggagctacgttggaaattgtcacagataaatcacaagaagggtctcagtttgtgaaaggatttggtggaattggaggtatcttgcggtaccgagtagatttccagggaatggaataccaaggaggagacgatgaattttttgaccttgatgactactaggtagtcgacatgggtccggcaaaacgtgcctcaccctccagcatccaacccaaggagcatacccatggtggaatccaaacagatccctgccttacaattggaacatttccagaacttaatccatgagcattggatattgaaaagaaaaccgaaacaaaaccagacccagccctacactttggtttgtcatggtgtcagcgcagcagcctacaactaagttcctaaacgccactttggactaatttaaaaaagaatcccagtttttacttttactggatggtgaaattggttgctcttgtattttatgaaaaaaaatgatttttttaaccttcatacatagaagcaaaaatactttaactgctgtaaaccttcaaaagttaatagaagtgagatcatactggtttgtttcttattttgattggagaaaaattaaattgctgcatttcgcagtgacccatttacatggcattctcagcttagactgcgtaagaagaaatatatgtggtgaaatgttggaaccatttctctcttggtctctgtttaatgttgaaagggtgagctaataggaggcactttcaacttcactccctcacgctaccccgtccccctccagactggcagtttcaaggatgcaaattgcattgcaaaatcaaactgactcatgaagcatttgggccagtgcactgtttacttccatctgtttgcagacacatttgtgcccggcgtttgggagccctttgtatcaatgttctgacaagggtccctataaccttaacctactcgaaaccggtttgggatggatatgatggggcttctgtgctattgctgggattgggagaaataaaacatgcaatttaagtggaagcgaagaaatttaaagaggattttattttgcttgggtcaatccttgttaaaagggaggtggatgtgttttccttgtgttggatggcatgagattatgtgaatgttttgatttattaaaatgaactgcaaggtttttcacaggaacgacagacatgtatgactgcatgtaattataaactcctgacctcctggtggggttggagcatctgtttcaaatgtgggacttacaagcacttctcacatgagaaattaggggcgggtgggaagggatgggacacagcttctggcaccatggatttaagaccatgttggatccaaaagttggcctgaaaccctgaagctgatgcttcacagctgggctgtaagtcagacttgaacccagctgatatgcaaggtcatggcgtgcccagggtggtgacagttgaacaaagtgtatagtacgtgcccagtggtagcgatggaaaaaagtataccaaatggactttgaaggaccaaaggttttaaaagtcaattggtatcacctccacactgactagggtagtggggtgcatttggttttcaaattgggtacttttaacactttagtgcctgactgctgttctttactgacttgattcagtcactcgtagctttattggtctgaaccagctccttgttcccaggttacagacctgcctatcgttccaataatcctgtttcacttgaatgaagggagtatgtcttaaatgtaaagtttctggttctcacactgtactctgaggtccaaatactgtctgtcaatgtgtaacctgatgtctcaaccccctgtgagaagagtccattatttggtgttcaccaacgtgggagacttcaccggaacaggcttttttgctttgggctctgctatttgtttgcagaacacccaagagcgagcaaacatgctctcttcacagcagtaccttagggttttgccattgtaaatgggtctgatgtgatatgacaagaccagagaaattggatgtaaatttacatttttgaatatgcttgttgtttcacatgatacatttagggtatgcagctccttttgtagtttttatttttactatttaagtttggaaatgatgccaaatttttgtatttctttaatcaatgtgttctcttcggtgatatatattgcattatatattgatgtgtgtatcaatatatattgatatgtattacacttacacatacaaacacatataagagggggtgaaaaccgtagcctttgcattctctatagcctctgcagagagatactaagcagcaaaatcttggtgttgtgatgtacagaaatggagaagagtattaaaccatatttaagaataaaaaatg

SEQ ID NO: 74245 - DNA, 3554 bp, Homo sapiens
agcgggtcacaggccccatgtgagcggattgcaacacatgcagctgcctggagagagggagccggtgtcctacgtcagagccgccgccgccgcggagccgccgccggggaggagcagccgctgccgcccaggactgggcccttagggaggaggaggcgagaagatggcggacgaccccagtgctgccgacaggaacgtggagatctggaagatcaagaagctcattaagagcttggaggcggcccgcggcaatggcaccagcatgatatcattgatcattcctcccaaagaccagatttcacgagtggcaaaaatgttagcggatgagtttggaactgcatctaacattaagtcacgagtaaaccgcctttcagtcctgggagccattacatctgtacaacaaagactcaaactttataacaaaggctcttacagcactactttcagatgatagcaagtttggattcattgtaatagatggtagtggtgcactttttggcacactccaaggaaacacaagagaagtcctgcacaaattcactgtggatctcccaaagaaacacggtagaggaggtcagtcagccttgcgttttgcccgtttaagaatggaaaagcgacataactatgttcggaaagtagcagagactgctgtgcagctgtttatttctggggacaaagtgaatgtggctggtctagttttagctggatccgctgactttaaaactgaactaagtcaatctgatatgtttgatcagaggttacaatcaaaagttttaaaattagttgatatatcctatggtggtgaaaatggattcaaccaagctattgagttatctactgaagtcctctccaacgtgaaattcattcaagagaagaaattaataggacgatactttgatgaaatcagccaggacacgggcaagtactgttttggcgttgaagatacactaaaggctttggaaatgggagctgtagaaattctaatagtctatgaaaatctggatataatgagatatgttcttcattgccaaggcacagaagaggagaaaattctctatctaactccagagcaagaaaaggataaatctcatttcacagacaaagagaccggacaggaacatgagcttatcgagagcatgcccctgttggaatggtttgctaacaactataaaaaatttggagctacgttggaaattgtcacagataaatcacaagaagggtctcagtttgtgaaaggatttggtggaattggaggtatcttgcggtaccgagtagatttccagggaatggaataccaaggaggagacgatgaattttttgaccttgatgactactaggtagtcgacatgggtccggcaaaacgtgcctcaccctccagcatccaacccaaggagcatacccatggtggaatccaaacagatccctgccttacaattggaacatttccagaacttaatccatgagcattggatattgaaaagaaaaccgaaacaaaaccagacccagccctacactttggtttgtcatggtgtcagcgcagcagcctacaactaagttcctaaacgccactttggactaatttaaaaaagaatcccagtttttacttttactggatggtgaaattggttgctcttgtattttatgaaaaaaaatgatttttttaaccttcatacatagaagcaaaaatactttaactgctgtaaaccttcaaaagttaatagaagtgagatcatactggtttgtttcttattttgattggagaaaaattaaattgctgcatttcgcagtgacccatttacatggcattctcagcttagactgcgtaagaagaaatatatgtggtgaaatgttggaaccatttctctcttggtctctgtttaatgttgaaagggtgagctaataggaggcactttcaacttcactccctcacgctaccccgtccccctccagactggcagtttcaaggatgcaaattgcattgcaaaatcaaactgactcatgaagcatttgggccagtgcactgtttacttccatctgtttgcagacacatttgtgcccggcgtttgggagccctttgtatcaatgttctgacaagggtccctataaccttaacctactcgaaaccggtttgggatggatatgatggggcttctgtgctattgctgggattgggagaaataaaacatgcaatttaagtggaagcgaagaaatttaaagaggattttattttgcttgggtcaatccttgttaaaagggaggtggatgtgttttccttgtgttggatggcatgagattatgtgaatgttttgatttattaaaatgaactgcaaggtttttcacaggaacgacagacatgtatgactgcatgtaattataaactcctgacctcctggtggggttggagcatctgtttcaaatgtgggacttacaagcacttctcacatgagaaattaggggcgggtgggaagggatgggacacagcttctggcaccatggatttaagaccatgttggatccaaaagttggcctgaaaccctgaagctgatgcttcacagctgggctgtaagtcagacttgaacccagctgatatgcaaggtcatggcgtgcccagggtggtgacagttgaacaaagtgtatagtacgtgcccagtggtagcgatggaaaaaagtataccaaatggactttgaaggaccaaaggttttaaaagtcaattggtatcacctccacactgactagggtagtggggtgcatttggttttcaaattgggtacttttaacactttagtgcctgactgctgttctttactgacttgattcagtcactcgtagctttattggtctgaaccagctccttgttcccaggttacagacctgcctatcgttccaataatcctgtttcacttgaatgaagggagtatgtcttaaatgtaaagtttctggttctcacactgtactctgaggtccaaatactgtctgtcaatgtgtaacctgatgtctcaaccccctgtgagaagagtccattatttggtgttcaccaacgtgggagacttcaccggaacaggcttttttgctttgggctctgctatttgtttgcagaacacccaagagcgagcaaacatgctctcttcacagcagtaccttagggttttgccattgtaaatgggtctgatgtgatatgacaagaccagagaaattggatgtaaatttacatttttgaatatgcttgttgtttcacatgatacatttagggtatgcagctccttttgtagtttttatttttactatttaagtttggaaatgatgccaaatttttgtatttctttaatcaatgtgttctcttcggtgatatatattgcattatatattgatgtgtgtatcaatatatattgatatgtattacacttacacatacaaacacatataagagggggtgaaaaccgtagcctttgcattctctatagcctctgcagagagatactaagcagcaaaatcttggtgttgtgatgtacagaaatggagaagagtattaaaccatatttaagaataaaaaatg

SEQ ID NO: 74246 - DNA, 3640 bp, Homo sapiens
agcgggtcacaggccccatgtgagcggattgcaacacatgcagctgcctggagagagggagccggtgtcctacgtcagagccgccgccgccgcggagccgccgccggggaggagcagccgctgccgcccaggactgggcccttagggaggaggaggcgagaagatggcggacgaccccagtgctgccgacaggaacgtggagatctggaagatcaagaagctcattaagagcttggaggcggcccgcggcaatggcaccagcatgatatcattgatcattcctcccaaagaccagatttcacgagtggcaaaaatgttagcggatgagtttggaactgcatctaacattaagtcacgagtaaaccgcctttcagtcctgggagccattacatctgtacaacaaagactcaaactttataacaaagtacctccaaatggtctggttgtatactgtggaacaattgtaacagaagaaggaaaggaaaagaaagtcaacattgactttgaacctttcaaaccaattaatacgtcattgtatttgtgtgacaacaaattccatacagaggctcttacagcactactttcagatgatagcaagtttggattcattgtaatagatggtagtggtgcactttttggcacactccaaggaaacacaagagaagtcctgcacaaattcactgtggatctcccaaagaaacacggtagaggaggtcagtcagccttgcgttttgcccgtttaagaatggtttctggggacaaagtgaatgtggctggtctagttttagctggatccgctgactttaaaactgaactaagtcaatctgatatgtttgatcagaggttacaatcaaaagttttaaaattagttgatatatcctatggtggtgaaaatggattcaaccaagctattgagttatctactgaagtcctctccaacgtgaaattcattcaagagaagaaattaataggacgatactttgatgaaatcagccaggacacgggcaagtactgttttggcgttgaagatacactaaaggctttggaaatgggagctgtagaaattctaatagtctatgaaaatctggatataatgagatatgttcttcattgccaaggcacagaagaggagaaaattctctatctaactccagagcaagaaaaggataaatctcatttcacagacaaagagaccggacaggaacatgagcttatcgagagcatgcccctgttggaatggtttgctaacaactataaaaaatttggagctacgttggaaattgtcacagataaatcacaagaagggtctcagtttgtgaaaggatttggtggaattggaggtatcttgcggtaccgagtagatttccagggaatggaataccaaggaggagacgatgaattttttgaccttgatgactactaggtagtcgacatgggtccggcaaaacgtgcctcaccctccagcatccaacccaaggagcatacccatggtggaatccaaacagatccctgccttacaattggaacatttccagaacttaatccatgagcattggatattgaaaagaaaaccgaaacaaaaccagacccagccctacactttggtttgtcatggtgtcagcgcagcagcctacaactaagttcctaaacgccactttggactaatttaaaaaagaatcccagtttttacttttactggatggtgaaattggttgctcttgtattttatgaaaaaaaatgatttttttaaccttcatacatagaagcaaaaatactttaactgctgtaaaccttcaaaagttaatagaagtgagatcatactggtttgtttcttattttgattggagaaaaattaaattgctgcatttcgcagtgacccatttacatggcattctcagcttagactgcgtaagaagaaatatatgtggtgaaatgttggaaccatttctctcttggtctctgtttaatgttgaaagggtgagctaataggaggcactttcaacttcactccctcacgctaccccgtccccctccagactggcagtttcaaggatgcaaattgcattgcaaaatcaaactgactcatgaagcatttgggccagtgcactgtttacttccatctgtttgcagacacatttgtgcccggcgtttgggagccctttgtatcaatgttctgacaagggtccctataaccttaacctactcgaaaccggtttgggatggatatgatggggcttctgtgctattgctgggattgggagaaataaaacatgcaatttaagtggaagcgaagaaatttaaagaggattttattttgcttgggtcaatccttgttaaaagggaggtggatgtgttttccttgtgttggatggcatgagattatgtgaatgttttgatttattaaaatgaactgcaaggtttttcacaggaacgacagacatgtatgactgcatgtaattataaactcctgacctcctggtggggttggagcatctgtttcaaatgtgggacttacaagcacttctcacatgagaaattaggggcgggtgggaagggatgggacacagcttctggcaccatggatttaagaccatgttggatccaaaagttggcctgaaaccctgaagctgatgcttcacagctgggctgtaagtcagacttgaacccagctgatatgcaaggtcatggcgtgcccagggtggtgacagttgaacaaagtgtatagtacgtgcccagtggtagcgatggaaaaaagtataccaaatggactttgaaggaccaaaggttttaaaagtcaattggtatcacctccacactgactagggtagtggggtgcatttggttttcaaattgggtacttttaacactttagtgcctgactgctgttctttactgacttgattcagtcactcgtagctttattggtctgaaccagctccttgttcccaggttacagacctgcctatcgttccaataatcctgtttcacttgaatgaagggagtatgtcttaaatgtaaagtttctggttctcacactgtactctgaggtccaaatactgtctgtcaatgtgtaacctgatgtctcaaccccctgtgagaagagtccattatttggtgttcaccaacgtgggagacttcaccggaacaggcttttttgctttgggctctgctatttgtttgcagaacacccaagagcgagcaaacatgctctcttcacagcagtaccttagggttttgccattgtaaatgggtctgatgtgatatgacaagaccagagaaattggatgtaaatttacatttttgaatatgcttgttgtttcacatgatacatttagggtatgcagctccttttgtagtttttatttttactatttaagtttggaaatgatgccaaatttttgtatttctttaatcaatgtgttctcttcggtgatatatattgcattatatattgatgtgtgtatcaatatatattgatatgtattacacttacacatacaaacacatataagagggggtgaaaaccgtagcctttgcattctctatagcctctgcagagagatactaagcagcaaaatcttggtgttgtgatgtacagaaatggagaagagtattaaaccatatttaagaataaaaaatg

SEQ ID NO: 74247 - DNA, 3232 bp, Homo sapiens
gaggactcagaggctgggatcatggtagatggaaccctccttttactcctctcggaggccctggcccttacccagacctgggcgggctcccactccttgaagtatttccacacttccgtgtcccggcccggccgcggggagccccgcttcatctctgtgggctacgtggacgacacccagttcgtgcgcttcgacaacgacgccgcgagtccgaggatggtgccgcgggcgccgtggatggagtagaggaggtcagtcagccttgcgttttgcccgtttaagaatggaaaagcgacataactatgttcggaaagtagcagagactgctgtgcagctgtttatttctggggacaaagtgaatgtggctggtctagttttagctggatccgctgactttaaaactgaactaagtcaatctgatatgtttgatcagaggttacaatcaaaagttttaaaattagttgatatatcctatggtggtgaaaatggattcaaccaagctattgagttatctactgaagtcctctccaacgtgaaattcattcaagagaagaaattaataggacgatactttgatgaaatcagccaggacacgggcaagtactgttttggcgttgaagatacactaaaggctttggaaatgggagctgtagaaattctaatagtctatgaaaatctggatataatgagatatgttcttcattgccaaggcacagaagaggagaaaattctctatctaactccagagcaagaaaaggataaatctcatttcacagacaaagagaccggacaggaacatgagcttatcgagagcatgcccctgttggaatggtttgctaacaactataaaaaatttggagctacgttggaaattgtcacagataaatcacaagaagggtctcagtttgtgaaaggatttggtggaattggaggtatcttgcggtaccgagtagatttccagggaatggaataccaaggaggagacgatgaattttttgaccttgatgactactaggtagtcgacatgggtccggcaaaacgtgcctcaccctccagcatccaacccaaggagcatacccatggtggaatccaaacagatccctgccttacaattggaacatttccagaacttaatccatgagcattggatattgaaaagaaaaccgaaacaaaaccagacccagccctacactttggtttgtcatggtgtcagcgcagcagcctacaactaagttcctaaacgccactttggactaatttaaaaaagaatcccagtttttacttttactggatggtgaaattggttgctcttgtattttatgaaaaaaaatgatttttttaaccttcatacatagaagcaaaaatactttaactgctgtaaaccttcaaaagttaatagaagtgagatcatactggtttgtttcttattttgattggagaaaaattaaattgctgcatttcgcagtgacccatttacatggcattctcagcttagactgcgtaagaagaaatatatgtggtgaaatgttggaaccatttctctcttggtctctgtttaatgttgaaagggtgagctaataggaggcactttcaacttcactccctcacgctaccccgtccccctccagactggcagtttcaaggatgcaaattgcattgcaaaatcaaactgactcatgaagcatttgggccagtgcactgtttacttccatctgtttgcagacacatttgtgcccggcgtttgggagccctttgtatcaatgttctgacaagggtccctataaccttaacctactcgaaaccggtttgggatggatatgatggggcttctgtgctattgctgggattgggagaaataaaacatgcaatttaagtggaagcgaagaaatttaaagaggattttattttgcttgggtcaatccttgttaaaagggaggtggatgtgttttccttgtgttggatggcatgagattatgtgaatgttttgatttattaaaatgaactgcaaggtttttcacaggaacgacagacatgtatgactgcatgtaattataaactcctgacctcctggtggggttggagcatctgtttcaaatgtgggacttacaagcacttctcacatgagaaattaggggcgggtgggaagggatgggacacagcttctggcaccatggatttaagaccatgttggatccaaaagttggcctgaaaccctgaagctgatgcttcacagctgggctgtaagtcagacttgaacccagctgatatgcaaggtcatggcgtgcccagggtggtgacagttgaacaaagtgtatagtacgtgcccagtggtagcgatggaaaaaagtataccaaatggactttgaaggaccaaaggttttaaaagtcaattggtatcacctccacactgactagggtagtggggtgcatttggttttcaaattgggtacttttaacactttagtgcctgactgctgttctttactgacttgattcagtcactcgtagctttattggtctgaaccagctccttgttcccaggttacagacctgcctatcgttccaataatcctgtttcacttgaatgaagggagtatgtcttaaatgtaaagtttctggttctcacactgtactctgaggtccaaatactgtctgtcaatgtgtaacctgatgtctcaaccccctgtgagaagagtccattatttggtgttcaccaacgtgggagacttcaccggaacaggcttttttgctttgggctctgctatttgtttgcagaacacccaagagcgagcaaacatgctctcttcacagcagtaccttagggttttgccattgtaaatgggtctgatgtgatatgacaagaccagagaaattggatgtaaatttacatttttgaatatgcttgttgtttcacatgatacatttagggtatgcagctccttttgtagtttttatttttactatttaagtttggaaatgatgccaaatttttgtatttctttaatcaatgtgttctcttcggtgatatatattgcattatatattgatgtgtgtatcaatatatattgatatgtattacacttacacatacaaacacatataagagggggtgaaaaccgtagcctttgcattctctatagcctctgcagagagatactaagcagcaaaatcttggtgttgtgatgtacagaaatggagaagagtattaaaccatatttaagaataaaaaatg

SEQ ID NO: 74248 - DNA, 2760 bp, Homo sapiens
gctgctctgggtgcacgtccacttggacttgttctcttcatagtgagcactggtcttaatgtatctggccagctctatctgcatgtcgccgaaaaggggcaacacatgcagctgcctggagagagggagccggtgtcctacgtcagagccgccgccgccgcggagccgccgccggggaggagcagccgctgccgcccaggactgggcccttagggaggaggaggcgagaagatggcggacgaccccagtgctgccgacaggaacgtggagatctggaagatcaagaagctcattaagagcttggaggcggcccgcggcaatggcaccagcatgatatcattgatcattcctcccaaagaccagatttcacgagtggcaaaaatgttagcggatgagtttggaactgcatctaacattaagtcacgagtaaaccgcctttcagtcctgggagccattacatctgtacaacaaagactcaaactttataacaaagtacctccaaatggtctggttgtatactgtggaacaattgtaacagaagaaggaaaggaaaagaaagtcaacattgactttgaacctttcaaaccaattaatacgtcattgtatttgtgtgacaacaaattccatacagaggctcttacagcactactttcagatgatagcaagtttggattcattgtaatagatggtagtggtgcactttttggcacactccaaggaaacacaagagaagtcctgcacaaattcactgtggatctcccaaagaaacacggtagaggaggtcagtcagccttgcgttttgcccgtttaagaatggaaaagcgacataactatgttcggaaagtagcagagactgctgtgcagctgtttatttctggggacaaagtgaatgtggctggtctagttttagctggatccgctgactttaaaactgaactaagtcaatctgatatgtttgatcagaggttacaatcaaaagttttaaaattagttgatatatcctatggtggtgaaaatggattcaaccaagctattgagttatctactgaagtcctctccaacgtgaaattcattcaagagaagaaattaataggacgatactttgatgaaatcagccaggacacgggcaagtactgttttggcgttgaagatacactaaaggctttggaaatgggagctgtagaaattctaatagtctatgaaaatctggatataatgagatatgttcttcattgccaaggcacagaagaggagaaaattctctatctaactccagagcaagaaaaggataaatctcatttcacagacaaagagaccggacaggaacatgagcttatcgagagcatgcccctgttggaatggtttgctaacaactataaaaaatttggagctacgttggaaattgtcacagataaatcacaagaagggtctcagtttgtgaaaggatttggtggaattggaggtatcttgcggtaccgagtagatttccagggaatggaataccaaggaggagacgatgaattttttgaccttgatgactactaggtagtcgacatgggtccggcaaaacgtgcctcaccctccagcatccaacccaaggagcatacccatggtggaatccaaacagatccctgccttacaattggaacatttccagaacttaatccatgagcattggatattgaaaagaaaaccgaaacaaaaccagacccagccctacactttggtttgtcatggtgtcagcgcagcagcctacaactaagttcctaaacgccactttggactaatttaaaaaagaatcccagtttttacttttactggatggtgaaattggttgctcttgtattttatgaaaaaaaatgatttttttaaccttcatacatagaagcaaaaatactttaactgctgtaaaccttcaaaagttaatagaagtgagatcatactggtttgtttcttattttgattggagaaaaattaaattgctgcatttcgcagtgacccatttacatggcattctcagcttagactgcgtaagaagaaatatatgtggtgaaatgttggaaccatttctctcttggtctctgtttaatgttgaaagggtgagctaataggaggcactttcaacttcactccctcacgctaccccgtccccctccagactggcagtttcaaggatgcaaattgcattgcaaaatcaaactgactcatgaagcatttgggccagtgcactgtttacttccatctgtttgcagacacatttgtgcccggcgtttgggagccctttgtatcaatgttctgacaagggtccctataaccttaacctactcgaaaccggtttgggatggatatgatggggcttctgtgctattgctgggattgggagaaataaaacatgcaatttaagtggaaaaaaaaaaaaaaaaaaaaaaaaaaaaaaaaaaaaaaaaaaaaagggggggggcgcgtcacaaaatatatcccctcaggagggggcccaagagtctcagcggcgcgtaacacagagatttgctgggacacaagaggggcgcccataaagagcgggcgcgctataaaaaaaggcagaggacgcgggacgcgcaggttgttacacaaccgtcgagagcagtggaaacaacgccgcaatacaggggaaaatttagtgggaaggcaccctataccatcgcgaggcgggcacaacataatgtgggggcacaagatcccccacgacagcaattgaaacgcccgcagggagaacatgca

SEQ ID NO: 74249 - DNA, 2375 bp, Homo sapiens
tgcaaattccagctcggttccctgtgaagcacacccaagggtctcagtttgtgaaaggatttggtggaattggaggtatcttgcggtaccgagtagatttccagggaatggaataccaaggaggagacgatgaattttttgaccttgatgactactaggtagtcgacatgggtccggcaaaacgtgcctcaccctccagcatccaacccaaggagcatacccatggtggaatccaaacagatccctgccttacaattggaacatttccagaacttaatccatgagcattggatattgaaaagaaaaccgaaacaaaaccagacccagccctacactttggtttgtcatggtgtcagcgcagcagcctacaactaagttcctaaacgccactttggactaatttaaaaaagaatcccagtttttacttttactggatggtgaaattggttgctcttgtattttatgaaaaaaaatgatttttttaaccttcatacatagaagcaaaaatactttaactgctgtaaaccttcaaaagttaatagaagtgagatcatactggtttgtttcttattttgattggagaaaaattaaattgctgcatttcgcagtgacccatttacatggcattctcagcttagactgcgtaagaagaaatatatgtggtgaaatgttggaaccatttctctcttggtctctgtttaatgttgaaagggtgagctaataggaggcactttcaacttcactccctcacgctaccccgtccccctccagactggcagtttcaaggatgcaaattgcattgcaaaatcaaactgactcatgaagcatttgggccagtgcactgtttacttccatctgtttgcagacacatttgtgcccggcgtttgggagccctttgtatcaatgttctgacaagggtccctataaccttaacctactcgaaaccggtttgggatggatatgatggggcttctgtgctattgctgggattgggagaaataaaacatgcaatttaagtggaagcgaagaaatttaaagaggattttattttgcttgggtcaatccttgttaaaagggaggtggatgtgttttccttgtgttggatggcatgagattatgtgaatgttttgatttattaaaatgaactgcaaggtttttcacaggaacgacagacatgtatgactgcatgtaattataaactcctgacctcctggtggggttggagcatctgtttcaaatgtgggacttacaagcacttctcacatgagaaattaggggcgggtgggaagggatgggacacagcttctggcaccatggatttaagaccatgttggatccaaaagttggcctgaaaccctgaagctgatgcttcacagctgggctgtaagtcagacttgaacccagctgatatgcaaggtcatggcgtgcccagggtggtgacagttgaacaaagtgtatagtacgtgcccagtggtagcgatggaaaaaagtataccaaatggactttgaaggaccaaaggttttaaaagtcaattggtatcacctccacactgactagggtagtggggtgcatttggttttcaaattgggtacttttaacactttagtgcctgactgctgttctttactgacttgattcagtcactcgtagctttattggtctgaaccagctccttgttcccaggttacagacctgcctatcgttccaataatcctgtttcacttgaatgaagggagtatgtcttaaatgtaaagtttctggttctcacactgtactctgaggtccaaatactgtctgtcaatgtgtaacctgatgtctcaaccccctgtgagaagagtccattatttggtgttcaccaacgtgggagacttcaccggaacaggcttttttgctttgggctctgctatttgtttgcagaacacccaagagcgagcaaacatgctctcttcacagcagtaccttagggttttgccattgtaaatgggtctgatgtgatatgacaagaccagagaaattggatgtaaatttacatttttgaatatgcttgttgtttcacatgatacatttagggtatgcagctccttttgtagtttttatttttactatttaagtttggaaatgatgccaaatttttgtatttctttaatcaatgtgttctcttcggtgatatatattgcattatatattgatgtgtgtatcaatatatattgatatgtattacacttacacatacaaacacatataagagggggtgaaaaccgtagcctttgcattctctatagcctctgcagagagatactaagcagcaaaatcttggtgttgtgatgtacagaaatggagaagagtattaaaccatatttaagaataaaaaatg

SEQ ID NO: 74250 - DNA, 1008 bp, Homo sapiens
  misc_feature (954)..(954): n is a, c, g, or t
  misc_feature (960)..(960): n is a, c, g, or t
agcgggtcacaggccccatgtgagcggattgcaacacatgcagctgcctggagagagggagccggtgtcctacgtcagagccgccgccgccgcggagccgccgccggggaggagcagccgctgccgcccaggactgggcccttagggaggaggaggcgagaagatggcggacgaccccagtgctgccgacaggaacgtggagatctggaagatcaagaagctcattaagagcttggaggcggcccgcggcaatggcaccagcatgatatcattgatcattcctcccaaagaccagatttcacgagtggcaaaaatgttagcggatgagtttggaactgcatctaacattaagtcacgagtaaaccgcctttcagtcctgggagccattacatctgtacaacaaagactcaaactttataacaaagtacctccaaatggtctggttgtatactgtggaacaattgtaacagaagaaggaaaggaaaagaaagtcaacattgactttgaacctttcaaaccaattaatacgtcattgtatttgtgtgacaacaaattccatacagaggctcttacagcactactttcagatgatagcaagtttggattcattgtaatagatggtagtggtgcactttttggcacactccaaggaaacacaagagaagtcctgcacaaattcactgtggatctcccaaagaaacacggtagaggaggtcagtcagccttgcgttttgcccgtttaagaatggaaaagcgacataactatgttcggaaagtagcagagactgctgtgcagctgtttatttctggggacaaagtgaatgtggctggtctagttttagctggatccgctgactttaaaactgaactaagtcaatctgatatgtttgatcagaggttacaatcaaaagttttaaaattagttgatatatcctatggtggtgaatcattcangaaagnaattaataggacgatactttggtggaatcacgccagggcacggcccag

SEQ ID NO: 74251 - DNA, 587 bp, Homo sapiens
agcgggtcacaggccccatgtgagcggattgcaacacatgcagctgcctggagagagggagccggtgtcctacgtcagagccgccgccgccgcggagccgccgccggggaggagcagccgctgccgcccaggactgggcccttagggaggaggaggcgagaagatggcggacgaccccagtgctgccgacaggaacgtggagatctggaagatcaagaagctcattaagagcttggaggcggcccgcggcaatggcaccagcatgatatcattgatcattcctcccaaagaccagatttcacgataaaccgcctttcagtcctgggagccattacatctgtacaacaaagactcaaactttataacaaagtacctccaaatggtctggttgtatactgtggaacaattgtaacagaagaaggaaaggaaaagaaagtcaacattgactttgaacctttcaaaccaattaatacgtcattgtatttgtgtgacaacaaattccatacagaggtaagaagtcaaacccagaacattttcatcgctccagaattctttccccgtacccattagcagtcagtcccccatcc

SEQ ID NO: 74252 - DNA, 489 bp, Homo sapiens
acgcagcaggtgcaggttcctaatttggacccatgtttattattacctctttgctttctgcaattctgcaagagaatagggcttcccttattcccttaccagccacctacacacatgcccatcccatgaacacaggtaatttaccttttggtttgtttccccaggtatcttgcggtaccgagtagatttccagggaatggaataccaaggaggagacgatgaattttttgaccttgatgactactaggtagtcgacatgggtccggcaaaacgtgcctcaccctccagcatccaacccaaggagcatacccatggtggaatccaaacagatccctgccttacaattggaacatttccagaacttaatccatgagcattggatattgaaaagaaaaccgaaacaaaaccagacccagccctacactttggtttgtcatggtgtcagcgcagcagcctacaactaagttcctaaacgccactttggactaa

SEQ ID NO: 74253 - DNA, 2409 bp, Homo sapiens
gctgctctgggtgcacgtccacttggacttgttctcttcatagtgagcactggtcttaatgtatctggccagctctatctgcatgtcgccgaaaaggggcaacacatgcagctgcctggagagagggagccggtgtcctacgtcagagccgccgccgccgcggagccgccgccggggaggagcagccgctgccgcccaggactgggcccttagggaggaggaggcgagaagatggcggacgaccccagtgctgccgacaggaacgtggagatctggaagatcaagaagctcattaagagcttggaggcggcccgcggcaatggcaccagcatgatatcattgatcattcctcccaaagaccagatttcacgagtggcaaaaatgttagcggatgagtttggaactgcatctaacattaagtcacgagtaaaccgcctttcagtcctgggagccattacatctgtacaacaaagactcaaactttataacaaagtacctccaaatggtctggttgtatactgtggaacaattgtaacagaagaaggaaaggaaaagaaagtcaacattgactttgaacctttcaaaccaattaatacgtcattgtatttgtgtgacaacaaattccatacagaggctcttacagcactactttcagatgatagcaagtttggattcattgtaatagatggtagtggtgcactttttggcacactccaaggaaacacaagagaagtcctgcacaaattcactgtggatctcccaaagaaacacggtagaggaggtcagtcagccttgcgttttgcccgtttaagaatggaaaagcgacataactatgttcggaaagtagcagagactgctgtgcagctgtttatttctggggacaaagtgaatgtggctggtctagttttagctggatccgctgactttaaaactgaactaagtcaatctgatatgtttgatcagaggttacaatcaaaagttttaaaattagttgatatatcctatggtggtgaaaatggattcaaccaagctattgagttatctactgaagtcctctccaacgtgaaattcattcaagagaagaaattaataggacgatactttgatgaaatcagccaggacacgggcaagtactgttttggcgttgaagatacactaaaggctttggaaatgggagctgtagaaattctaatagtctatgaaaatctggatataatgagatatgttcttcattgccaaggcacagaagaggagaaaattctctatctaactccagagcaagaaaaggataaatctcatttcacagacaaagagaccggacaggaacatgagcttatcgagagcatgcccctgttggaatggtttgctaacaactataaaaaatttggagctacgttggaaattgtcacagataaatcacaagaagggtctcagtttgtgaaaggatttggtggaattggaggtatcttgcggtaccgagtagatttccagggaatggaataccaaggaggagacgatgaattttttgaccttgatgactactaggtagtcgacatgggtccggcaaaacgtgcctcaccctccagcatccaacccaaggagcatacccatggtggaatccaaacagatccctgccttacaattggaacatttccagaacttaatccatgagcattggatattgaaaagaaaaccgaaacaaaaccagacccagccctacactttggtttgtcatggtgtcagcgcagcagcctacaactaagttcctaaacgccactttggactaatttaaaaaagaatcccagtttttacttttactggatggtgaaattggttgctcttgtattttatgaaaaaaaatgatttttttaaccttcatacatagaagcaaaaatactttaactgctgtaaaccttcaaaagttaatagaagtgagatcatactggtttgtttcttattttgattggagaaaaattaaattgctgcatttcgcagtgacccatttacatggcattctcagcttagactgcgtaagaagaaatatatgtggtgaaatgttggaaccatttctctcttggtctctgtttaatgttgaaagggtgagctaataggaggcactttcaacttcactccctcacgctaccccgtccccctccagactggcagtttcaaggatgcaaattgcattgcaaaatcaaactgactcatgaagcatttgggccagtgcactgtttacttccatctgtttgcagacacatttgtgcccggcgtttgggagccctttgtatcaatgttctgacaagggtccctataaccttaacctactcgaaaccggtttgggatggatatgatggggcttctgtgctattgctgggattgggagaaataaaacatgcaatttaagtggaa

SEQ ID NO: 74254 - DNA, 3708 bp, Homo sapiens
gctgctctgggtgcacgtccacttggacttgttctcttcatagtgagcactggtcttaatgtatctggccagctctatctgcatgtcgccgaaaaggggcaacacatgcagctgcctggagagagggagccggtgtcctacgtcagagccgccgccgccgcggagccgccgccggggaggagcagccgctgccgcccaggactgggcccttagggaggaggaggcgagaagatggcggacgaccccagtgctgccgacaggaacgtggagatctggaagatcaagaagctcattaagagcttggaggcggcccgcggcaatggcaccagcatgatatcattgatcattcctcccaaagaccagatttcacgagtggcaaaaatgttagcggatgagtttggaactgcatctaacattaagtcacgagtaaaccgcctttcagtcctgggagccattacatctgtacaacaaagactcaaactttataacaaagtacctccaaatggtctggttgtatactgtggaacaattgtaacagaagaaggaaaggaaaagaaagtcaacattgactttgaacctttcaaaccaattaatacgtcattgtatttgtgtgacaacaaattccatacagaggctcttacagcactactttcagatgatagcaagtttggattcattgtaatagatggtagtggtgcactttttggcacactccaaggaaacacaagagaagtcctgcacaaattcactgtggatctcccaaagaaacacggtagaggaggtcagtcagccttgcgttttgcccgtttaagaatggaaaagcgacataactatgttcggaaagtagcagagactgctgtgcagctgtttatttctggggacaaagtgaatgtggctggtctagttttagctggatccgctgactttaaaactgaactaagtcaatctgatatgtttgatcagaggttacaatcaaaagttttaaaattagttgatatatcctatggtggtgaaaatggattcaaccaagctattgagttatctactgaagtcctctccaacgtgaaattcattcaagagaagaaattaataggacgatactttgatgaaatcagccaggacacgggcaagtactgttttggcgttgaagatacactaaaggctttggaaatgggagctgtagaaattctaatagtctatgaaaatctggatataatgagatatgttcttcattgccaaggcacagaagaggagaaaattctctatctaactccagagcaagaaaaggataaatctcatttcacagacaaagagaccggacaggaacatgagcttatcgagagcatgcccctgttggaatggtttgctaacaactataaaaaatttggagctacgttggaaattgtcacagataaatcacaagaagggtctcagtttgtgaaaggatttggtggaattggaggtatcttgcggtaccgagtagatttccagggaatggaataccaaggaggagacgatgaattttttgaccttgatgactactaggtagtcgacatgggtccggcaaaacgtgcctcaccctccagcatccaacccaaggagcatacccatggtggaatccaaacagatccctgccttacaattggaacatttccagaacttaatccatgagcattggatattgaaaagaaaaccgaaacaaaaccagacccagccctacactttggtttgtcatggtgtcagcgcagcagcctacaactaagttcctaaacgccactttggactaatttaaaaaagaatcccagtttttacttttactggatggtgaaattggttgctcttgtattttatgaaaaaaaatgatttttttaaccttcatacatagaagcaaaaatactttaactgctgtaaaccttcaaaagttaatagaagtgagatcatactggtttgtttcttattttgattggagaaactgcgtaagaagaaatatatgtggtgaaatgttggaaccatttctctcttggtctctgtttaatgttgaaagggtgagctaataggaggcactttcaacttcactccctcacgctaccccgtccccctccagactggcagtttcaaggatgcaaattgcattgcaaaatcaaactgactcatgaagcatttgggccagtgcactgtttacttccatctgtttgcagacacatttgtgcccggcgtttgggagccctttgtatcaatgttctgacaagggtccctataaccttaacctactcgaaaccggtttgggatggatatgatggggcttctgtgctattgctgggattgggagaaataaaacatgcaatttaagtggaagcgaagaaatttaaagaggattttattttgcttgggtcaatccttgttaaaagggaggtggatgtgttttccttgtgttggatggcatgagattatgtgaatgttttgatttattaaaatgaactgcaaggtttttcacaggaacgacagacatgtatgactgcatgtaattataaactcctgacctcctggtggggttggagcatctgtttcaaatgtgggacttacaagcacttctcacatgagaaattaggggcgggtgggaagggatgggacacagcttctggcaccatggatttaagaccatgttggatccaaaagttggcctgaaaccctgaagctgatgcttcacagctgggctgtaagtcagacttgaacccagctgatatgcaaggtcatggcgtgcccagggtggtgacagttgaacaaagtgtatagtacgtgcccagtggtagcgatggaaaaaagtataccaaatggactttgaaggaccaaaggttttaaaagtcaattggtatcacctccacactgactagggtagtggggtgcatttggttttcaaattgggtacttttaacactttagtgcctgactgctgttctttactgacttgattcagtcactcgtagctttattggtctgaaccagctccttgttcccaggttacagacctgcctatcgttccaataatcctgtttcacttgaatgaagggagtatgtcttaaatgtaaagtttctggttctcacactgtactctgaggtccaaatactgtctgtcaatgtgtaacctgatgtctcaaccccctgtgagaagagtccattatttggtgttcaccaacgtgggagacttcaccggaacaggcttttttgctttgggctctgctatttgtttgcagaacacccaagagcgagcaaacatgctctcttcacagcagtaccttagggttttgccattgtaaatgggtctgatgtgatatgacaagaccagagaaattggatgtaaatttacatttttgaatatgcttgttgtttcacatgatacatttagggtatgcagctccttttgtagtttttatttttactatttaagtttggaaatgatgccaaatttttgtatttctttaatcaatgtgttctcttcggtgatatatattgcattatatattgatgtgtgtatcaatatatattgatatgtattacacttacacatacaaacacatataagagggggtgaaaaccgtagcctttgcattctctatagcctctgcagagagatactaagcagcaaaatcttggtgttgtgatgtacagaaatggagaagagtattaaaccatatttaagaataaaaaatg

SEQ ID NO: 74255 - DNA, 3487 bp, Homo sapiens
ccaaatggaatccccaaatggaatccttttgagattgagtagtattaactgctgtatgtaatattgctataaacatgggcatacagatatctttctggttttatatttacatgcccatgtcaaatgtgttgaaaagcttcacatagatatcattcgttatttccttattgggttcaaatttgtccataagagttacatgtttataactgaagtctataaattattccgtagaaggttttcccacagtgctaatagcatggtgagtggagtgaaagggcttgtatatatcctttcagagtttttttgaccttagcaaagctttgggattcaccgtgtggtacttgtgtttgcttttcaggctcttacagcactactttcagatgatagcaagtttggattcattgtaatagatggtagtggtgcactttttggcacactccaaggaaacacaagagaagtcctgcacaaattcactgtggatctcccaaagaaacacggtagaggaggtcagtcagccttgcgttttgcccgtttaagaatggaaaagcgacataactatgttcggaaagtagcagagactgctgtgcagctgtttatttctggggacaaagtgaatgtggctggtctagttttagctggatccgctgactttaaaactgaactaagtcaatctgatatgtttgatcagaggttacaatcaaaagttttaaaattagttgatatatcctatggtggtgaaaatggattcaaccaagctattgagttatctactgaagtcctctccaacgtgaaattcattcaagagaagaaattaataggacgatactttgatgaaatcagccaggacacgggcaagtactgttttggcgttgaagatacactaaaggctttggaaatgggagctgtagaaattctaatagtctatgaaaatctggatataatgagatatgttcttcattgccaaggcacagaagaggagaaaattctctatctaactccagagcaagaaaaggataaatctcatttcacagacaaagagaccggacaggaacatgagcttatcgagagcatgcccctgttggaatggtttgctaacaactataaaaaatttggagctacgttggaaattgtcacagataaatcacaagaagggtctcagtttgtgaaaggatttggtggaattggaggtatcttgcggtaccgagtagatttccagggaatggaataccaaggaggagacgatgaattttttgaccttgatgactactaggtagtcgacatgggtccggcaaaacgtgcctcaccctccagcatccaacccaaggagcatacccatggtggaatccaaacagatccctgccttacaattggaacatttccagaacttaatccatgagcattggatattgaaaagaaaaccgaaacaaaaccagacccagccctacactttggtttgtcatggtgtcagcgcagcagcctacaactaagttcctaaacgccactttggactaatttaaaaaagaatcccagtttttacttttactggatggtgaaattggttgctcttgtattttatgaaaaaaaatgatttttttaaccttcatacatagaagcaaaaatactttaactgctgtaaaccttcaaaagttaatagaagtgagatcatactggtttgtttcttattttgattggagaaaaattaaattgctgcatttcgcagtgacccatttacatggcattctcagcttagactgcgtaagaagaaatatatgtggtgaaatgttggaaccatttctctcttggtctctgtttaatgttgaaagggtgagctaataggaggcactttcaacttcactccctcacgctaccccgtccccctccagactggcagtttcaaggatgcaaattgcattgcaaaatcaaactgactcatgaagcatttgggccagtgcactgtttacttccatctgtttgcagacacatttgtgcccggcgtttgggagccctttgtatcaatgttctgacaagggtccctataaccttaacctactcgaaaccggtttgggatggatatgatggggcttctgtgctattgctgggattgggagaaataaaacatgcaatttaagtggaagcgaagaaatttaaagaggattttattttgcttgggtcaatccttgttaaaagggaggtggatgtgttttccttgtgttggatggcatgagattatgtgaatgttttgatttattaaaatgaactgcaaggtttttcacaggaacgacagacatgtatgactgcatgtaattataaactcctgacctcctggtggggttggagcatctgtttcaaatgtgggacttacaagcacttctcacatgagaaattaggggcgggtgggaagggatgggacacagcttctggcaccatggatttaagaccatgttggatccaaaagttggcctgaaaccctgaagctgatgcttcacagctgggctgtaagtcagacttgaacccagctgatatgcaaggtcatggcgtgcccagggtggtgacagttgaacaaagtgtatagtacgtgcccagtggtagcgatggaaaaaagtataccaaatggactttgaaggaccaaaggttttaaaagtcaattggtatcacctccacactgactagggtagtggggtgcatttggttttcaaattgggtacttttaacactttagtgcctgactgctgttctttactgacttgattcagtcactcgtagctttattggtctgaaccagctccttgttcccaggttacagacctgcctatcgttccaataatcctgtttcacttgaatgaagggagtatgtcttaaatgtaaagtttctggttctcacactgtactctgaggtccaaatactgtctgtcaatgtgtaacctgatgtctcaaccccctgtgagaagagtccattatttggtgttcaccaacgtgggagacttcaccggaacaggcttttttgctttgggctctgctatttgtttgcagaacacccaagagcgagcaaacatgctctcttcacagcagtaccttagggttttgccattgtaaatgggtctgatgtgatatgacaagaccagagaaattggatgtaaatttacatttttgaatatgcttgttgtttcacatgatacatttagggtatgcagctccttttgtagtttttatttttactatttaagtttggaaatgatgccaaatttttgtatttctttaatcaatgtgttctcttcggtgatatatattgcattatatattgatgtgtgtatcaatatatattgatatgtattacacttacacatacaaacacatataagagggggtgaaaaccgtagcctttgcattctctatagcctctgcagagagatactaagcagcaaaatcttggtgttgtgatgtacagaaatggagaagagtattaaaccatatttaagaataaaaaatg

SEQ ID NO: 74256 - DNA, 1652 bp, Homo sapiens
aggtcgtactagaggatcccgaacgcacgatagcccgtccccctccagactggcagtttcaaggatgcaaattgcattgcaaaatcaaactgactcatgaagcatttgggccagtgcactgtttacttccatctgtttgcagacacatttgtgcccggcgtttgggagccctttgtatcaatgttctgacaagggtccctataaccttaacctactcgaaaccggtttgggatggatatgatggggcttctgtgctattgctgggattgggagaaataaaacatgcaatttaagtggaagcgaagaaatttaaagaggattttattttgcttgggtcaatccttgttaaaagggaggtggatgtgttttccttgtgttggatggcatgagattatgtgaatgttttgatttattaaaatgaactgcaaggtttttcacaggaacgacagacatgtatgactgcatgtaattataaactcctgacctcctggtggggttggagcatctgtttcaaatgtgggacttacaagcacttctcacatgagaaattaggggcgggtgggaagggatgggacacagcttctggcaccatggatttaagaccatgttggatccaaaagttggcctgaaaccctgaagctgatgcttcacagctgggctgtaagtcagacttgaacccagctgatatgcaaggtcatggcgtgcccagggtggtgacagttgaacaaagtgtatagtacgtgcccagtggtagcgatggaaaaaagtataccaaatggactttgaaggaccaaaggttttaaaagtcaattggtatcacctccacactgactagggtagtggggtgcatttggttttcaaattgggtacttttaacactttagtgcctgactgctgttctttactgacttgattcagtcactcgtagctttattggtctgaaccagctccttgttcccaggttacagacctgcctatcgttccaataatcctgtttcacttgaatgaagggagtatgtcttaaatgtaaagtttctggttctcacactgtactctgaggtccaaatactgtctgtcaatgtgtaacctgatgtctcaaccccctgtgagaagagtccattatttggtgttcaccaacgtgggagacttcaccggaacaggcttttttgctttgggctctgctatttgtttgcagaacacccaagagcgagcaaacatgctctcttcacagcagtaccttagggttttgccattgtaaatgggtctgatgtgatatgacaagaccagagaaattggatgtaaatttacatttttgaatatgcttgttgtttcacatgatacatttagggtatgcagctccttttgtagtttttatttttactatttaagtttggaaatgatgccaaatttttgtatttctttaatcaatgtgttctcttcggtgatatatattgcattatatattgatgtgtgtatcaatatatattgatatgtattacacttacacatacaaacacatataagagggggtgaaaaccgtagcctttgcattctctatagcctctgcagagagatactaagcagcaaaatcttggtgttgtgatgtacagaaatggagaagagtattaaaccatatttaagaataaaaaatg

SEQ ID NO: 74257 - DNA, 1011 bp, Homo sapiens
agcgggtcacaggccccatgtgagcggattgcaacacatgcagctgcctggagagagggagccggtgtcctacgtcagagccgccgccgccgcggagccgccgccggggaggagcagccgctgccgcccaggactgggcccttagggaggaggaggcgagaagatggcggacgaccccagtgctgccgacaggaacgtggagatctggaagatcaagaagctcattaagagcttggaggcggcccgcggcaatggcaccagcatgatatcattgatcattcctcccaaagaccagatttcacgagtggcaaaaatgttagcggatgagtttggaactgcatctaacattaagtcacgagtaaaccgcctttcagtcctgggagccattacatctgtacaacaaagactcaaactttataacaaagtacctccaaatggtctggttgtatactgtggaacaattgtaacagaagaaggaaaggaaaagaaagtcaacattgactttgaacctttcaaaccaattaatacgtcattgtatttgtgtgacaacaaattccatacagaggctcttacagcactactttcagatgatagcaagtttggattcattgtaatagatggtagtggtgcactttttggcacactccaaggaaacacaagagaagtcctgcacaaattcactgtggatctcccaaagaaacacggtagaggaggtcagtcagccttgcgttttgcccgtttaagaatggaaaagcgacataactatgttcggaaagtagcagagactgctgtgcagctgtttatttctggggacaaagtgaatgtggctggtctagttttagctggatccgctgactttaaaactgaactaagtcaatctgatatgtttgatcaggtaagtaagaagtagatgctttattatgtaagaccctaggtaggagtaggtgaatacagcgatgaccatgtgtgctgcgttcgagctcgggtctactctagagtcgcagcgcagcg

SEQ ID NO: 74258 - DNA, 423 bp, Homo sapiens
cctttccttctcatctacttcactttcctaaaaatcaattttaagctagacaaaaaatgtgcagagaccaactttaagtggatccaaggcagtaatttgagctgattccatcaaattatagatgcatgagaagcatgcattttctaaagaataacaacgctgcaacaaacatttttgaaggaactactaaaatatttccatctctaaactcatcctcttccacttcagatgatttcttttccatttcattctattctctgaagcaaaaaccagaggaaagaaatctgatggaatgaaattctgctagcaaccatctgaaagtataaatgagggagaaagtccaagatttaaaaattcaagcaaattttcttgcctgttggaaggaagagctctcaaataaagagataatcaagagacatatta

SEQ ID NO: 74259 - DNA, 6634 bp, Homo sapiens
ttctccccgccccccagttgttgtcgaagtctgggggttgggactggaccccctgattgcgtaagagcaaaaagcgaaggcgcaatctggacactgggagattcggagcgcagggagtttgagagaaacttttattttgaagagaccaaggttgagggggggcttatttcctgacagctatttacttagagcaaatgattagttttagaaggatggactataacattgaatcaattacaaaacgcggtttttgagcccattactgttggagctacagggagagaaacagaggaggagactgcaagagatcattggaggccgtgggcacgctctttactccatgtgtgggacattcattgcggaataacatcggaggagaagtttcccagagctatggggacttcccatccggcgttcctggtcttaggctgtcttctcacagggctgagcctaatcctctgccagctttcattaccctctatccttccaaatgaaaatgaaaaggttgtgcagctgaattcatccttttctctgagatgctttggggagagtgaagtgagctggcagtaccccatgtctgaagaagagagctccgatgtggaaatcagaaatgaagaaaacaacagcggcctttttgtgacggtcttggaagtgagcagtgcctcggcggcccacacagggttgtacacttgctattacaaccacactcagacagaagagaatgagcttgaaggcaggcacatttacatctatgtgccagacccagatgtagcctttgtacctctaggaatgacggattatttagtcatcgtggaggatgatgattctgccattataccttgtcgcacaactgatcccgagactcctgtaaccttacacaacagtgagggggtggtacctgcctcctacgacagcagacagggctttaatgggaccttcactgtagggccctatatctgtgaggccaccgtcaaaggaaagaagttccagaccatcccatttaatgtttatgctttaaaagcaacatcagagctggatctagaaatggaagctcttaaaaccgtgtataagtcaggggaaacgattgtggtcacctgtgctgtttttaacaatgaggtggttgaccttcaatggacttaccctggagaagtgaaaggcaaaggcatcacaatgctggaagaaatcaaagtcccatccatcaaattggtgtacactttgacggtccccgaggccacggtgaaagacagtggagattacgaatgtgctgcccgccaggctaccagggaggtcaaagaaatgaagaaagtcactatttctgtccatgagaaaggtttcattgaaatcaaacccaccttcagccagttggaagctgtcaacctgcatgaagtcaaacattttgttgtagaggtgcgggcctacccacctcccaggatatcctggctgaaaaacaatctgactctgattgaaaatctcactgagatcaccactgatgtggaaaagattcaggaaataaggtatcgaagcaaattaaagctgatccgtgctaaggaagaagacagtggccattatactattgtagctcaaaatgaagatgctgtgaagagctatacttttgaactgttaactcaagttccttcatccattctggacttggtcgatgatcaccatggctcaactgggggacagacggtgaggtgcacagctgaaggcacgccgcttcctgatattgagtggatgatatgcaaagatattaagaaatgtaataatgaaacttcctggactattttggccaacaatgtctcaaacatcatcacggagatccactcccgagacaggagtaccgtggagggccgtgtgactttcgccaaagtggaggagaccatcgccgtgcgatgcctggctaagaatctccttggagctgagaaccgagagctgaagctggtggctcccaccctgcgttctgaactcacggtggctgctgcagtcctggtgctgttggtgattgtgatcatctcacttattgtcctggttgtcatttggaaacagaaaccgaggtatgaaattcgctggagggtcattgaatcaatcagcccggatggacatgaatatatttatgtggacccgatgcagctgccttatgactcaagatgggagtttccaagagatggactagtgcttggtcgggtcttggggtctggagcgtttgggaaggtggttgaaggaacagcctatggattaagccggtcccaacctgtcatgaaagttgcagtgaagatgctaaaacccacggccagatccagtgaaaaacaagctctcatgtctgaactgaagataatgactcacctggggccacatttgaacattgtaaacttgctgggagcctgcaccaagtcaggccccatttacatcatcacagagtattgcttctatggagatttggtcaactatttgcataagaatagggatagcttcctgagccaccacccagagaagccaaagaaagagctggatatctttggattgaaccctgctgatgaaagcacacggagctatgttattttatcttttgaaaacaatggtgactacatggacatgaagcaggctgatactacacagtatgtccccatgctagaaaggaaagaggtttctaaatattccgacatccagagatcactctatgatcgtccagcctcatataagaagaaatctatgttagactcagaagtcaaaaacctcctttcagatgataactcagaaggccttactttattggatttgttgagcttcacctatcaagttgcccgaggaatggagtttttggcttcaaaaaattgtgtccaccgtgatctggctgctcgcaacgtcctcctggcacaaggaaaaattgtgaagatctgtgactttggcctggccagagacatcatgcatgattcgaactatgtgtcgaaaggcagtacctttctgcccgtgaagtggatggctcctgagagcatctttgacaacctctacaccacactgagtgatgtctggtcttatggcattctgctctgggagatcttttcccttggtggcaccccttaccccggcatgatggtggattctactttctacaataagatcaagagtgggtaccggatggccaagcctgaccacgctaccagtgaagtctacgagatcatggtgaaatgctggaacagtgagccggagaagagaccctccttttaccacctgagtgagattgtggagaatctgctgcctggacaatataaaaagagttatgaaaaaattcacctggacttcctgaagagtgaccatcctgctgtggcacgcatgcgtgtggactcagacaatgcatacattggtgtcacctacaaaaacgaggaagacaagctgaaggactgggagggtggtctggatgagcagagactgagcgctgacagtggctacatcattcctctgcctgacattgaccctgtccctgaggaggaggacctgggcaagaggaacagacacagctcgcagacctctgaagagagtgccattgagacgggttccagcagttccaccttcatcaagagagaggacgagaccattgaagacatcgacatgatggacgacatcggcatagactcttcagacctggtggaagacagcttcctgtaactggcggattcgaggggttccttccacttctggggccacctctggatcccgttcagaaaaccactttattgcaatgcggaggttgagaggaggacttggttgatgtttaaagagaagttcccagccaagggcctcggggagcgttctaaatatgaatgaatgggatattttgaaatgaactttgtcagtgttgcctcttgcaatgcctcagtagcatctcagtggtgtgtgaagtttggagatagatggataagggaataataggccacagaaggtgaactttgtgcttcaaggacattggtgagagtccaacagacacaatttatactgcgacagaacttcagcattgtaattatgtaaataactctaaccaaggctgtgtttagattgtattaactatcttctttggacttctgaagagaccactcaatccatccatgtacttccctcttgaaacctgatgtcagctgctgttgaactttttaaagaagtgcatgaaaaaccatttttgaaccttaaaaggtactggtactatagcattttgctatcttttttagtgttaaagagataaagaataataattaaccaaccttgtttaatagatttgggtcatttagaagcctgacaactcattttcatattgtaatctatgtttataatactactactgttatcagtaatgctaaatgtgtaataatgtaacatgatttccctccagagaaagcacaatttaaaacaatccttactaagtaggtgatgagtttgacagtttttgacatttatattaaataacatgtttctctataaagtatggtaatagctttagtgaattaaatttagttgagcatagagaacaaagtaaaagtagtgttgtccaggaagtcagaatttttaactgtactgaataggttccccaatccatcgtattaaaaaacaattaactgccctctgaaataatgggattagaaacaaacaaaactcttaagtcctaaaagttctcaatgtagaggcataaacctgtgctgaacataacttctcatgtatattacccaatggaaaatataatgatcagcaaaaagactggatttgcagaagttttttttttttttcttcatgcctgatgaaagctttggcgaccccaatatatgtattttttgaatctatgaacctgaaaagggtcagaaggatgcccagacatcagcctccttctttcaccccttaccccaaagagaaagagtttgaaactcgagaccataaagatattctttagtggaggctggatgtgcattagcctggatcctcagttctcaaatgtgtgtggcagccaggatgactagatcctgggtttccatccttgagattctgaagtatgaagtctgagggaaaccagagtctgtatttttctaaactccctggctgttctgatcggccagttttcggaaacactgacttaggtttcaggaagttgccatgggaaacaaataatttgaactttggaacagggttggaattcaaccacgcaggaagcctactatttaaatccttggcttcaggttagtgacatttaatgccatctagctagcaattgcgaccttaatttaactttccagtcttagctgaggctgagaaagctaaagtttggttttgacaggttttccaaaagtaaagatgctacttcccactgtatgggggagattgaactttccccgtctcccgtcttctgcctcccactccataccccgccaaggaaaggcatgtacaaaaattatgcaattcagtgttccaagtctctgtgtaaccagctcagtgttttggtggaaaaaacattttaagttttactgataatttgaggttagatgggaggatgaattgtcacatctatccacactgtcaaacaggttggtgtgggttcattggcattctttgcaatactgcttaattgctgataccatatgaatgaaacatgggctgtgattactgcaatcactgtgctatcggcagatgatgctttggaagatgcagaagcaataataaagtacttgactacctactggtgtaatctcaatgcaagccccaactttcttatccaactttttcatagtaagtgcgaagactgagccagattggccaattaaaaacgaaaacctgactaggttctgtagagccaattagacttgaaatacgtttgtgtttctagaatcacagctcaagcattctgtttatcgctcactctcccttgtacagccttattttgttggtgctttgcattttgatattgctgtgagccttgcatgacatcatgaggccggatgaaacttctcagtccagcagtttccagtcctaacaaatgctcccacctgaatttgtatatgactgcatttgtgggtgtgtgtgtgttttcagcaaattccagatttgtttccttttggcctcctgcaaagtctccagaagaaaatttgccaatctttcctactttctatttttatgatgacaatcaaagccggcctgagaaacactatttgtgactttttaaacgattagtgatgtccttaaaatgtggtctgccaatctgtacaaaatggtcctatttttgtgaagagggacataagataaaatgatgttatacatcaatatgtatatatgtatttctatatagacttggagaatactgccaaaacatttatgacaagctgtatcactgccttcgtttatatttttttaactgtgataatccccacaggcacattaactgttgcacttttgaatgtccaaaatttatattttagaaataataaaaagaaagatacttacatgttcccaaaacaatggtgtggtgaatgtgtgagaaaaactaacttgatagggtctaccaatacaaaatgtattacgaatgcccctgttcatgtttttgttttaaaacgtgtaaatgaagatctttatatttcaataaatgatatataatttaaagtta

SEQ ID NO: 74260 - DNA, 6636 bp, Homo sapiens
ttctccccgccccccagttgttgtcgaagtctgggggttgggactggaccccctgattgcgtaagagcaaaaagcgaaggcgcaatctggacactgggagattcggagcgcagggagtttgagagaaacttttattttgaagagaccaaggttgagggggggcttatttcctgacagctatttacttagagcaaatgattagttttagaaggatggactataacattgaatcaattacaaaacgcggtttttgagcccattactgttggagctacagggagagaaacagaggaggagactgcaagagatcattggaggccgtgggcacgctctttactccatgtgtgggacattcattgcggaataacatcggaggagaagtttcccagagctatggggacttcccatccggcgttcctggtcttaggctgtcttctcacagggctgagcctaatcctctgccagctttcattaccctctatccttccaaatgaaaatgaaaaggttgtgcagctgaattcatccttttctctgagatgctttggggagagtgaagtgagctggcagtaccccatgtctgaagaagagagctccgatgtggaaatcagaaatgaagaaaacaacagcggcctttttgtgacggtcttggaagtgagcagtgcctcggcggcccacacagggttgtacacttgctattacaaccacactcagacagaagagaatgagcttgaaggcaggcacatttacatctatgtgccagacccagatgtagcctttgtacctctaggaatgacggattatttagtcatcgtggaggatgatgattctgccattataccttgtcgcacaactgatcccgagactcctgtaaccttacacaacagtgagggggtggtacctgcctcctacgacagcagacagggctttaatgggaccttcactgtagggccctatatctgtgaggccaccgtcaaaggaaagaagttccagaccatcccatttaatgtttatgctttaaaagcaacatcagagctggatctagaaatggaagctcttaaaaccgtgtataagtcaggggaaacgattgtggtcacctgtgctgtttttaacaatgaggtggttgaccttcaatggacttaccctggagaagtgaaaggcaaaggcatcacaatgctggaagaaatcaaagtcccatccatcaaattggtgtacactttgacggtccccgaggccacggtgaaagacagtggagattacgaatgtgctgcccgccaggctaccagggaggtcaaagaaatgaagaaagtcactatttctgtccatgagaaaggtttcattgaaatcaaacccaccttcagccagttggaagctgtcaacctgcatgaagtcaaacattttgttgtagaggtgcgggcctacccacctcccaggatatcctggctgaaaaacaatctgactctgattgaaaatctcactgagatcaccactgatgtggaaaagattcaggaaataaggtatcgaagcaaattaaagctgatccgtgctaaggaagaagacagtggccattatactattgtagctcaaaatgaagatgctgtgaagagctatacttttgaactgttaactcaagttccttcatccattctggacttggtcgatgatcaccatggctcaactgggggacagacggtgaggtgcacagctgaaggcacgccgcttcctgatattgagtggatgatatgcaaagatattaagaaatgtaataatgaaacttcctggactattttggccaacaatgtctcaaacatcatcacggagatccactcccgagacaggagtaccgtggagggccgtgtgactttcgccaaagtggaggagaccatcgccgtgcgatgcctggctaagaatctccttggagctgagaaccgagagctgaagctggtggctcccaccctgcgttctgaactcacggtggctgctgcagtcctggtgctgttggtgattgtgatcatctcacttattgtcctggttgtcatttggaaacagaaaccgaggtatgaaattcgctggagggtcattgaatcaatcagcccggatggacatgaatatatttatgtggacccgatgcagctgccttatgactcaagatgggagtttccaagagatggactagtgcttggtcgggtcttggggtctggagcgtttgggaaggtggttgaaggaacagcctatggattaagccggtcccaacctgtcatgaaagttgcagtgaagatgctaaaacccacggccagatccagtgaaaaacaagctctcatgtctgaactgaagataatgactcacctggggccacatttgaacattgtaaacttgctgggagcctgcaccaagtcaggccccatttacatcatcacagagtattgcttctatggagatttggtcaactatttgcataagaatagggatagcttcctgagccaccacccagagaagccaaagaaagagctggatatctttggattgaaccctgctgatgaaagcacacggagctatgttattttatcttttgaaaacaatggtgactacatggacatgaagcaggctgatactacacagtatgtccccatgctagaaaggaaagaggtttctaaatattccgacatccagagatcactctatgatcgtccagcctcatataagaagaaatctatgttagactcagaagtcaaaaacctcctttcagatgataactcagaaggccttactttattggatttgttgagcttcacctatcaagttgcccgaggaatggagtttttggcttcaaaaaattgtgtccaccgtgatctggctgctcgcaacgtcctcctggcacaaggaaaaattgtgaagatctgtgactttggcctggccagagacatcatgcatgattcgaactatgtgtcgaaaggcagtacctttctgcccgtgaagtggatggctcctgagagcatctttgacaacctctacaccacactgagtgatgtctggtcttatggcattctgctctgggagatcttttcccttggtggcaccccttaccccggcatgatggtggattctactttctacaataagatcaagagtgggtaccggatggccaagcctgaccacgctaccagtgaagtctacgagatcatggtgaaatgctggaacagtgagccggagaagagaccctccttttaccacctgagtgagattgtggagaatctgctgcctggacaatataaaaagagttatgaaaaaattcacctggacttcctgaagagtgaccatcctgctgtggcacgcatgcgtgtggactcagacaatgcatacattggtgtcacctacaaaaacgaggaagacaagctgaaggactgggagggtggtctggatgagcagagactgagcgctgacagtggctacatcattcctctgcctgacattgaccctgtccctgaggaggaggacctgggcaagaggaacagacacagctcgcagacctctgaagagagtgccattgagacgggttccagcagttccaccttcatcaagagagaggacgagaccattgaagacatcgacatgatggacgacatcggcatagactcttcagacctggtggaagacagcttcctgtaactggcggattcgaggggttccttccacttctggggccacctctggatcccgttcagaaaaccactttattgcaatgcggaggttgagaggaggacttggttgatgtttaaagagaagttcccagccaagggcctcggggagcgttctaaatatgaatgaatgggatattttgaaatgaactttgtcagtgttgcctcttgcaatgcctcagtagcatctcagtggtgtgtgaagtttggagatagatggataagggaataataggccacagaaggtgaactttgtgcttcaaggacattggtgagagtccaacagacacaatttatactgcgacagaacttcagcattgtaattatgtaaataactctaaccaaggctgtgtttagattgtattaactatcttctttggacttctgaagagaccactcaatccatccatgtacttccctcttgaaacctgatgtcagctgctgttgaactttttaaagaagtgcatgaaaaaccatttttgaaccttaaaaggtactggtactatagcattttgctatcttttttagtgttaaagagataaagaataataattaaccaaccttgtttaatagatttgggtcatttagaagcctgacaactcattttcatattgtaatctatgtttataatactactactgttatcagtaatgctaaatgtgtaataatgtaacatgatttccctccagagaaagcacaatttaaaacaatccttactaagtaggtgatgagtttgacagtttttgacatttatattaaataacatgtttctctataaagtatggtaatagctttagtgaattaaatttagttgagcatagagaacaaagtaaaagtagtgttgtccaggaagtcagaatttttaactgtactgaataggttccccaatccatcgtattaaaaaacaattaactgccctctgaaataatgggattagaaacaaacaaaactcttaagtcctaaaagttctcaatgtagaggcataaacctgtgctgaacataacttctcatgtatattacccaatggaaaatataatgatcagcaaaaagactggatttgcagaagttttttttttttttcttcatgcctgatgaaagctttggcgaccccaatatatgtattttttgaatctatgaacctgaaaagggtcagaaggatgcccagacatcagcctccttctttcaccccttaccccaaagagaaagagtttgaaactcgagaccataaagatattctttagtggaggctggatgtgcattagcctggatcctcagttctcaaatgtgtgtggcagccaggatgactagatcctgggtttccatccttgagattctgaagtatgaagtctgagggaaaccagagtctgtatttttctaaactccctggctgttctgatcggccagttttcggaaacactgacttaggtttcaggaagttgccatgggaaacaaataatttgaactttggaacagggttcttaagttggtgcgtccttcggatgataaatttaggaaccgaagtccaatcactgtaaattacggtagatcgatcgttaacgctggaattaaattgaaaggtcagaatcgactccgactctttcgatttcaaaccaaaactgtccaaaaggttttcatttctacgatgaagggtgacataccccctctaacttgaaaggggcagagggcagaagagcggagggtgaggtatggggcggttcctttccgtacatgtttttaatacgttaagtcacaaggttcagagacacattggtcgagtcacaaaaccaccttttttgtaaaattcaaaatgactattaaactccaatctaccctcctacttaacagtgtagataggtgtgacagtttgtccaaccacacccaagtaaccgtaagaaacgttatgacgaattaacgactatggtatacttactttgtacccgacactaatgacgttagtgacacgatagccgtctactacgaaaccttctacgtcttcgttattatttcatgaactgatggatgaccacattagagttacgttcggggttgaaagaataggttgaaaaagtatcattcacgcttctgactcggtctaaccggttaatttttcttttggactgatccaagacatctcggttaatctgaactttatgcaaacacaaagatcttagtgtcgagttcgtaagacaaatagcgagtgagagggaacatgtcggaataaaacaaccacgaaacgtaaaactataacgacactcggaacgtactgtagtactccggcctactttgaagagtcaggtcgtcaaaggtcaggattgtttacgagggtggacttaaacatatactgacgtaaacacccacacacacacaaaagtcgtttaaggtctaaacaaaggaaaaccggaggacgtttcagaggtcttcttttaaacggttagaaaggatgaaagataaaaatactactgttagtttcggccggactctttgtgataaacactgaaaaatttgctaatcactacaggaattttacaccagacggttagacatgttttaccaggataaaaacacttctccctgtattctattttactacaatatgtagttatacatatatacataaagatatatctgaacctcttatgacggttttgtaaatactgttcgacatagtgacggaagcaaatataaaaaaattgacactattaggggtgtccgtgtaattgacaacgtgaaaacttacaggttttaaatataaaatctttattatttttctttctatgaatgtacaagggttttgttaccacaccacttacacactctttttgattgaactatcccagatggttatgttttacataatgcttacggggacaagtacaaaaacaaaattttgcacatttacttctagaaatataaagttatttactatatattaaatttccttaag

SEQ ID NO: 74261 - DNA, 2441 bp, Homo sapiens
  misc_feature (2194)..(2194): n is a, c, g, or t
  misc_feature (2197)..(2197): n is a, c, g, or t
ttctccccgccccccagttgttgtcgaagtctgggggttgggactggaccccctgattgcgtaagagcaaaaagcgaaggcgcaatctggacactgggagattcggagcgcagggagtttgagagaaacttttattttgaagagaccaaggttgagggggggcttatttcctgacagctatttacttagagcaaatgattagttttagaaggatggactataacattgaatcaattacaaaacgcggtttttgagcccattactgttggagctacagggagagaaacagaggaggagactgcaagagatcattggaggccgtgggcacgctctttactccatgtgtgggacattcattgcggaataacatcggaggagaagtttcccagagctatggggacttcccatccggcgttcctggtcttaggctgtcttctcacagggctgagcctaatcctctgccagctttcattaccctctatccttccaaatgaaaatgaaaaggttgtgcagctgaattcatccttttctctgagatgctttggggagagtgaagtgagctggcagtaccccatgtctgaagaagagagctccgatgtggaaatcagaaatgaagaaaacaacagcggcctttttgtgacggtcttggaagtgagcagtgcctcggcggcccacacagggttgtacacttgctattacaaccacactcagacagaagagaatgagcttgaaggcaggcacatttacatctatgtgccagacccagatgtagcctttgtacctctaggaatgacggattatttagtcatcgtggaggatgatgattctgccattataccttgtcgcacaactgatcccgagactcctgtaaccttacacaacagtgagggggtggtacctgcctcctacgacagcagacagggctttaatgggaccttcactgtagggccctatatctgtgaggccaccgtcaaaggaaagaagttccagaccatcccatttaatgtttatgctttaaaaggtacttgtatcatctccttccttctttaaataagagtaacaggcaaaatcataaggtgcgtgtaggatttttttttttttttaaatcatcatcactggtgatcctaaattctgatttggggatttaggaccccagctaatacaatgtctgtggctataataataagcttaaaattactaaaggccaaagcttgattacccatgcaagatttcatgtttcatcagttgacttcaaaatactgtaaggaattcttttcttacataagcctcttactttcattcacattcctgactatggcggccctaaaaacaaacatacacccagggggttagatgcctagattaattttagtaacttaagaaaagtgatttgaagaaagtagtttagacttcaaccctttgatgtccacagttagtacgcttggggaagtataatacatgctgaggtcaacagatatttcctgaacactatattacatggaggaatgggtagcagcaagagtacactgttttaaaatcagagcacagctaattttgtgccaggcactgtgctaggttctgggaaagtactgagaataactgaggagcagagtggaagagaagaagagaagaaacaattggatagaaacaaagtgtctagagcagtgtggatcagcaaatgttggttgattaaatgaataaatttattagtcaaggagattgtggacgagtataaccataactaacccactgctgaggaatgcggtgttctgtttgattggaatttatttttattgttattattttgtaattctgtattataactatatgcctaattgttgtacaccatctcacaatcaagccttgtgagattttccaaattttatcttgatcaaactggtttgcaaattatttttcagggttttcttaaaaaaaaaaaaaaaaacccaaactttataagatcctggctatcctgtggatttttaggcccttgtatttgttcttttttatagcaacatcagagctggatctagaaatggaagctcttaaaaccgtgtataagtcaggggaaacgattgtggtcacctgtgctgtttttaacaatgaggtggttgaccttcaatggacttaccctggagaagtggtaggtaccctcaaaacgtgcaatggcttggagcagagcaacagggctcanaanacctgcatttgagctcggtctgtcactgatgggcacatcactgagtttctctagaccttagcttcccacctctgggatgaacacatttgattaaatggcctttaggactccttgatcaatgggagagtttgaaatgatagttcctggaccaggcccttcagaatacataaagagtgtgccgtaagccttctttttcagaagtcagacagaaataggaaggttctctggctacaagatatcaacc

SEQ ID NO: 74262 - DNA, 1291 bp, Homo sapiens
tgcaagtgttattcgacaaaagcaattatgctaatttccttccctgtggctcaattccttttttgacacgatgacttggaggagtcattatgattactccaaacaggaaagacactcgcccagctgtccgcccgcagagagctggctacggtgcagaaagctgaggaggcgtctggagtttttgggtgttaatgattctgcctgcccacaggtcgggtcttggggtctggagcgtttgggaaggtggttgaaggaacagcctatggattaagccggtcccaacctgtcatgaaagttgcagtgaagatgctaaaacccacggccagatccagtgaaaaacaagctctcatgtctgaactgaagataatgactcacctggggccacatttgaacattgtaaacttgctgggagcctgcaccaagtcaggccccatttacatcatcacagagtattgcttctatggagatttggtcaactatttgcataagaatagggatagcttcctgagccaccacccagagaagccaaagaaagagctggatatctttggattgaaccctgctgatgaaagcacacggagctatgttattttatcttttgaaaacaatggtgactacatggacatgaagcaggctgatactacacagtatgtccccatgctagaaaggaaagaggtttctaaatattccgacatccagagatcactctatgatcgtccagcctcatataagaagaaatctatgttaggctgggctggtggagttggcacgagatgtcagaggaacctgagtcatgctcaggcccaagccctgttggcaggcagaccactgctttctggccttccgtgactatctgaaaaaaatcgtgaatggctagagctactcttcacttgctgaacattttcaaaaagaattgacacttgctgaacatttcttttcaattcagaacttctggattaaattgccttcttcctcgaaaaccctgggacccttccagatgggactaactggggaaagtggacaagttacaaacaaagaaactcaaaggaaagtcattggcactgatctctaagatgctatcacatgtgattggtggttgattttattaacaaattataagcaaagtactacaaaggtggctttaaaaagaaaataaagcaattcacagaaactactttttcatgtagcttgtatgtgtgctccatgtatttcatcatggaagattttagtgtgtgtttatgtgtatgtgtgttttaaaggtagctgagatgatttgctaattatggttgaa

SEQ ID NO: 74263 - DNA, 7625 bp, Homo sapiens
ttctccccgccccccagttgttgtcgaagtctgggggttgggactggaccccctgattgcgtaagagcaaaaagcgaaggcgcaatctggacactgggagattcggagcgcagggagtttgagagaaacttttattttgaagagaccaaggttgagggggggcttatttcctgacagctatttacttagagcaaatgattagttttagaaggatggactataacattgaatcaattacaaaacgcggtttttgagcccattactgttggagctacagggagagaaacagaggaggagactgcaagagatcattggaggccgtgggcacgctctttactccatgtgtgggacattcattgcggaataacatcggaggagaagtttcccagagctatggggacttcccatccggcgttcctggtcttaggctgtcttctcacagggctgagcctaatcctctgccagctttcattaccctctatccttccaaatgaaaatgaaaaggttgtgcagctgaattcatccttttctctgagatgctttggggagagtgaagtgagctggcagtaccccatgtctgaagaagagagctccgatgtggaaatcagaaatgaagaaaacaacagcggcctttttgtgacggtcttggaagtgagcagtgcctcggcggcccacacagggttgtacacttgctattacaaccacactcagacagaagagaatgagcttgaaggcaggcacatttacatctatgtgccagacccagatgtagcctttgtacctctaggaatgacggattatttagtcatcgtggaggatgatgattctgccattataccttgtcgcacaactgatcccgagactcctgtaaccttacacaacagtgagggggtggtacctgcctcctacgacagcagacagggctttaatgggaccttcactgtagggccctatatctgtgaggccaccgtcaaaggaaagaagttccagaccatcccatttaatgtttatgctttaaaaggtacttgtatcatctccttccttctttaaataagagtaacaggcaaaatcataaggtgcgtgtaggatttttttttttttttaaatcatcatcactggtgatcctaaattctgatttggggatttaggaccccagctaatacaatgtctgtggctataataataagcttaaaattactaaaggccaaagcttgattacccatgcaagatttcatgtttcatcagttgacttcaaaatactgtaaggaattcttttcttacataagcctcttactttcattcacattcctgactatggcggccctaaaaacaaacatacacccagggggttagatgcctagattaattttagtaacttaagaaaagtgatttgaagaaagtagtttagacttcaaccctttgatgtccacagttagtacgcttggggaagtataatacatgctgaggtcaacagatatttcctgaacactatattacatggaggaatgggtagcagcaagagtacactgttttaaaatcagagcacagctaattttgtgccaggcactgtgctaggttctgggaaagtactgagaataactgaggagcagagtggaagagaagaagagaagaaacaattggatagaaacaaagtgtctagagcagtgtggatcagcaaatgttggttgattaaatgaataaatttattagtcaaggagattgtggacgagtataaccataactaacccactgctgaggaatgcggtgttctgtttgattggaatttatttttattgttattattttgtaattctgtattataactatatgcctaattgttgtacaccatctcacaatcaagccttgtgagattttccaaattttatcttgatcaaactggtttgcaaattatttttcagggttttcttaaaaaaaaaaaaaaaaacccaaactttataagatcctggctatcctgtggatttttaggcccttgtatttgttcttttttatagcaacatcagagctggatctagaaatggaagctcttaaaaccgtgtataagtcaggggaaacgattgtggtcacctgtgctgtttttaacaatgaggtggttgaccttcaatggacttaccctggagaagtgaaaggcaaaggcatcacaatgctggaagaaatcaaagtcccatccatcaaattggtgtacactttgacggtccccgaggccacggtgaaagacagtggagattacgaatgtgctgcccgccaggctaccagggaggtcaaagaaatgaagaaagtcactatttctgtccatgagaaaggtttcattgaaatcaaacccaccttcagccagttggaagctgtcaacctgcatgaagtcaaacattttgttgtagaggtgcgggcctacccacctcccaggatatcctggctgaaaaacaatctgactctgattgaaaatctcactgagatcaccactgatgtggaaaagattcaggaaataaggtatcgaagcaaattaaagctgatccgtgctaaggaagaagacagtggccattatactattgtagctcaaaatgaagatgctgtgaagagctatacttttgaactgttaactcaagttccttcatccattctggacttggtcgatgatcaccatggctcaactgggggacagacggtgaggtgcacagctgaaggcacgccgcttcctgatattgagtggatgatatgcaaagatattaagaaatgtaataatgaaacttcctggactattttggccaacaatgtctcaaacatcatcacggagatccactcccgagacaggagtaccgtggagggccgtgtgactttcgccaaagtggaggagaccatcgccgtgcgatgcctggctaagaatctccttggagctgagaaccgagagctgaagctggtggctcccaccctgcgttctgaactcacggtggctgctgcagtcctggtgctgttggtgattgtgatcatctcacttattgtcctggttgtcatttggaaacagaaaccgaggtatgaaattcgctggagggtcattgaatcaatcagcccggatggacatgaatatatttatgtggacccgatgcagctgccttatgactcaagatgggagtttccaagagatggactagtgcttggtcgggtcttggggtctggagcgtttgggaaggtggttgaaggaacagcctatggattaagccggtcccaacctgtcatgaaagttgcagtgaagatgctaaaacccacggccagatccagtgaaaaacaagctctcatgtctgaactgaagataatgactcacctggggccacatttgaacattgtaaacttgctgggagcctgcaccaagtcaggccccatttacatcatcacagagtattgcttctatggagatttggtcaactatttgcataagaatagggatagcttcctgagccaccacccagagaagccaaagaaagagctggatatctttggattgaaccctgctgatgaaagcacacggagctatgttattttatcttttgaaaacaatggtgactacatggacatgaagcaggctgatactacacagtatgtccccatgctagaaaggaaagaggtttctaaatattccgacatccagagatcactctatgatcgtccagcctcatataagaagaaatctatgttagactcagaagtcaaaaacctcctttcagatgataactcagaaggccttactttattggatttgttgagcttcacctatcaagttgcccgaggaatggagtttttggcttcaaaaaattgtgtccaccgtgatctggctgctcgcaacgtcctcctggcacaaggaaaaattgtgaagatctgtgactttggcctggccagagacatcatgcatgattcgaactatgtgtcgaaaggcagtacctttctgcccgtgaagtggatggctcctgagagcatctttgacaacctctacaccacactgagtgatgtctggtcttatggcattctgctctgggagatcttttcccttggtggcaccccttaccccggcatgatggtggattctactttctacaataagatcaagagtgggtaccggatggccaagcctgaccacgctaccagtgaagtctacgagatcatggtgaaatgctggaacagtgagccggagaagagaccctccttttaccacctgagtgagattgtggagaatctgctgcctggacaatataaaaagagttatgaaaaaattcacctggacttcctgaagagtgaccatcctgctgtggcacgcatgcgtgtggactcagacaatgcatacattggtgtcacctacaaaaacgaggaagacaagctgaaggactgggagggtggtctggatgagcagagactgagcgctgacagtggctacatcattcctctgcctgacattgaccctgtccctgaggaggaggacctgggcaagaggaacagacacagctcgcagacctctgaagagagtgccattgagacgggttccagcagttccaccttcatcaagagagaggacgagaccattgaagacatcgacatgatggacgacatcggcatagactcttcagacctggtggaagacagcttcctgtaactggcggattcgaggggttccttccacttctggggccacctctggatcccgttcagaaaaccactttattgcaatgcggaggttgagaggaggacttggttgatgtttaaagagaagttcccagccaagggcctcggggagcgttctaaatatgaatgaatgggatattttgaaatgaactttgtcagtgttgcctcttgcaatgcctcagtagcatctcagtggtgtgtgaagtttggagatagatggataagggaataataggccacagaaggtgaactttgtgcttcaaggacattggtgagagtccaacagacacaatttatactgcgacagaacttcagcattgtaattatgtaaataactctaaccaaggctgtgtttagattgtattaactatcttctttggacttctgaagagaccactcaatccatccatgtacttccctcttgaaacctgatgtcagctgctgttgaactttttaaagaagtgcatgaaaaaccatttttgaaccttaaaaggtactggtactatagcattttgctatcttttttagtgttaaagagataaagaataataattaaccaaccttgtttaatagatttgggtcatttagaagcctgacaactcattttcatattgtaatctatgtttataatactactactgttatcagtaatgctaaatgtgtaataatgtaacatgatttccctccagagaaagcacaatttaaaacaatccttactaagtaggtgatgagtttgacagtttttgacatttatattaaataacatgtttctctataaagtatggtaatagctttagtgaattaaatttagttgagcatagagaacaaagtaaaagtagtgttgtccaggaagtcagaatttttaactgtactgaataggttccccaatccatcgtattaaaaaacaattaactgccctctgaaataatgggattagaaacaaacaaaactcttaagtcctaaaagttctcaatgtagaggcataaacctgtgctgaacataacttctcatgtatattacccaatggaaaatataatgatcagcaaaaagactggatttgcagaagttttttttttttttcttcatgcctgatgaaagctttggcgaccccaatatatgtattttttgaatctatgaacctgaaaagggtcagaaggatgcccagacatcagcctccttctttcaccccttaccccaaagagaaagagtttgaaactcgagaccataaagatattctttagtggaggctggatgtgcattagcctggatcctcagttctcaaatgtgtgtggcagccaggatgactagatcctgggtttccatccttgagattctgaagtatgaagtctgagggaaaccagagtctgtatttttctaaactccctggctgttctgatcggccagttttcggaaacactgacttaggtttcaggaagttgccatgggaaacaaataatttgaactttggaacagggttggaattcaaccacgcaggaagcctactatttaaatccttggcttcaggttagtgacatttaatgccatctagctagcaattgcgaccttaatttaactttccagtcttagctgaggctgagaaagctaaagtttggttttgacaggttttccaaaagtaaagatgctacttcccactgtatgggggagattgaactttccccgtctcccgtcttctgcctcccactccataccccgccaaggaaaggcatgtacaaaaattatgcaattcagtgttccaagtctctgtgtaaccagctcagtgttttggtggaaaaaacattttaagttttactgataatttgaggttagatgggaggatgaattgtcacatctatccacactgtcaaacaggttggtgtgggttcattggcattctttgcaatactgcttaattgctgataccatatgaatgaaacatgggctgtgattactgcaatcactgtgctatcggcagatgatgctttggaagatgcagaagcaataataaagtacttgactacctactggtgtaatctcaatgcaagccccaactttcttatccaactttttcatagtaagtgcgaagactgagccagattggccaattaaaaacgaaaacctgactaggttctgtagagccaattagacttgaaatacgtttgtgtttctagaatcacagctcaagcattctgtttatcgctcactctcccttgtacagccttattttgttggtgctttgcattttgatattgctgtgagccttgcatgacatcatgaggccggatgaaacttctcagtccagcagtttccagtcctaacaaatgctcccacctgaatttgtatatgactgcatttgtgggtgtgtgtgtgttttcagcaaattccagatttgtttccttttggcctcctgcaaagtctccagaagaaaatttgccaatctttcctactttctatttttatgatgacaatcaaagccggcctgagaaacactatttgtgactttttaaacgattagtgatgtccttaaaatgtggtctgccaatctgtacaaaatggtcctatttttgtgaagagggacataagataaaatgatgttatacatcaatatgtatatatgtatttctatatagacttggagaatactgccaaaacatttatgacaagctgtatcactgccttcgtttatatttttttaactgtgataatccccacaggcacattaactgttgcacttttgaatgtccaaaatttatattttagaaataataaaaagaaagatacttacatgttcccaaaacaatggtgtggtgaatgtgtgagaaaaactaacttgatagggtctaccaatacaaaatgtattacgaatgcccctgttcatgtttttgttttaaaacgtgtaaatgaagatctttatatttcaataaatgatatataatttaaagtta

SEQ ID NO: 74264 - DNA, 7064 bp, Homo sapiens
ttctccccgccccccagttgttgtcgaagtctgggggttgggactggaccccctgattgcgtaagagcaaaaagcgaaggcgcaatctggacactgggagattcggagcgcagggagtttgagagaaacttttattttgaagagaccaaggttgagggggggcttatttcctgacagctatttacttagagcaaatgattagttttagaaggatggactataacattgaatcaattacaaaacgcggtttttgagcccattactgttggagctacagggagagaaacagaggaggagactgcaagagatcattggaggccgtgggcacgctctttactccatgtgtgggacattcattgcggaataacatcggaggagaagtttcccagagctatggggacttcccatccggcgttcctggtcttaggctgtcttctcacagggctgagcctaatcctctgccagctttcattaccctctatccttccaaatgaaaatgaaaaggttgtgcagctgaattcatccttttctctgagatgctttggggagagtgaagtgagctggcagtaccccatgtctgaagaagagagctccgatgtggaaatcagaaatgaagaaaacaacagcggcctttttgtgacggtcttggaagtgagcagtgcctcggcggcccacacagggttgtacacttgctattacaaccacactcagacagaagagaatgagcttgaaggcaggcacatttacatctatgtgccagacccagatgtagcctttgtacctctaggaatgacggattatttagtcatcgtggaggatgatgattctgccattataccttgtcgcacaactgatcccgagactcctgtaaccttacacaacagtgagggggtggtacctgcctcctacgacagcagacagggctttaatgggaccttcactgtagggccctatatctgtgaggccaccgtcaaaggaaagaagttccagaccatcccatttaatgtttatgctttaaaagcaacatcagagctggatctagaaatggaagctcttaaaaccgtgtataagtcaggggaaacgattgtggtcacctgtgctgtttttaacaatgaggtggttgaccttcaatggacttaccctggagaagtgaaaggcaaaggcatcacaatgctggaagaaatcaaagtcccatccatcaaattggtgtacactttgacggtccccgaggccacggtgaaagacagtggagattacgaatgtgctgcccgccaggctaccagggaggtcaaagaaatgaagaaagtcactatttctgtccatgagaaaggtttcattgaaatcaaacccaccttcagccagttggaagctgtcaacctgcatgaagtcaaacattttgttgtagaggtgcgggcctacccacctcccaggatatcctggctgaaaaacaatctgactctgattgaaaatctcactgagatcaccactgatgtggaaaagattcaggaaataaggtatcgaagcaaattaaagctgatccgtgctaaggaagaagacagtggccattatactattgtagctcaaaatgaagatgctgtgaagagctatacttttgaactgttaactcaagttccttcatccattctggacttggtcgatgatcaccatggctcaactgggggacagacggtgaggtgcacagctgaaggcacgccgcttcctgatattgagtggatgatatgcaaagatattaagaaatgtaataatgaaacttcctggactattttggccaacaatgtctcaaacatcatcacggagatccactcccgagacaggagtaccgtggagggccgtgtgactttcgccaaagtggaggagaccatcgccgtgcgatgcctggctaagaatctccttggagctgagaaccgagagctgaagctggtggctcccaccctgcgttctgaactcacggtggctgctgcagtcctggtgctgttggtgattgtgatcatctcacttattgtcctggttgtcatttggaaacagaaaccgaggtatgaaattcgctggagggtcattgaatcaatcagcccggatggacatgaatatatttatgtggacccgatgcagctgccttatgactcaagatgggagtttccaagagatggactagtgcttggtcgggtcttggggtctggagcgtttgggaaggtggttgaaggaacagcctatggattaagccggtcccaacctgtcatgaaagttgcagtgaagatgctaaaacccacggccagatccagtgaaaaacaagctctcatgtctgaactgaagataatgactcacctggggccacatttgaacattgtaaacttgctgggagcctgcaccaagtcaggccccatttacatcatcacagagtattgcttctatggagatttggtcaactatttgcataagaatagggatagcttcctgagccaccacccagagaagccaaagaaagagctggatatctttggattgaaccctgctgatgaaagcacacggagctatgttattttatcttttgaaaacaatggtgactacatggacatgaagcaggctgatactacacagtatgtccccatgctagaaaggaaagaggtttctaaatattccgacatccagagatcactctatgatcgtccagcctcatataagaagaaatctatgttagactcagaagtcaaaaacctcctttcagatgataactcagaaggccttactttattggatttgttgagcttcacctatcaagttgcccgaggaatggagtttttggcttcaaaaaattgtgtccaccgtgatctggctgctcgcaacgtcctcctggcacaaggaaaaattgtgaagatctgtgactttggcctggccagagacatcatgcatgattcgaactatgtgtcgaaaggcagtacctttctgcccgtgaagtggatggctcctgagagcatctttgacaacctctacaccacactgagtgatgtctggtcttatggcattctgctctgggagatcttttcccttggtggcaccccttaccccggcatgatggtggattctactttctacaataagatcaagagtgggtaccggatggccaagcctgaccacgctaccagtgaagtctacgagatcatggtgaaatgctggaacagtgagccggagaagagaccctccttttaccacctgagtgagattgtggagaatctgctgcctggacaatataaaaagagttatgaaaaaattcacctggacttcctgaagagtgaccatcctgctgtggcacgcatgcgtgtggactcagacaatgcatacattggtgtcacctacaaaaacgaggaagacaagctgaaggactgggagggtggtctggatgagcagagactgagcgctgacagtggctacatcattcctctgcctgacattgaccctgtccctgaggaggaggacctgggcaagaggaacagacacagctcgcagacctctgaagagagtgccattgagacgggttccagcagttccaccttcatcaagagagaggacgagaccattgaagacatcgacatgatggacgacatcggcatagactcttcagacctggtggaagacagcttcctgtaactggcggattcgaggggttccttccacttctggggccacctctggatcccgttcagaaaaccactttattgcaatgcggaggttgagaggaggacttggttgatgtttaaagagaagttcccagccaagggcctcggggagcgttctaaatatgaatgaatgggatattttgaaatgaactttgtcagtgttgcctcttgcaatgcctcagtagcatctcagtggtgtgtgaagtttggagatagatggataagggaataataggccacagaaggtgaactttgtgcttcaaggacattggtgagagtccaacagacacaatttatactgcgacagaacttcagcattgtaattatgtaaataactctaaccaaggctgtgtttagattgtattaactatcttctttggacttctgaagagaccactcaatccatccatgtacttccctcttgaaacctgatgtcagctgctgttgaactttttaaagaagtgcatgaaaaaccatttttgaaccttaaaaggtactggtactatagcattttgctatcttttttagtgttaaagagataaagaataataattaaccaaccttgtttaatagatttgggtcatttagaagcctgacaactcattttcatattgtaatctatgtttataatactactactgttatcagtaatgctaaatgtgtaataatgtaacatgatttccctccagagaaagcacaatttaaaacaatccttactaagtaggtgatgagtttgacagtttttgacatttatattaaataacatgtttctctataaagtatggtaatagctttagtgaattaaatttagttgagcatagagaacaaagtaaaagtagtgttgtccaggaagtcagaatttttaactgtactgaataggttccccaatccatcgtattaaaaaacaattaactgccctctgaaataatgggattagaaacaaacaaaactcttaagtcctaaaagttctcaatgtagaggcataaacctgtgctgaacataacttctcatgtatattacccaatggaaaatataatgatcagcaaaaagactggatttgcagaagttttttttttttttcttcatgcctgatgaaagctttggcgaccccaatatatgtattttttgaatctatgaacctgaaaagggtcagaaggatgcccagacatcagcctccttctttcaccccttaccccaaagagaaagagtttgaaactcgagaccataaagatattctttagtggaggctggatgtgcattagcctggatcctcagttctcaaatgtgtgtggcagccaggatgactagatcctgggtttccatccttgagattctgaagtatgaagtctgagggaaaccagagtctgtatttttctaaactccctggctgttctgatcggccagttttcggaaacactgacttaggtttcaggaagttgccatgggaaacaaataatttgaactttggaacagggttggaattcaaccacgcaggaagcctactatttaaatccttggcttcaggttagtgacatttaatgccatctagctagcaattgcgaccttaatttaactttccagtcttagctgaggctgagaaagctaaagtttggttttgacaggttttccaaaagtaaagatgctacttcccactgtatgggggagattgaactttccccgtctcccgtcttctgcctcccactccataccccgccaaggaaaggcatgtacaaaaattatgcaattcagtgttccaagtctctgtgtaaccagctcagtgttttggtggaaaaaacattttaagttttactgataatttgaggttagatgggaggatgaattgtcacatctatccacactgtcaaacaggttggtgtgggttcattggcattctttgcaatactgcttaattgctgataccatatgaatgaaacatgggctgtgattactgcaatcactgtgctatcggcagatgatgctttggaagatgcagaagcaataataaagtacttgactacctactggtgtaatctcaatgcaagccccaactttcttatccaactttttcatagtaagtgcgaagactgagccagattggccaattaaaaacgaaaacctgactaggttctgtagagccaattagacttgaaatacgtttgtgtttctagaatcacagctcaagcattctgtttatcgctcactctcccttgtacagccttattttgttggtgctttgcattttgatattgctgtgagccttgcatgacatcatgaggccggatgaaacttctcagtccagcagtttccagtcctaacaaatgctcccacctgaatttgtatatgactgcatttgtgggtgtgtgtgtgttttcagcaaattccagatttgtttccttttggcctcctgcaaagtctccagaagaaaatttgccaatctttcctactttctatttttatgatgacaatcaaagccggcctgagaaacactatttgtgactttttaaacgattagtgatgtccttaaaatgtggtctgccaatctgtacaaaatggtcctatttttgtgaagagggacataagataaaatgatgttatacatcaatatgtatatatgtatttctatatagacttggagaatactgccaaaacatttatgacaagctgtatcactgccttcgtttatatttttttaactgtgataatccccacaggcacattaactgttgcacttttgaatgtccaaaatttatattttagaaataataaaaagaaagatacttacatgttcccaaaacaatggtgtggtgaatgtgtgagaaaaactaacttgatagggtctaccaatacaaaatgtattacgaatgcccctgttcatgtttttgttttaaaacgtgtaaatgaagatctttatatttcaataaatgatatataatttaaagttaaaaaaaaaaaacacaaacaaaacaaacaaacaaaacacaaaaaacaaaaaaacaaacaaaacaacacacaaaaacacaacaaaaaaccaaaaaaacaaaccacaaccacacaccaacaaaaaaaacacagaaagaaaagaaagagacggaagaggaagagagggggaggcgccgggcggcgaaaagacagagagaggcacgggggggaggagcggaggcgagaggagagaggggaagggcaaagagaccgagacagagggaaaaacacaaagaacacaagacagaaaaaggaaaagaagaacagaagggaagaaggaaacaagagcgaaaagaaagagagagaaagaaagaaccgaggagaagagagagagaaaggagcagcagagaagcaaagagaagagaaaagagaggagaaaagaacaagcgcacg

SEQ ID NO: 74265 - DNA, 6580 bp, Homo sapiens
ttctccccgccccccagttgttgtcgaagtctgggggttgggactggaccccctgattgcgtaagagcaaaaagcgaaggcgcaatctggacactgggagattcggagcgcagggagtttgagagaaacttttattttgaagagaccaaggttgagggggggcttatttcctgacagctatttacttagagcaaatgattagttttagaaggatggactataacattgaatcaattacaaaacgcggtttttgagcccattactgttggagctacagggagagaaacagaggaggagactgcaagagatcattggaggccgtgggcacgctctttactccatgtgtgggacattcattgcggaataacatcggaggagaagtttcccagagctatggggacttcccatccggcgttcctggtcttaggctgtcttctcacagggctgagcctaatcctctgccagctttcattaccctctatccttccaaatgaaaatgaaaaggttgtgcagctgaattcatccttttctctgagatgctttggggagagtgaagtgagctggcagtaccccatgtctgaagaagagagctccgatgtggaaatcagaaatgaagaaaacaacagcggcctttttgtgacggtcttggaagtgagcagtgcctcggcggcccacacagggttgtacacttgctattacaaccacactcagacagaagagaatgagcttgaaggcaggcacatttacatctatgtgccagacccagatgtagcctttgtacctctaggaatgacggattatttagtcatcgtggaggatgatgattctgccattataccttgtcgcacaactgatcccgagactcctgtaaccttacacaacagtgagggggtggtacctgcctcctacgacagcagacagggctttaatgggaccttcactgtagggccctatatctgtgaggccaccgtcaaaggaaagaagttccagaccatcccatttaatgtttatgctttaaaagcaacatcagagctggatctagaaatggaagctcttaaaaccgtgtataagtcaggggaaacgattgtggtcacctgtgctgtttttaacaatgaggtggttgaccttcaatggacttaccctggagaagtgaaaggcaaaggcatcacaatgctggaagaaatcaaagtcccatccatcaaattggtgtacactttgacggtccccgaggccacggtgaaagacagtggagattacgaatgtgctgcccgccaggctaccagggaggtcaaagaaatgaagaaagtcactatttctgtccatgagaaaggtttcattgaaatcaaacccaccttcagccagttggaagctgtcaacctgcatgaagtcaaacattttgttgtagaggtgcgggcctacccacctcccaggatatcctggctgaaaaacaatctgactctgattgaaaatctcactgagatcaccactgatgtggaaaagattcaggaaataaggtatcgaagcaaattaaagctgatccgtgctaaggaagaagacagtggccattatactattgtagctcaaaatgaagatgctgtgaagagctatacttttgaactgttaactcaagttccttcatccattctggacttggtcgatgatcaccatggctcaactgggggacagacggtgaggtgcacagctgaaggcacgccgcttcctgatattgagtggatgatatgcaaagatattaagaaatgtaataatgaaacttcctggactattttggccaacaatgtctcaaacatcatcacggagatccactcccgagacaggagtaccgtggagggccgtgtgactttcgccaaagtggaggagaccatcgccgtgcgatgcctggctaagaatctccttggagctgagaaccgagagctgaagctggtggctcccaccctgcgttctgaactcacggtggctgctgcagtcctggtgctgttggtgattgtgatcatctcacttattgtcctggttgtcatttggaaacagaaaccgaggtatgaaattcgctggagggtcattgaatcaatcagcccggatggacatgaatatatttatgtggacccgatgcagctgccttatgactcaagatgggagtttccaagagatggactagtgcttggtcgggtcttggggtctggagcgtttgggaaggtggttgaaggaacagcctatggattaagccggtcccaacctgtcatgaaagttgcagtgaagatgctaaaacccacggccagatccagtgaaaaacaagctctcatgtctgaactgaagataatgactcacctggggccacatttgaacattgtaaacttgctgggagcctgcaccaagtcaggccccatttacatcatcacagagtattgcttctatggagatttggtcaactatttgcataagaatagggatagcttcctgagccaccacccagagaagccaaagaaagagctggatatctttggattgaaccctgctgatgaaagcacacggagctatgttattttatcttttgaaaacaatggtgactacatggacatgaagcaggctgatactacacagtatgtccccatgctagaaaggaaagaggtttctaaatattccgacatccagagatcactctatgatcgtccagcctcatataagaagaaatctatgttagactcagaagtcaaaaacctcctttcagatgataactcagaaggccttactttattggatttgttgagcttcacctatcaagttgcccgaggaatggagtttttggcttcaaaaaattgtgtccaccgtgatctggctgctcgcaacgtcctcctggcacaaggaaaaattgtgaagatctgtgactttggcctggccagagacatcatgcatgattcgaactatgtgtcgaaaggcagtacctttctgcccgtgaagtggatggctcctgagagcatctttgacaacctctacaccacactgagtgatgtctggtcttatggcattctgctctgggagatcttttcccttggtggcaccccttaccccggcatgatggtggattctactttctacaataagatcaagagtgggtaccggatggccaagcctgaccacgctaccagtgaagtctacgagatcatggtgaaatgctggaacagtgagccggagaagagaccctccttttaccacctgagtgagattgtggagaatctgctgcctggacaatataaaaagagttatgaaaaaattcacctggacttcctgaagagtgaccatcctgctgtggcacgcatgcgtgtggactcagacaatgcatacattggtgtcacctacaaaaacgaggaagacaagctgaaggactgggagggtggtctggatgagcagagactgagcgctgacagtggctacatcattcctctgcctgacattgaccctgtccctgaggaggaggacctgggcaagaggaacagacacagctcgcagacctctgaagagagtgccattgagacgggttccagcagttccaccttcatcaagagagaggacgagaccattgaagacatcgacatgatggacgacatcggcatagactcttcagacctggtggaagacagcttcctgtaactggcggattcgaggggttccttccacttctggggccacctctggatcccgttcagaaaaccactttattgcaatgcggaggttgagaggaggacttggttgatgtttaaagagaagttcccagccaagggcctcggggagcgttctaaatatgaatgaatgggatattttgaaatgaactttgtcagtgttgcctcttgcaatgcctcagtagcatctcagtggtgtgtgaagtttggagatagatggataagggaataataggccacagaaggtgaactttgtgcttcaaggacattggtgagagtccaacagacacaatttatactgcgacagaacttcagcattgtaattatgtaaataactctaaccaaggctgtgtttagattgtattaactatcttctttggacttctgaagagaccactcaatccatccatgtacttccctcttgaaacctgatgtcagctgctgttgaactttttaaagaagtgcatgaaaaaccatttttgaaccttaaaaggtactggtactatagcattttgctatcttttttagtgttaaagagataaagaataataattaaccaaccttgtttaatagatttgggtcatttagaagcctgacaactcattttcatattgtaatctatgtttataatactactactgttatcagtaatgctaaatgtgtaataatgtaacatgatttccctccagagaaagcacaatttaaaacaatccttactaagtaggtgatgagtttgacagtttttgacatttatattaaataacatgtttctctataaagtatggtaatagctttagtgaattaaatttagttgagcatagagaacaaagtaaaagtagtgttgtccaggaagtcagaatttttaactgtactgaataggttccccaatccatcgtattaaaaaacaattaactgccctctgaaataatgggattagaaacaaacaaaactcttaagtcctaaaagttctcaatgtagaggcataaacctgtgctgaacataacttctcatgtatattacccaatggaaaatataatgatcagcaaaaagactggatttgcagaagttttttttttttttcttcatgcctgatgaaagctttggcgaccccaatatatgtattttttgaatctatgaacctgaaaagggtcagaaggatgcccagacatcagcctccttctttcaccccttaccccaaagagaaagagtttgaaactcgagaccataaagatattctttagtggaggctggatgtgcattagcctggatcctcagttctcaaatgtgtgtggcagccaggatgactagatcctgggtttccatccttgagattctgaagtatgaagtctgagggaaaccagagtctgtatttttctaaactccctggctgttctgatcggccagttttcggaaacactgacttaggtttcaggaagttgccatgggaaacaaataatttgaactttggaacagggttggaattcaaccacgcaggaagcctactatttaaatccttggcttcaggttagtgacatttaatgccatctagctagcaattgcgaccttaatttaactttccagtcttagctgaggctgagaaagctaaagtttggttttgacaggttttccaaaagtaaagatgctacttcccactgtatgggggagattgaactttccccgtctcccgtcttctgcctcccactccataccccgccaaggaaaggcatgtacaaaaattatgcaattcagtgttccaagtctctgtgtaaccagctcagtgttttggtggaaaaaacattttaagttttactgataatttgaggttagatgggaggatgaattgtcacatctatccacactgtcaaacaggttggtgtgggttcattggcattctttgcaatactgcttaattgctgataccatatgaatgaaacatgggctgtgattactgcaatcactgtgctatcggcagatgatgctttggaagatgcagaagcaataataaagtacttgactacctactggtgtaatctcaatgcaagccccaactttcttatccaactttttcatagtaagtgcgaagactgagccagattggccaattaaaaacgtagaatcacagctcaagcattctgtttatcgctcactctcccttgtacagccttattttgttggtgctttgcattttgatattgctgtgagccttgcatgacatcatgaggccggatgaaacttctcagtccagcagtttccagtcctaacaaatgctcccacctgaatttgtatatgactgcatttgtgggtgtgtgtgtgttttcagcaaattccagatttgtttccttttggcctcctgcaaagtctccagaagaaaatttgccaatctttcctactttctatttttatgatgacaatcaaagccggcctgagaaacactatttgtgactttttaaacgattagtgatgtccttaaaatgtggtctgccaatctgtacaaaatggtcctatttttgtgaagagggacataagataaaatgatgttatacatcaatatgtatatatgtatttctatatagacttggagaatactgccaaaacatttatgacaagctgtatcactgccttcgtttatatttttttaactgtgataatccccacaggcacattaactgttgcacttttgaatgtccaaaatttatattttagaaataataaaaagaaagatacttacatgttcccaaaacaatggtgtggtgaatgtgtgagaaaaactaacttgatagggtctaccaatacaaaatgtattacgaatgcccctgttcatgtttttgttttaaaacgtgtaaatgaagatctttatatttcaataaatgatatataatttaaagtta

SEQ ID NO: 74266 - DNA, 6580 bp, Homo sapiens
ttctccccgccccccagttgttgtcgaagtctgggggttgggactggaccccctgattgcgtaagagcaaaaagcgaaggcgcaatctggacactgggagattcggagcgcagggagtttgagagaaacttttattttgaagagaccaaggttgagggggggcttatttcctgacagctatttacttagagcaaatgattagttttagaaggatggactataacattgaatcaattacaaaacgcggtttttgagcccattactgttggagctacagggagagaaacagaggaggagactgcaagagatcattggaggccgtgggcacgctctttactccatgtgtgggacattcattgcggaataacatcggaggagaagtttcccagagctatggggacttcccatccggcgttcctggtcttaggctgtcttctcacagggctgagcctaatcctctgccagctttcattaccctctatccttccaaatgaaaatgaaaaggttgtgcagctgaattcatccttttctctgagatgctttggggagagtgaagtgagctggcagtaccccatgtctgaagaagagagctccgatgtggaaatcagaaatgaagaaaacaacagcggcctttttgtgacggtcttggaagtgagcagtgcctcggcggcccacacagggttgtacacttgctattacaaccacactcagacagaagagaatgagcttgaaggcaggcacatttacatctatgtgccagacccagatgtagcctttgtacctctaggaatgacggattatttagtcatcgtggaggatgatgattctgccattataccttgtcgcacaactgatcccgagactcctgtaaccttacacaacagtgagggggtggtacctgcctcctacgacagcagacagggctttaatgggaccttcactgtagggccctatatctgtgaggccaccgtcaaaggaaagaagttccagaccatcccatttaatgtttatgctttaaaagcaacatcagagctggatctagaaatggaagctcttaaaaccgtgtataagtcaggggaaacgattgtggtcacctgtgctgtttttaacaatgaggtggttgaccttcaatggacttaccctggagaagtgaaaggcaaaggcatcacaatgctggaagaaatcaaagtcccatccatcaaattggtgtacactttgacggtccccgaggccacggtgaaagacagtggagattacgaatgtgctgcccgccaggctaccagggaggtcaaagaaatgaagaaagtcactatttctgtccatgagaaaggtttcattgaaatcaaacccaccttcagccagttggaagctgtcaacctgcatgaagtcaaacattttgttgtagaggtgcgggcctacccacctcccaggatatcctggctgaaaaacaatctgactctgattgaaaatctcactgagatcaccactgatgtggaaaagattcaggaaataaggtatcgaagcaaattaaagctgatccgtgctaaggaagaagacagtggccattatactattgtagctcaaaatgaagatgctgtgaagagctatacttttgaactgttaactcaagttccttcatccattctggacttggtcgatgatcaccatggctcaactgggggacagacggtgaggtgcacagctgaaggcacgccgcttcctgatattgagtggatgatatgcaaagatattaagaaatgtaataatgaaacttcctggactattttggccaacaatgtctcaaacatcatcacggagatccactcccgagacaggagtaccgtggagggccgtgtgactttcgccaaagtggaggagaccatcgccgtgcgatgcctggctaagaatctccttggagctgagaaccgagagctgaagctggtggctcccaccctgcgttctgaactcacggtggctgctgcagtcctggtgctgttggtgattgtgatcatctcacttattgtcctggttgtcatttggaaacagaaaccgaggtatgaaattcgctggagggtcattgaatcaatcagcccggatggacatgaatatatttatgtggacccgatgcagctgccttatgactcaagatgggagtttccaagagatggactagtgcttggtcgggtcttggggtctggagcgtttgggaaggtggttgaaggaacagcctatggattaagccggtcccaacctgtcatgaaagttgcagtgaagatgctaaaacccacggccagatccagtgaaaaacaagctctcatgtctgaactgaagataatgactcacctggggccacatttgaacattgtaaacttgctgggagcctgcaccaagtcaggccccatttacatcatcacagagtattgcttctatggagatttggtcaactatttgcataagaatagggatagcttcctgagccaccacccagagaagccaaagaaagagctggatatctttggattgaaccctgctgatgaaagcacacggagctatgttattttatcttttgaaaacaatggtgactacatggacatgaagcaggctgatactacacagtatgtccccatgctagaaaggaaagaggtttctaaatattccgacatccagagatcactctatgatcgtccagcctcatataagaagaaatctatgttagactcagaagtcaaaaacctcctttcagatgataactcagaaggccttactttattggatttgttgagcttcacctatcaagttgcccgaggaatggagtttttggcttcaaaaaattgtgtccaccgtgatctggctgctcgcaacgtcctcctggcacaaggaaaaattgtgaagatctgtgactttggcctggccagagacatcatgcatgattcgaactatgtgtcgaaaggcagtacctttctgcccgtgaagtggatggctcctgagagcatctttgacaacctctacaccacactgagtgatgtctggtcttatggcattctgctctgggagatcttttcccttggtggcaccccttaccccggcatgatggtggattctactttctacaataagatcaagagtgggtaccggatggccaagcctgaccacgctaccagtgaagtctacgagatcatggtgaaatgctggaacagtgagccggagaagagaccctccttttaccacctgagtgagattgtggagaatctgctgcctggacaatataaaaagagttatgaaaaaattcacctggacttcctgaagagtgaccatcctgctgtggcacgcatgcgtgtggactcagacaatgcatacattggtgtcacctacaaaaacgaggaagacaagctgaaggactgggagggtggtctggatgagcagagactgagcgctgacagtggctacatcattcctctgcctgacattgaccctgtccctgaggaggaggacctgggcaagaggaacagacacagctcgcagacctctgaagagagtgccattgagacgggttccagcagttccaccttcatcaagagagaggacgagaccattgaagacatcgacatgatggacgacatcggcatagactcttcagacctggtggaagacagcttcctgtaactggcggattcgaggggttccttccacttctggggccacctctggatcccgttcagaaaaccactttattgcaatgcggaggttgagaggaggacttggttgatgtttaaagagaagttcccagccaagggcctcggggagcgttctaaatatgaatgaatgggatattttgaaatgaactttgtcagtgttgcctcttgcaatgcctcagtagcatctcagtggtgtgtgaagtttggagatagatggataagggaataataggccacagaaggtgaactttgtgcttcaaggacattggtgagagtccaacagacacaatttatactgcgacagaacttcagcattgtaattatgtaaataactctaaccaaggctgtgtttagattgtattaactatcttctttggacttctgaagagaccactcaatccatccatgtacttccctcttgaaacctgatgtcagctgctgttgaactttttaaagaagtgcatgaaaaaccatttttgaaccttaaaaggtactggtactatagcattttgctatcttttttagtgttaaagagataaagaataataattaaccaaccttgtttaatagatttgggtcatttagaagcctgacaactcattttcatattgtaatctatgtttataatactactactgttatcagtaatgctaaatgtgtaataatgtaacatgatttccctccagagaaagcacaatttaaaacaatccttactaagtaggtgatgagtttgacagtttttgacatttatattaaataacatgtttctctataaagtatggtaatagctttagtgaattaaatttagttgagcatagagaacaaagtaaaagtagtgttgtccaggaagtcagaatttttaactgtactgaataggttccccaatccatcgtattaaaaaacaattaactgccctctgaaataatgggattagaaacaaacaaaactcttaagtcctaaaagttctcaatgtagaggcataaacctgtgctgaacataacttctcatgtatattacccaatggaaaatataatgatcagcaaaaagactggatttgcagaagttttttttttttttcttcatgcctgatgaaagctttggcgaccccaatatatgtattttttgaatctatgaacctgaaaagggtcagaaggatgcccagacatcagcctccttctttcaccccttaccccaaagagaaagagtttgaaactcgagaccataaagatattctttagtggaggctggatgtgcattagcctggatcctcagttctcaaatgtgtgtggcagccaggatgactagatcctgggtttccatccttgagattctgaagtatgaagtctgagggaaaccagagtctgtatttttctaaactccctggctgttctgatcggccagttttcggaaacactgacttaggtttcaggaagttgccatgggaaacaaataatttgaactttggaacagggttggaattcaaccacgcaggaagcctactatttaaatccttggcttcaggttagtgacatttaatgccatctagctagcaattgcgaccttaatttaactttccagtcttagctgaggctgagaaagctaaagtttggttttgacaggttttccaaaagtaaagatgctacttcccactgtatgggggagattgaactttccccgtctcccgtcttctgcctcccactccataccccgccaaggaaaggcatgtacaaaaattatgcaattcagtgttccaagtctctgtgtaaccagctcagtgttttggtggaaaaaacattttaagttttactgataatttgaggttagatgggaggatgaattgtcacatctatccacactgtcaaacaggttggtgtgggttcattggcattctttgcaatactgcttaattgctgataccatatgaatgaaacatgggctgtgattactgcaatcactgtgctatcggcagatgatgctttggaagatgcagaagcaataataaagtacttgactacctactggtgtaatctcaatgcaagccccaactttcttatccaactttttcatagtaagtgcgaagactgagccagattggccaattaaaaacgaaaacctgactaggttctgtagagccaattagacttgaaatacgtttgtgtttctagaatcacagctcaagcattctgtttatcgctcactctcccttgtacagccttattttgttggtgctttgcattttgatattgctgtgagccttgcatgacatcatgaggccggatgaaacttctcagtccagcagtttccagtcctaacaaatgctcccacctgaatttgtatatgaggcctcctgcaaagtctccagaagaaaatttgccaatctttcctactttctatttttatgatgacaatcaaagccggcctgagaaacactatttgtgactttttaaacgattagtgatgtccttaaaatgtggtctgccaatctgtacaaaatggtcctatttttgtgaagagggacataagataaaatgatgttatacatcaatatgtatatatgtatttctatatagacttggagaatactgccaaaacatttatgacaagctgtatcactgccttcgtttatatttttttaactgtgataatccccacaggcacattaactgttgcacttttgaatgtccaaaatttatattttagaaataataaaaagaaagatacttacatgttcccaaaacaatggtgtggtgaatgtgtgagaaaaactaacttgatagggtctaccaatacaaaatgtattacgaatgcccctgttcatgtttttgttttaaaacgtgtaaatgaagatctttatatttcaataaatgatatataatttaaagtta

SEQ ID NO: 74267 - DNA, 6580 bp, Homo sapiens
ttctccccgccccccagttgttgtcgaagtctgggggttgggactggaccccctgattgcgtaagagcaaaaagcgaaggcgcaatctggacactgggagattcggagcgcagggagtttgagagaaacttttattttgaagagaccaaggttgagggggggcttatttcctgacagctatttacttagagcaaatgattagttttagaaggatggactataacattgaatcaattacaaaacgcggtttttgagcccattactgttggagctacagggagagaaacagaggaggagactgcaagagatcattggaggccgtgggcacgctctttactccatgtgtgggacattcattgcggaataacatcggaggagaagtttcccagagctatggggacttcccatccggcgttcctggtcttaggctgtcttctcacagggctgagcctaatcctctgccagctttcattaccctctatccttccaaatgaaaatgaaaaggttgtgcagctgaattcatccttttctctgagatgctttggggagagtgaagtgagctggcagtaccccatgtctgaagaagagagctccgatgtggaaatcagaaatgaagaaaacaacagcggcctttttgtgacggtcttggaagtgagcagtgcctcggcggcccacacagggttgtacacttgctattacaaccacactcagacagaagagaatgagcttgaaggcaggcacatttacatctatgtgccagacccagatgtagcctttgtacctctaggaatgacggattatttagtcatcgtggaggatgatgattctgccattataccttgtcgcacaactgatcccgagactcctgtaaccttacacaacagtgagggggtggtacctgcctcctacgacagcagacagggctttaatgggaccttcactgtagggccctatatctgtgaggccaccgtcaaaggaaagaagttccagaccatcccatttaatgtttatgctttaaaagcaacatcagagctggatctagaaatggaagctcttaaaaccgtgtataagtcaggggaaacgattgtggtcacctgtgctgtttttaacaatgaggtggttgaccttcaatggacttaccctggagaagtgaaaggcaaaggcatcacaatgctggaagaaatcaaagtcccatccatcaaattggtgtacactttgacggtccccgaggccacggtgaaagacagtggagattacgaatgtgctgcccgccaggctaccagggaggtcaaagaaatgaagaaagtcactatttctgtccatgagaaaggtttcattgaaatcaaacccaccttcagccagttggaagctgtcaacctgcatgaagtcaaacattttgttgtagaggtgcgggcctacccacctcccaggatatcctggctgaaaaacaatctgactctgattgaaaatctcactgagatcaccactgatgtggaaaagattcaggaaataaggtatcgaagcaaattaaagctgatccgtgctaaggaagaagacagtggccattatactattgtagctcaaaatgaagatgctgtgaagagctatacttttgaactgttaactcaagttccttcatccattctggacttggtcgatgatcaccatggctcaactgggggacagacggtgaggtgcacagctgaaggcacgccgcttcctgatattgagtggatgatatgcaaagatattaagaaatgtaataatgaaacttcctggactattttggccaacaatgtctcaaacatcatcacggagatccactcccgagacaggagtaccgtggagggccgtgtgactttcgccaaagtggaggagaccatcgccgtgcgatgcctggctaagaatctccttggagctgagaaccgagagctgaagctggtggctcccaccctgcgttctgaactcacggtggctgctgcagtcctggtgctgttggtgattgtgatcatctcacttattgtcctggttgtcatttggaaacagaaaccgaggtatgaaattcgctggagggtcattgaatcaatcagcccggatggacatgaatatatttatgtggacccgatgcagctgccttatgactcaagatgggagtttccaagagatggactagtgcttggtcgggtcttggggtctggagcgtttgggaaggtggttgaaggaacagcctatggattaagccggtcccaacctgtcatgaaagttgcagtgaagatgctaaaacccacggccagatccagtgaaaaacaagctctcatgtctgaactgaagataatgactcacctggggccacatttgaacattgtaaacttgctgggagcctgcaccaagtcaggccccatttacatcatcacagagtattgcttctatggagatttggtcaactatttgcataagaatagggatagcttcctgagccaccacccagagaagccaaagaaagagctggatatctttggattgaaccctgctgatgaaagcacacggagctatgttattttatcttttgaaaacaatggtgactacatggacatgaagcaggctgatactacacagtatgtccccatgctagaaaggaaagaggtttctaaatattccgacatccagagatcactctatgatcgtccagcctcatataagaagaaatctatgttagactcagaagtcaaaaacctcctttcagatgataactcagaaggccttactttattggatttgttgagcttcacctatcaagttgcccgaggaatggagtttttggcttcaaaaaattgtgtccaccgtgatctggctgctcgcaacgtcctcctggcacaaggaaaaattgtgaagatctgtgactttggcctggccagagacatcatgcatgattcgaactatgtgtcgaaaggcagtacctttctgcccgtgaagtggatggctcctgagagcatctttgacaacctctacaccacactgagtgatgtctggtcttatggcattctgctctgggagatcttttcccttggtggcaccccttaccccggcatgatggtggattctactttctacaataagatcaagagtgggtaccggatggccaagcctgaccacgctaccagtgaagtctacgagatcatggtgaaatgctggaacagtgagccggagaagagaccctccttttaccacctgagtgagattgtggagaatctgctgcctggacaatataaaaagagttatgaaaaaattcacctggacttcctgaagagtgaccatcctgctgtggcacgcatgcgtgtggactcagacaatgcatacattggtgtcacctacaaaaacgaggaagacaagctgaaggactgggagggtggtctggatgagcagagactgagcgctgacagtggctacatcattcctctgcctgacattgaccctgtccctgaggaggaggacctgggcaagaggaacagacacagctcgcagacctctgaagagagtgccattgagacgggttccagcagttccaccttcatcaagagagaggacgagaccattgaagacatcgacatgatggacgacatcggcatagactcttcagacctggtggaagacagcttcctgtaactggcggattcgaggggttccttccacttctggggccacctctggatcccgttcagaaaaccactttattgcaatgcggaggttgagaggaggacttggttgatgtttaaagagaagttcccagccaagggcctcggggagcgttctaaatatgaatgaatgggatattttgaaatgaactttgtcagtgttgcctcttgcaatgcctcagtagcatctcagtggtgtgtgaagtttggagatagatggataagggaataataggccacagaaggtgaactttgtgcttcaaggacattggtgagagtccaacagacacaatttatactgcgacagaacttcagcattgtaattatgtaaataactctaaccaaggctgtgtttagattgtattaactatcttctttggacttctgaagagaccactcaatccatccatgtacttccctcttgaaacctgatgtcagctgctgttgaactttttaaagaagtgcatgaaaaaccatttttgaaccttaaaaggtactggtactatagcattttgctatcttttttagtgttaaagagataaagaataataattaaccaaccttgtttaatagatttgggtcatttagaagcctgacaactcattttcatattgtaatctatgtttataatactactactgttatcagtaatgctaaatgtgtaataatgtaacatgatttccctccagagaaagcacaatttaaaacaatccttactaagtaggtgatgagtttgacagtttttgacatttatattaaataacatgtttctctataaagtatggtaatagctttagtgaattaaatttagttgagcatagagaacaaagtaaaagtagtgttgtccaggaagtcagaatttttaactgtactgaataggttccccaatccatcgtattaaaaaacaattaactgccctctgaaataatgggattagaaacaaacaaaactcttaagtcctaaaagttctcaatgtagaggcataaacctgtgctgaacataacttctcatgtatattacccaatggaaaatataatgatcagcaaaaagactggatttgcagaagttttttttttttttcttcatgcctgatgaaagctttggcgaccccaatatatgtattttttgaatctatgaacctgaaaagggtcagaaggatgcccagacatcagcctccttctttcaccccttaccccaaagagaaagagtttgaaactcgagaccataaagatattctttagtggaggctggatgtgcattagcctggatcctcagttctcaaatgtgtgtggcagccaggatgactagatcctgggtttccatccttgagattctgaagtatgaagtctgagggaaaccagagtctgtatttttctaaactccctggctgttctgatcggccagttttcggaaacactgacttaggtttcaggaagttgccatgggaaacaaataatttgaactttggaacagggttggaattcaaccacgcaggaagcctactatttaaatccttggcttcaggttagtgacatttaatgccatctagctagcaattgcgaccttaatttaactttccagtcttagctgaggctgagaaagctaaagtttggttttgacaggttttccaaaagtaaagatgctacttcccactgtatgggggagattgaactttccccgtctcccgtcttctgcctcccactccataccccgccaaggaaaggcatgtacaaaaattatgcaattcagtgttccaagtctctgtgtaaccagctcagtgttttggtggaaaaaacattttaagttttactgataatttgaggttagatgggaggatgaattgtcacatctatccacactgtcaaacaggttggtgtgggttcattggcattctttgcaatactgcttaattgctgataccatatgaatgaaacatgggctgtgattactgcaatcactgtgctatcggcagatgatgctttggaagatgcagaagcaataataaagtacttgactacctactggtgtaatctcaatgcaagccccaactttcttatccaactttttcatagtaagtgcgaagactgagccagattggccaattaaaaacgaaaacctgactaggttctgtagagccaattagacttgaaatacgtttgtgtttctagaatcacagctcaagcattctgtttatcgctcactctcccttgtacagccttattttgttggtgctttgcattttgatattgctgtgagccttgcatgacatcatgaggccggatgaaacttctcagtccagcagtttccagtcctaacaaatcaaattccagatttgtttccttttggcctcctgcaaagtctccagaagaaaatttgccaatctttcctactttctatttttatgatgacaatcaaagccggcctgagaaacactatttgtgactttttaaacgattagtgatgtccttaaaatgtggtctgccaatctgtacaaaatggtcctatttttgtgaagagggacataagataaaatgatgttatacatcaatatgtatatatgtatttctatatagacttggagaatactgccaaaacatttatgacaagctgtatcactgccttcgtttatatttttttaactgtgataatccccacaggcacattaactgttgcacttttgaatgtccaaaatttatattttagaaataataaaaagaaagatacttacatgttcccaaaacaatggtgtggtgaatgtgtgagaaaaactaacttgatagggtctaccaatacaaaatgtattacgaatgcccctgttcatgtttttgttttaaaacgtgtaaatgaagatctttatatttcaataaatgatatataatttaaagtta

SEQ ID NO: 74268 - DNA, 1220 bp, Homo sapiens
cttcctgcttctgccccccggggtgctgggattgcaggcgtgagctaccgcgacagtgttttggtggaaaaaacattttaagttttactgataatttgaggttagatgggaggatgaattgtcacatctatccacactgtcaaacaggttggtgtgggttcattggcattctttgcaatactgcttaattgctgataccatatgaatgaaacatgggctgtgattactgcaatcactgtgctatcggcagatgatgctttggaagatgcagaagcaataataaagtacttgactacctactggtgtaatctcaatgcaagccccaactttcttatccaactttttcatagtaagtgcgaagactgagccagattggccaattaaaaacgaaaacctgactaggttctgtagagccaattagacttgaaatacgtttgtgtttctagaatcacagctcaagcattctgtttatcgctcactctcccttgtacagccttattttgttggtgctttgcattttgatattgctgtgagccttgcatgacatcatgaggccggatgaaacttctcagtccagcagtttccagtcctaacaaatgctcccacctgaatttgtatatgactgcatttgtgggtgtgtgtgtgttttcagcaaattccagatttgtttccttttggcctcctgcaaagtctccagaagaaaatttgccaatctttcctactttctatttttatgatgacaatcaaagccggcctgagaaacactatttgtgactttttaaacgattagtgatgtccttaaaatgtggtctgccaatctgtacaaaatggtcctatttttgtgaagagggacataagataaaatgatgttatacatcaatatgtatatatgtatttctatatagacttggagaatactgccaaaacatttatgacaagctgtatcactgccttcgtttatatttttttaactgtgataatccccacaggcacattaactgttgcacttttgaatgtccaaaatttatattttagaaataataaaaagaaagatacttacatgttcccaaaacaatggtgtggtgaatgtgtgagaaaaactaacttgatagggtctaccaatacaaaatgtattacgaatgcccctgttcatgtttttgttttaaaacgtgtaaatgaagatctttatatttcaataaatgatatataatttaaagtta

SEQ ID NO: 74269 - DNA, 3231 bp, Homo sapiens
ttctccccgccccccagttgttgtcgaagtctgggggttgggactggaccccctgattgcgtaagagcaaaaagcgaaggcgcaatctggacactgggagattcggagcgcagggagtttgagagaaacttttattttgaagagaccaaggttgagggggggcttatttcctgacagctatttacttagagcaaatgattagttttagaaggatggactataacattgaatcaattacaaaacgcggtttttgagcccattactgttggagctacagggagagaaacagaggaggagactgcaagagatcattggaggccgtgggcacgctctttactccatgtgtgggacattcattgcggaataacatcggaggagaagtttcccagagctatggggacttcccatccggcgttcctggtcttaggctgtcttctcacagggctgagcctaatcctctgccagctttcattaccctctatccttccaaatgaaaatgaaaaggttgtgcagctgaattcatccttttctctgagatgctttggggagagtgaagtgagctggcagtaccccatgtctgaagaagagagctccgatgtggaaatcagaaatgaagaaaacaacagcggcctttttgtgacggtcttggaagtgagcagtgcctcggcggcccacacagggttgtacacttgctattacaaccacactcagacagaagagaatgagcttgaaggcaggcacatttacatctatgtgccagacccagatgtagcctttgtacctctaggaatgacggattatttagtcatcgtggaggatgatgattctgccattataccttgtcgcacaactgatcccgagactcctgtaaccttacacaacagtgagggggtggtacctgcctcctacgacagcagacagggctttaatgggaccttcactgtagggccctatatctgtgaggccaccgtcaaaggaaagaagttccagaccatcccatttaatgtttatgctttaaaagcaacatcagagctggatctagaaatggaagctcttaaaaccgtgtataagtcaggggaaacgattgtggtcacctgtgctgtttttaacaatgaggtggttgaccttcaatggacttaccctggagaagtgaaaggcaaaggcatcacaatgctggaagaaatcaaagtcccatccatcaaattggtgtacactttgacggtccccgaggccacggtgaaagacagtggagattacgaatgtgctgcccgccaggctaccagggaggtcaaagaaatgaagaaagtcactatttctgtccatgagaaaggtttcattgaaatcaaacccaccttcagccagttggaagctgtcaacctgcatgaagtcaaacattttgttgtagaggtgcgggcctacccacctcccaggatatcctggctgaaaaacaatctgactctgattgaaaatctcactgagatcaccactgatgtggaaaagattcaggaaataaggtatcgaagcaaattaaagctgatccgtgctaaggaagaagacagtggccattatactattgtagctcaaaatgaagatgctgtgaagagctatacttttgaactgttaactcaagttccttcatccattctggacttggtcgatgatcaccatggctcaactgggggacagacggtgaggtgcacagctgaaggcacgccgcttcctgatattgagtggatgatatgcaaagatattaagaaatgtaataatgaaacttcctggactattttggccaacaatgtctcaaacatcatcacggagatccactcccgagacaggagtaccgtggagggccgtgtgactttcgccaaagtggaggagaccatcgccgtgcgatgcctggctaagaatctccttggagctgagaaccgagagctgaagctggtggctcccaccctgcgttctgaactcacggtggctgctgcagtcctggtgctgttggtgattgtgatcatctcacttattgtcctggttgtcatttggaaacagaaaccgaggtatgaaattcgctggagggtcattgaatcaatcagcccggatggacatgaatatatttatgtggacccgatgcagctgccttatgactcaagatgggagtttccaagagatggactagtgcttggtcgggtcttggggtctggagcgtttgggaaggtggttgaaggaacagcctatggattaagccggtcccaacctgtcatgaaagttgcagtgaagatgctaaaacccacggccagatccagtgaaaaacaagctctcatgtctgaactgaagataatgactcacctggggccacatttgaacattgtaaacttgctgggagcctgcaccaagtcaggccccatttacatcatcacagagtattgcttctatggagatttggtcaactatttgcataagaatagggatagcttcctgagccaccacccagagaagccaaagaaagagctggatatctttggattgaaccctgctgatgaaagcacacggagctatgttattttatcttttgaaaacaatggtgactacatggacatgaagcaggctgatactacacagtatgtccccatgctagaaaggaaagaggtttctaaatattccgacatccagagatcactctatgatcgtccagcctcatataagaagaaatctatgttaggctgggctggtggagttggcacgagatgtcagaggaacctgagtcatgctcaggcccaagccctgttggcaggcagaccactgctttctggccttccgtgactatctgaaaaaaatcgtgaatggctagagctactcttcacttgctgaacattttcaaaaagaattgagaacttctggattaaattgccttcttcctcgaaaaccctgggacccttccagatgggactaactggggaaagtggacaagttacaaacaaagaaactcaaaggaaagtcattggcactgatctctaagatgctatcacatgtgattggtggttgattttattaacaaattataagcaaagtactacaaaggtggctttaaaaagaaaataaagcaattcacagaaactactttttcatgtagcttgtatgtgtgctccatgtatttcatcatggaagattttagtgtgtgtttatgtgtatgtgtgttttaaaggtagctgagatgatttgctaattatggttgaa

SEQ ID NO: 74270 - DNA, 3002 bp, Homo sapiens
ttctccccgccccccagttgttgtcgaagtctgggggttgggactggaccccctgattgcgtaagagcaaaaagcgaaggcgcaatctggacactgggagattcggagcgcagggagtttgagagaaacttttattttgaagagaccaaggttgagggggggcttatttcctgacagctatttacttagagcaaatgattagttttagaaggatggactataacattgaatcaattacaaaacgcggtttttgagcccattactgttggagctacagggagagaaacagaggaggagactgcaagagatcattggaggccgtgggcacgctctttactccatgtgtgggacattcattgcggaataacatcggaggagaagtttcccagagctatggggacttcccatccggcgttcctggtcttaggctgtcttctcacagggctgagcctaatcctctgccagctttcattaccctctatccttccaaatgaaaatgaaaaggttgtgcagctgaattcatccttttctctgagatgctttggggagagtgaagtgagctggcagtaccccatgtctgaagaagagagctccgatgtggaaatcagaaatgaagaaaacaacagcggcctttttgtgacggtcttggaagtgagcagtgcctcggcggcccacacagggttgtacacttgctattacaaccacactcagacagaagagaatgagcttgaaggcaggcacatttacatctatgtgccagacccagatgtagcctttgtacctctaggaatgacggattatttagtcatcgtggaggatgatgattctgccattataccttgtcgcacaactgatcccgagactcctgtaaccttacacaacagtgagggggtggtacctgcctcctacgacagcagacagggctttaatgggaccttcactgtagggccctatatctgtgaggccaccgtcaaaggaaagaagttccagaccatcccatttaatgtttatgctttaaaagcaacatcagagctggatctagaaatggaagctcttaaaaccgtgtataagtcaggggaaacgattgtggtcacctgtgctgtttttaacaatgaggtggttgaccttcaatggacttaccctggagaagtgaaaggcaaaggcatcacaatgctggaagaaatcaaagtcccatccatcaaattggtgtacactttgacggtccccgaggccacggtgaaagacagtggagattacgaatgtgctgcccgccaggctaccagggaggtcaaagaaatgaagaaagtcactatttctgtccatgagaaaggtttcattgaaatcaaacccaccttcagccagttggaagctgtcaacctgcatgaagtcaaacattttgttgtagaggtgcgggcctacccacctcccaggatatcctggctgaaaaacaatctgactctgattgaaaatctcactgagatcaccactgatgtggaaaagattcaggaaataaggtatcgaagcaaattaaagctgatccgtgctaaggaagaagacagtggccattatactattgtagctcaaaatgaagatgctgtgaagagctatacttttgaactgttaactcaagttccttcatccattctggacttggtcgatgatcaccatggctcaactgggggacagacggtgaggtgcacagctgaaggcacgccgcttcctgatattgagtggatgatatgcaaagatattaagaaatgtaataatgaaacttcctggactattttggccaacaatgtctcaaacatcatcacggagatccactcccgagacaggagtaccgtggagggccgtgtgactttcgccaaagtggaggagaccatcgccgtgcgatgcctggctaagaatctccttggagctgagaaccgagagctgaagctggtggctcccaccctgcgttctgaactcacggtggctgctgcagtcctggtgctgttggtgattgtgatcatctcacttattgtcctggttgtcatttggaaacagaaaccgaggtatgaaattcgctggagggtcattgaatcaatcagcccggatggacatgaatatatttatgtggacccgatgcagctgccttatgactcaagatgggagtttccaagagatggactagtgcttggtcgggtcttggggtctggagcgtttgggaaggtggttgaaggaacagcctatggattaagccggtcccaacctgtcatgaaagttgcagtgaagatgctaaaacccacggccagatccagtgaaaaacaagctctcatgtctgaactgaagataatgactcacctggggccacatttgaacattgtaaacttgctgggagcctgcaccaagtcaggccccatttacatcatcacagagtattgcttctatggagatttggtcaactatttgcataagaatagggatagcttcctgagccaccacccagagaagccaaagaaagagctggatatctttggattgaaccctgctgatgaaagcacacggagctatgttattttatcttttgaaaacaatggtgactacatggacatgaagcaggctgatactacacagtatgtccccatgctagaaaggaaagaggtttctaaatattccgacatccagagatcactctatgatcgtccagcctcatataagaagaaatctatgttaggtaaaagtgtctatactcactctgggtgttgggactttccagtggtttaatatgatacttaaagtatttagagggaagtgtatagggatggtaagtgaacctggcagcccacgtggtctctaaatgcaggtctgcacaaccagttctgtgacatgtttccaggtttgtggcctgtaaattgaaaagaataaaagctgacaatgtaacaaattttttaaactttaaatttaatagttttaaagaattttcttggtgtgttcctgcagtaaacattttttaaaaaaaa

SEQ ID NO: 74271 - DNA, 2614 bp, Homo sapiens
ttctccccgccccccagttgttgtcgaagtctgggggttgggactggaccccctgattgcgtaagagcaaaaagcgaaggcgcaatctggacactgggagattcggagcgcagggagtttgagagaaacttttattttgaagagaccaaggttgagggggggcttatttcctgacagctatttacttagagcaaatgattagttttagaaggatggactataacattgaatcaattacaaaacgcggtttttgagcccattactgttggagctacagggagagaaacagaggaggagactgcaagagatcattggaggccgtgggcacgctctttactccatgtgtgggacattcattgcggaataacatcggaggagaagtttcccagagctatggggacttcccatccggcgttcctggtcttaggctgtcttctcacagggctgagcctaatcctctgccagctttcattaccctctatccttccaaatgaaaatgaaaaggttgtgcagctgaattcatccttttctctgagatgctttggggagagtgaagtgagctggcagtaccccatgtctgaagaagagagctccgatgtggaaatcagaaatgaagaaaacaacagcggcctttttgtgacggtcttggaagtgagcagtgcctcggcggcccacacagggttgtacacttgctattacaaccacactcagacagaagagaatgagcttgaaggcaggcacatttacatctatgtgccagacccagatgtagcctttgtacctctaggaatgacggattatttagtcatcgtggaggatgatgattctgccattataccttgtcgcacaactgatcccgagactcctgtaaccttacacaacagtgagggggtggtacctgcctcctacgacagcagacagggctttaatgggaccttcactgtagggccctatatctgtgaggccaccgtcaaaggaaagaagttccagaccatcccatttaatgtttatgctttaaaagcaacatcagagctggatctagaaatggaagctcttaaaaccgtgtataagtcaggggaaacgattgtggtcacctgtgctgtttttaacaatgaggtggttgaccttcaatggacttaccctggagaagtgaaaggcaaaggcatcacaatgctggaagaaatcaaagtcccatccatcaaattggtgtacactttgacggtccccgaggccacggtgaaagacagtggagattacgaatgtgctgcccgccaggctaccagggaggtcaaagaaatgaagaaagtcactatttctgtccatgagaaaggtttcattgaaatcaaacccaccttcagccagttggaagctgtcaacctgcatgaagtcaaacattttgttgtagaggtgcgggcctacccacctcccaggatatcctggctgaaaaacaatctgactctgattgaaaatctcactgagatcaccactgatgtggaaaagattcaggaaataaggtatcgaagcaaattaaagctgatccgtgctaaggaagaagacagtggccattatactattgtagctcaaaatgaagatgctgtgaagagctatacttttgaactgttaactcaagttccttcatccattctggacttggtcgatgatcaccatggctcaactgggggacagacggtgaggtgcacagctgaaggcacgccgcttcctgatattgagtggatgatatgcaaagatattaagaaatgtaataatgaaacttcctggactattttggccaacaatgtctcaaacatcatcacggagatccactcccgagacaggagtaccgtggagggccgtgtgactttcgccaaagtggaggagaccatcgccgtgcgatgcctggctaagaatctccttggagctgagaaccgagagctgaagctggtggctcccaccctgcgttctgaactcacggtggctgctgcagtcctggtgctgttggtgattgtgatcatctcacttattgtcctggttgtcatttggaaacagaaaccgaggtatgaaattcgctggagggtcattgaatcaatcagcccggatggacatgaatatatttatgtggacccgatgcagctgccttatgactcaagatgggagtttccaagagatggactagtgcttggtcgggtcttggggtctggagcgtttgggaaggtggttgaaggaacagcctatggattaagccggtcccaacctgtcatgaaagttgcagtgaagatgctaaaacccacggccagatccagtgaaaaacaagctctcatgtctgaactgaagataatgactcacctggggccacatttgaacattgtaaacttgctgggagcctgcaccaagtcaggtgggctcactgacctggagtgaggattttcactggacacatgtggttgtgaaaactgttcaatcaggcttaaatcctccactctccatccccacacatggcagggaatagaagtcccttgaatggagctgactggtcccttgaattgatggaagctcattggtttttgagcaaaatctgttgccagtccagtcatagccattcatggctctttattaa

SEQ ID NO: 74272 - DNA, 1000 bp, Homo sapiens
aatatgtggcagggttaaattgatttataaactccagggagtccagctgatgcccagaccagatggatcacttcacatctgctcagggtggttcctccagagccctgaactggtcacagacatgaagctggaagtctgacattggcttgtcctgtgagcttgcctttttgggtctgagccttcccattagtcaatgcaaaaaagtgttgagctgccctggacattgttttggaaattattgatgtgctctgaatgttttcaggttcttaagtgaaaggtacaatccatttaaaaaagaatgtgtttgttttgcaaagctcagtacacaatattttccatttctgcggttccaagttccattcacttctcattgccaaatgggtgaacttccaagcgcttttaaaagattagccagtgagagttatcggaaccagtacttcctctcccctcccatattgttaaaaatagtttacattgcttcccaggctgggctggtggagttggcacgagatgtcagaggaacctgagtcatgctcaggcccaagccctgttggcaggcagaccactgctttctggccttccgtgactatctgaaaaaaatcgtgaatggctagagctactcttcacttgctgaacattttcaaaaagaattgagaacttctggattaaattgccttcttcctcgaaaaccctgggacccttccagatgggactaactggggaaagtggacaagttacaaacaaagaaactcaaaggaaagtcattggcactgatctctaagatgctatcacatgtgattggtggttgattttattaacaaattataagcaaagtactacaaaggtggctttaaaaagaaaataaagcaattcacagaaactactttttcatgtagcttgtatgtgtgctccatgtatttcatcatggaagattttagtgtgtgtttatgtgtatgtgtgttttaaaggtagctgagatgatttgctaattatggttgaa

SEQ ID NO: 74273 - DNA, 374 bp, Homo sapiens
agctggactgatatgtgatttattctttcaacagccacggccagatccagtgaaaaacaagctctcatgtctgaactgaagataatgactcacctggggccacatttgaacattgtaaacttgctgggagcctgcaccaagtcaggtgggctcactgacctggagtgaggattttcactggacacatgtggttgtgaaaactgttcaatcaggcttaaatcctccactctccatccccacacatggcagggaatagaagtcccttgaatggagctgactggtcccttgaattgatggaagctcattggtttttgagcaaaatctgttgccagtccagtcatagccattcatggctctttattaaaaaaaaaaaa

SEQ ID NO: 74274 - DNA, 721 bp, Homo sapiens
tgttcattattttttatttatttttgtgtgactgagttatttctgagaagcaatctttgaggtctgagattcattcctcatcttggtctattctgctgttaatacttgtgattgtattattaaatacttttagcgtgtttttcagctctgtcagttcagtttggttctttcttaaaattatcatttcaactttcagctcctgtattgttttattgtaatccttagattctttggagttggtttcagtttcttctgaattttcatgatctttatttctatccatgttctgaattctttgcctgtcatttcagccatttcaacctggttaagcaccattactggaactagtgcagtcatttggaggaaaaagacactttggctttttgaattgccagagttcttgtgctgattcccatctgtgtgggctgatgttcctttaactgtggtgtagtttgagtgtagtcaattggctttgtttctggatgttttcagagggctgagactttgtgttgggtctttttttgtagctgaattattgtccttggttttatcggggcatgtattggcaaagtatttttagtgttgaagtttgggatgtgattcagtagatggtgcttaagcatgctggttagtagctgggcactcgctcagccaagtggctcttctgtatttcctcactccagcctgggcaacaagagcgaaactctgtctcaaaaaaaaa

SEQ ID NO: 74275 - DNA, 517 bp, Homo sapiens
caagtttcctcttttctgcttatgggctttatatgatttatagactctttggatttcttattaatattttaaagaagcttaaggaatataaatatatataggcttgaaaaatgatttctgtgatacgtattttagacctaagatttttacttttttagttgaatataatatgctcctagatcaacacctatatttagaaggactaaaatacatgtttttctaaaaaaagtgctttgcttaccatttcttcagcaatcattaggggatctatttatcaaactttaattgctttgctaattcaacagtttttaagatgtaggattttgattattgctatctcatgtttggtcatcatgtctttagttctgtaaaagttctgtaaaaatacaaaaaaattacctgggcatggtggcaatgggcctgtagtcccagctacccaggaggctgagaggtgggaggatcgcttgggcccagcaggcggaagttgcagtgagtggtgattgcactatcctgggcg

SEQ ID NO: 74276 - DNA, 354 bp, Homo sapiens
tttcattacccacccccactctgctgatttatggcataccatgcagagacctaaatcaaaactagaaaatacgtgtgaaataatgcaaaacagagtcgaagggttggcaattctgtaattatacctaaagggaaaataattatgtaataccatatggcaacagtcagtctcagaataacaaatgtccatactgtaaatgcaggattctgggaagagcacacagggtgtttgaagagaagctgaggacaagtttgccttttaaaaggacccatagacaactttgtgaatggtatttggcctttgatagtactgtttattagcccaggaaatgaaggccggagtgagtgaagtgac

SEQ ID NO: 74277 - DNA, 491 bp, Homo sapiens
ctgaaccataaatgtcatgcaaagaataaaatttaagaattaaaatgttgccctgtgtataatctcataaaatctttttaaagctagcaagaactctatttggatcagaactacattattacaaaacaaaatgaacacttgaccaaaaaaccacattaatttaaatggagcctttcattattttcagatagcggggtcttttccatttatagagaatgttgtaactgccaggacacttttgtgtttgcccaggactcctagtaagaattgaatcttgagggagtaatgataacaaaaggtttcttgtgactggtaacatcaggacagacagagtttttggtgagaagaaaatactatatgcctgcttgatagcatgtagagatcatcacatgtatggaaaccttaaaaagtaaacttattttttctaactagaaggctctcataagtttctgttatgattgccatttcaataaatgacattaaaaatctaa

SEQ ID NO: 74278 - DNA, 349 bp, Homo sapiens
ctccagcctgggcaacagagcaagactccgtctcaaaaaaaaaaaaagaaaagaaaaaaggaagctagaaaaacctttggggttttctacgttacttgtgccctacgttacttactacgagtagaaaccacattaaagtaaaagtcagaagacttgccctagtctcagctctgtgaagctcttaatagatagtaagatgaaagcttaaagaaattcccatttaggccagatgtggtggctcacacctgtaatcccagcactttgggaggccaaggtgggcggatcatggggtgaggagatcgagatcttcctggctaacacggtgaaacaccaaaccccgtctatacta

SEQ ID NO: 74279 - DNA, 338 bp, Homo sapiens
tgaaagtcttcttgggcaaaaataagggaaaaaaaagcaggggctagcttgcagaaaagttgatggtctgaggaattctcagattctgctgtttgtatgaactggctctgtaaccttgggcaggttactgatcttgcgaagcccagctttcctttttttacagcggagatggattcatctcatgggctcacggtggggcctgagcacagtgatgtgtgcaaggccctcagcaggatgccaggtacatgataagggccctgtcagtggtgaccactgtgacgagggtgccttaaaaaaggtgggcctccaggctgggcgtggtggctcaagcccgtaat

SEQ ID NO: 74280 - DNA, 912 bp, Homo sapiens
cggccgcggcgtgcactgtcggtcggcggctaaggaggggaggcacctgcatctggggcgcggcgaatcctcgcgtgcgccaggccgcctggggtagtcgccgagactgcgccggccagcggggccgaaacctaatcaggagctgagctttgatggcggcttctggagggacaaagaaggcgcagagcggtgggaggaggctgcgagaacctagctcccgccccagccgacgtgcgagacaaaggccccggcgcggggctcttcggaaggccgggaggttcctgtgacaatgcgagtctgcgccccacgctcccgcaccgtgatgccgaggccaaatggctagagtgggcccaggcatcagcatttctgtttggcagccgggcagttgtggtgcacgttttgaggaactactaaagcctgcctgtgatgaaaaaggcaaaagctgacttcaccaaaattactcccagggagacttctgcatttggctggaaggacatttgagtaaaccgctgaggctggtggttgaaacataatcctctaagggagatcggttccgataccctgagttagggacgcttgcctgggcagagctaaggggagaatgatcaaaagccaagctctgtccccgtcagcacgtcaccctccctcactgtaatccctgactgttttctctaaatgaagaattatttagagaatataaattagaagggccgccacgtcagaattgcctgagtgggagcagtctttccagcctcgaaaaatgtttaaacaatatgcagatgacctagcacaaataaagaatgctagcaaccgctgttatgtgtgagcggtggaattgggagggctcttcccccaatcttcatcaaacagagtaaggtttagaataaaaataatgaaatacagtctttcaaa

SEQ ID NO: 74281 - DNA, 480 bp, Homo sapiens
acattttgaggttgataactagttgaaactgatctgttttcccgacctcaacgtaattgcaaggtcacttcaagagggtaaggggctattgcaactacccaaattcgctattgtagtataaaagctttaattaacagcatgtataggaatgcaaagctatgttctaatgaaactttaaaaagcagacacaaatatgaatgtcatataattgtcatctgtcgcaaaactttttttttaacctttgaaaaatgtgaaacccatttttagctcctagtacagcagaacctgcggtgggctggatttgccctgagggctgtagtttgcccctgtggtacgtatgaaatgccacaattttaaaaagatgtgttacgtgtgggaccatttgtggggcggtttatgctaacttccaatacagtaatatatgtcaactcgcttttgagtgacatttagtctgggtggccatgcccaggaatggatata

SEQ ID NO: 74282 - DNA, 948 bp, Homo sapiens
atcatgtactctatcacctttgtgaatctggggcaccatccctatgtagatacactaatgtttctataacaaatgtttaaatattcacacacacatacacacacacacatatatatgaaaacaccctcaagactattcaaaaatttataatagagaattttatacgagaaatagttttcagctttatattttaaattgtgtttaaaaggactttttaaaatcaaagctcttcaatcccttttcatttcatgatttattttatctagtactttctttatggtttctagacttttgcagctacattctggactcagggaaaaacagataataattgggacaacgcaaaaggaaattcagattaacatttaaagtgtatatatatatataatgctatatatattttatatctataatgctatgtatataatgctatatatatatatcagctatatatatatatatcagaggtaagaaagtgatatatatcagaggtaagaaagtgatatcagaggtaagcagttagtaggccttttgactagaagaaagaggaaataaaaaaagtaaatatttcttagtaaccaagtataatatttaaaactgcccaaccaaagcccatgaagcaagtgaacaagttagttaaatgtttcttttggttttagccaaaagacaactctttcagaagacaaatgaatgtttaaatatggtatatacataaatataaaggtttaaaacttaatgcctcaggaaggggacgtgagtggaggatttttgggtgctggttacatgggtgttagttttttaagtttcctggatctgtactttctgatttgtgcacttttctgtgtatcagagttcaataaagagttctaaagccaatcaataattttgaaatttagcactgtactttaaaaaaataactttatctaggattggtgggttttatctttt

SEQ ID NO: 74283 - DNA, 385 bp, Homo sapiens
tttttttttttacaaaaagaaaacaagtgggaacatatggaaataatatcttttagtactccattatgatctttttttcctggagtaattttctggagagcaattctattgcttaatcaaaaagttttgatttttaaaagcatgttaatgaaatagactaggagaggaataaataagtaactgtttaagagaatacatcctagaccatggcaaagaactcactgatttcactaatgttaacaagcaactgtcaattcaatgaaaaaaacaaaacaaaacaagacaaaacaaaacccaaaagagtctgacaagctgacgagtcgtattggttcaaagggttaatcaggcacctcagatcagtcatagcttatttttgctacaagag

SEQ ID NO: 74284 - DNA, 415 bp, Homo sapiens
caaagcagatggagtgggtttgggcctttacagtggctgagcagtggggctgggaaaagttcctgcatgtgcacaatttaaattttccaatggtaccaaaggaggagatgaggtcatgggccttcttatcagcctgcccagatgcggggccaaaaaggaagagatggaaaggcctgaaaggaattattaatccaacatcaaaaatgaagtctgactctccgttacaatcaattataaagggaattagaaataaatagcacagaaaaccactttaaaatagtgaatctctaccatagcaaattgttactaatatatgaatgaatcaacaaaggcacaaatgtaccataaccccagtgactggtaaagggggtagccagcactttcataccattggcctgagggatttaatgtccca

SEQ ID NO: 74285 - DNA, 328 bp, Homo sapiens
ggctctgagacagtcctcctttcttgaggagacaaactccagcctgtgactgattgcagagtcttctggcaagcttcagagtaaaacaaaaactatttgtggatgacaaaggcttaaaatgggactgtggttaattttttgatggtaattttcggaagtgaaagaactgatgtgtctataacaggaataatgcaatcgacagaaaatttggttatttctgtgacacaaaggtaataaagttaatccacaaagttttaaacacaatgtatttaaagatagtcattatacagattttcagtgaagacagtgaatattacatctgatttac

SEQ ID NO: 74286 - DNA, 568 bp, Homo sapiens
aaaaaacaaaaagctagttctttgaaaagataaacaaaattcatagaccattagggagattaaccaagaaaagaagagagaagatccaaataagctcaattagaaatgaaacagaagctattacaatgtataccacagaaatacaaaagatcattcaaggctactatgaacaccttcacgtgcacaaactagaacacctttatgtgcattaactagaaaacctagaggagatgaacaaattcctggaaatacacaatcctccttgattaaaccagaaagaaatggaatctcttaacagaacaataacaagcagtgagaatgaaatggtaatttaaaaaactgccaacaaaaaaaagttcaggaacagatggattcacagctgaattctatcagaaattcaaagaatgggtaccaatcctattgaaactattacaaaagacagagaaagaggaaatcctccctaaatcattttatgaagccaatatcaccctaatatccaaaccagtaaaggacataacaaaaaactacagaccaatatccctgatgaacatagacacaaaaatcctca

SEQ ID NO: 74287 - DNA, 6088 bp, Homo sapiens
tattttggcagccttatccaagtctggtacaacatagcaaagagaacaggctatgaaataagatggcaagaaagaaatttagtggattggaaatctctctgattgtcctttttgtcatagttactataatagctattgccttaattgttgttttagcaactaagacacctgctgttgatgaaattagtgattctacttcaactccagctactactcgtgtgactacaaatccttctgattcaggaaaatgtccaaatgtgttaaatgatcctgtcaatgtgagaataaactgcattccagaacaattcccaacagagggaatttgtgcacagagaggctgctgctggaggccgtggaatgactctcttattccttggtgcttcttcgttgataatcatggttataacgttcaagacatgacaacaacaagtattggagttgaagccaaattaaacaggataccttcacctacactatttggaaatgacatcaacagtgttctcttcacaactcaaaatcagacacccaatcgtttccggttcaagattactgatccaaataatagaagatatgaagttcctcatcagtatgtaaaagagtttactggacccacagtttctgatacgttgtatgatgtgaaggttgcccaaaacccatttagcatccaagttattaggaaaagcaacggtaaaactttgtttgacaccagcattggtcccttagtgtactctgaccagtacttacagatctcagcccgtcttccaagtgattatatttatggtattggagaacaagttcataagagatttcgtcatgatttatcctggaaaacatggccaatttttactcgagaccaacttcctggtgataataataataatttatacggccatcaaacattctttatgtgtattgaagatacatctggaaagtcattcggtgtttttttaatgaatagcaatgcaatggagatttttatccagcctactccaatagtaacatatagagttaccggtggcattctggatttttacatccttctaggagatacaccagaacaagtagttcaacagtatcaacagcttgttggactaccagcaatgccagcatattggaatcttggattccaactaagtcgctggaattataagtcactagatgtagtgaaagaagtggtaaggagaaaccgggaagctggcataccatttgatacacaggtcactgatattgactacatggaagacaagaaagactttacttatgatcaagttgcgtttaacggactccctcaatttgtgcaagatttgcatgaccatggacagaaatatgtcatcatcttggaccctgcaatttccataggtcgacgtgccaatggaacaacatatgcaacctatgagaggggaaacacacaacatgtgtggataaatgagtcagatggaagtacaccaattattggagaggtatggccaggattaacagtataccctgatttcactaatccaaactgcattgattggtgggcaaatgaatgcagtattttccatcaagaagtgcaatatgatggactttggattgacatgaatgaagtttccagctttattcaaggttcaacaaaaggatgtaatgtaaacaaattgaattatccaccgtttactcctgatattcttgacaaactcatgtattccaaaacaatttgcatggatgctgtgcagaactggggtaaacagtatgatgttcatagcctctatggatacagcatggctatagccacagagcaagctgtacaaaaagtttttcctaataagagaagcttcattcttacccgctcaacatttgctggatctggaagacatgctgctcattggttaggagacaatactgcttcatgggaacaaatggaatggtctataactggaatgctggagttcagtttgtttggaatacctttggttggagcagacatctgtggatttgtggctgaaaccacagaagaactttgcagaagatggatgcaacttggggcattttatccattttccagaaaccataattctgacggatatgaacatcaggatcctgcattttttgggcagaattcacttttggttaaatcatcaaggcagtatttaactattcgctacaccttattacccttcctctacactctgttttataaagcccatgtgtttggagaaacagtagcaagaccagttcttcatgagttttatgaggatacgaacagctggattgaggacactgagtttttgtggggccctgcattacttattactcctgttctaaaacagggagcagatactgtgagtgcctacatccctgatgctatttggtatgattatgaatctggtgcaaaaaggccatggaggaaacaacgggttgatatgtatcttccagcagacaaaataggattacatcttagaggaggttatatcatccccattcaagaaccagatgtaacaacaacagcaagccgtaagaatcctctaggacttatagtcgcattaggtgaaaacaacacagccaaaggagactttttctgggatgatggagaaactaaagatacaatacaaaatggcaactacatattatatacattttcagtttctaataacacattagatattgtgtgcacacattcatcatatcaggaaggaactaccttagcatttcagactgtaaaaatccttgggttgacagacagtgttacagaagttagagtggcggaaaataatcaaccaatgaacgctcattccaatttcacttatgatgcttctaaccaggttctcctaattgcagatctcaaacttaatcttggaagaaactttagtgttcaatggaatcaaattttctcagaaaatgaaagatttaattgttatccagatgcagatttggcaactgaacaaaagtgcacacaacgtggctgtgtatggagaacgggttcttctctatccaaagcacctgagtgttactttcccagacaagataactcttattcagtcaactcagctcgctattcatccatgggtataacagctgacctccaactaaatactgcaaatgccagaataaagttaccttctgaccccatctcaactcttcgtgtggaggtgaaatatcacaaaaatgatatgttgcagtttaagatttatgatccccaaaagaagagatatgaagtaccagtaccgttaaacattccaaccaccccaataagtacttatgaagacagactttatgatgtggaaatcaaggaaaatccttttggcatccagattcgacggagaagcagtggaagagtcatttgggattcttggctgcctggatttgcttttaatgaccagttcattcaaatatcgactcgcctgccatcagaatatatatatggttttggggaagtggaacatacagcatttaagcgagatctgaactggaatacttggggaatgttcacaagagaccaaccccctggttacaaacttaattcctatggatttcatccctattacatggctctggaagaggagggcaatgctcatggtgttttcttactcaacagcaatgcaatggatgttacattccagccaactcctgctctaacttaccgtacagttggagggatcttggatttttatatgtttttgggcccaactccacaagttgcaacaaagcaataccatgaagtaattggccatccagtcatgccagcttattgggctttgggattccaattatgtcgttatggatatgcaaatacttcagaggttcgggaattatatgacgctatggtggctgctaacatcccctatgatgttcagtacacagacattgactacatggaaaggcagctagactttacaattggtgaagcattccaggaccttcctcagtttgttgacaaaataagaggagaaggaatgagatacattattatcctggatccagcaatttcaggaaatgaaacaaagacttaccctgcatttgaaagaggacagcagaatgatgtctttgtcaaatggccaaacaccaatgacatttgttgggcaaaggtttggccagatttgcccaacataacaatagataaaactctaacggaagatgaagctgttaatgcttccagagctcatgtagctttcccagatttcttcaggacttccacagcagagtggtgggccagagaaattgtggacttttacaatgaaaagatgaagtttgatggtttgtggattgatatgaatgagccatcaagttttgtaaatggaacaactactaatcaatgcagaaatgacgaactaaattatccaccttatttcccagaactcacaaaaagaactgatggattacatttcagaacaatttgcatggaagctgagcagattcttagtgatggaacatcagttttgcattacgatgttcacaatctctatggatggtcacagatgaaacctactcatgatgcattgcaaaagacaactggaaaaagagggattgtaatttctcgttccacgtatcctactagtggacgatggggaggacactggcttggagacaactatgcacgatgggacaacatggacaaatcaatcattggtatgatggaatttagtctgtttggaatatcatatactggagcagacatctgtggttttttcaacaactcagaatatcatctctgtacccgctggatgcaacttggagcattttatccatactcaaggaatcacaacattgcaaatactagaagacaagatcccgcttcctggaatgaaacttttgctgaaatgtcaaggaatattctaaatattagatacaccttattgccctatttttacacacaaatgcatgaaattcatgctaatggtggcactgttatccgaccccttttgcatgagttctttgatgaaaaaccaacctgggatatattcaagcagttcttatggggtccagcatttatggttaccccagtactggaaccttatgttcaaactgtaaatgcctacgtccccaatgctcggtggtttgactaccatacaggcaaagatattggcgtcagaggacaatttcaaacatttaatgcttcttatgacacaataaacctacatgtccgtggtggtcacatcctaccatgtcaagagccagctcaaaacacattttacagtcgacaaaaacacatgaagctcattgttgctgcagatgataatcagatggcacagggttctctgttttgggatgatggagagagtatagacacctatgaaagagacctatatttatctgtacaatttaatttaaaccagaccaccttaacaagcactatattgaagagaggttacataaataaaagtgaaacgaggcttggatcccttcatgtatgggggaaaggaactactcctgtcaatgcagttactctaacgtataacggaaataaaaattcgcttccttttaatgaagacactaccaacatgatattacgtattgatctgaccacacacaatgttactctagaagaaccaatagaaatcaactggtcatgaagatcaccatcaattttagttgtcaatgggaaaaaacaccaggatttaagtttcacagcacttacaattttccctcttcacttggttcttgtactctacaaaatatagctttcataacatcgaaaagttattttgtagcgtacatcaatgataatgctaattttattatagtaatgtgacttggattcaattttaaggcatatttaacaaaatttgaatagccctatttatccttgttaagtatcagctacaattgtaaactagttactaaacatgtatgtaaatagctaagatataatttaaacgtgatttttaaattaaataaaatttttatgtaattatatatactatatttttctcaatgtttagcagatttaagatatgtaacaacaattatttgaagatttaattacttcttagtatgtgcatttaattagaaaaagagaataaaaaatgtaagtgtaaaaaaaaaaaatcatttttaaacatccctccaaaattaaaaacaaaaatcttactgtgtaaatctcaaaaaaacttcg

SEQ ID NO: 74288 - DNA, 6015 bp, Homo sapiens
tattttggcagccttatccaagtctggtacaacatagcaaagagaacaggctatgaaataagatggcaagaaagaaatttagtggattggaaatctctctgattgtcctttttgtcatagttactataatagctattgccttaattgttgttttagcaactaagacacctgctgttgatgaaattagtgattctacttcaactccagctactactcgtgtgactacaaatccttctgattcaggaaaatgtccaaatgtgttaaatgatcctgtcaatgtgagaataaactgcattccagaacaattcccaacagagggaatttgtgcacagagaggctgctgctggaggccgtggaatgactctcttattccttggtgcttcttcgttgataatcatggttataacgttcaagacatgacaacaacaagtattggagttgaagccaaattaaacaggataccttcacctacactatttggaaatgacatcaacagtgttctcttcacaactcaaaatcagacacccaatcgtttccggttcaagattactgatccaaataatagaagatatgaagttcctcatcagtatgtaaaagagtttactggacccacagtttctgatacgttgtatgatgtgaaggttgcccaaaacccatttagcatccaagttattaggaaaagcaacggtaaaactttgtttgacaccagcattggtcccttagtgtactctgaccagtacttacagatctcagcccgtcttccaagtgattatatttatggtattggagaacaagttcataagagatttcgtcatgatttatcctggaaaacatggccaatttttactcgagaccaacttcctggtgataataataataatttatacggccatcaaacattctttatgtgtattgaagatacatctggaaagtcattcggtgtttttttaatgaatagcaatgcaatggagatttttatccagcctactccaatagtaacatatagagttaccggtggcattctggatttttacatccttctaggagatacaccagaacaagtagttcaacagtatcaacagcttgttggactaccagcaatgccagcatattggaatcttggattccaactaagtcgctggaattataagtcactagatgtagtgaaagaagtggtaaggagaaaccgggaagctggcataccatttgatacacaggtcactgatattgactacatggaagacaagaaagactttacttatgatcaagttgcgtttaacggactccctcaatttgtgcaagatttgcatgaccatggacagaaatatgtcatcatcttggaccctgcaatttccataggtcgacgtgccaatggaacaacatatgcaacctatgagaggggaaacacacaacatgtgtggataaatgagtcagatggaagtacaccaattattggagaggtatggccaggattaacagtataccctgatttcactaatccaaactgcattgattggtgggcaaatgaatgcagtattttccatcaagaagtgcaatatgatggactttggattgacatgaatgaagtttccagctttattcaaggttcaacaaaaggatgtaatgtaaacaaattgaattatccaccgtttactcctgatattcttgacaaactcatgtattccaaaacaatttgcatggatgctgtgcagaactggggtaaacagtatgatgttcatagcctctatggatacagcatggctatagccacagagcaagctgtacaaaaagtttttcctaataagagaagcttcattcttacccgctcaacatttgctggatctggaagacatgctgctcattggttaggagacaatactgcttcatgggaacaaatggaatggtctataactggaatgctggagttcagtttgtttggaatacctttggttggagcagacatctgtggatttgtggctgaaaccacagaagaactttgcagaagatggatgcaacttggggcattttatccattttccagaaaccataattctgacggatatgaacatcaggatcctgcattttttgggcagaattcacttttggttaaatcatcaaggcagtatttaactattcgctacaccttattacccttcctctacactctgttttataaagcccatgtgtttggagaaacagtagcaagaccagttcttcatgagttttatgaggatacgaacagctggattgaggacactgagtttttgtggggccctgcattacttattactcctgttctaaaacagggagcagatactgtgagtgcctacatccctgatgctatttggtatgattatgaatctggtgcaaaaaggccatggaggaaacaacgggttgatatgtatcttccagcagacaaaataggattacatcttagaggaggttatatcatccccattcaagaaccagatgtaacaacaacagcaagccgtaagaatcctctaggacttatagtcgcattaggtgaaaacaacacagccaaaggagactttttctgggatgatggagaaactaaagatacaatacaaaatggcaactacatattatatacattttcagtttctaataacacattagatattgtgtgcacacattcatcatatcaggaaggaactaccttagcatttcagactgtaaaaatccttgggttgacagacagtgttacagaagttagagtggcggaaaataatcaaccaatgaacgctcattccaatttcacttatgatgcttctaaccaggttctcctaattgcagatctcaaacttaatcttggaagaaactttagtgttcaatggaatcaaattttctcagaaaatgaaagatttaattgttatccagatgcagatttggcaactgaacaaaagtgcacacaacgtggctgtgtatggagaacgggttcttctctatccaaagcacctgagtgttactttcccagacaagataactcttattcagtcaactcagctcgctattcatccatgggtataacagctgacctccaactaaatactgcaaatgccagaataaagttaccttctgaccccatctcaactcttcgtgtggaggtgaaatatcacaaaaatgatatgttgcagtttaagatttatgatccccaaaagaagagatatgaagtaccagtaccgttaaacattccaaccaccccaataagtacttatgaagacagactttatgatgtggaaatcaaggaaaatccttttggcatccagattcgacggagaagcagtggaagagtcatttgggattcttggctgcctggatttgcttttaatgaccagttcattcaaatatcgactcgcctgccatcagaatatatatatggttttggggaagtggaacatacagcatttaagcgagatctgaactggaatacttggggaatgttcacaagagaccaaccccctggttacaaacttaattcctatggatttcatccctattacatggctctggaagaggagggcaatgctcatggtgttttcttactcaacagcaatgcaatggatgttacattccagccaactcctgctctaacttaccgtacagttggagggatcttggatttttatatgtttttgggcccaactccacaagttgcaacaaagcaataccatgaagtaattggccatccagtcatgccagcttattgggctttgggattccaattatgtcgttatggatatgcaaatacttcagaggttcgggaattatatgacgctatggtggctgctaacatcccctatgatgttcagtacacagacattgactacatggaaaggcagctagactttacaattggtgaagcattccaggaccttcctcagtttgttgacaaaataagaggagaaggaatgagatacattattatcctggatccagcaatttcaggaaatgaaacaaagacttaccctgcatttgaaagaggacagcagaatgatgtctttgtcaaatggccaaacaccaatgacatttgttgggcaaaggtttggccagatttgcccaacataacaatagataaaactctaacggaagatgaagctgttaatgcttccagagctcatgtagctttcccagatttcttcaggacttccacagcagagtggtgggccagagaaattgtggacttttacaatgaaaagatgaagtttgatggtttgtggattgatatgaatgagccatcaagttttgtaaatggaacaactactaatcaatgcagaaatgacgaactaaattatccaccttatttcccagaactcacaaaaagaactgatggattacatttcagaacaatttgcatggaagctgagcagattcttagtgatggaacatcagttttgcattacgatgttcacaatctctatggatggtcacagatgaaacctactcatgatgcattgcaaaagacaactggaaaaagagggattgtaatttctcgttccacgtatcctactagtggacgatggggaggacactggcttggagacaactatgcacgatgggacaacatggacaaatcaatcattggtatgatggaatttagtctgtttggaatatcatatactggagcagacatctgtggttttttcaacaactcagaatatcatctctgtacccgctggatgcaacttggagcattttatccatactcaaggaatcacaacattgcaaatactagaagacaagatcccgcttcctggaatgaaacttttgctgaaatgtcaaggaatattctaaatattagatacaccttattgccctatttttacacacaaatgcatgaaattcatgctaatggtggcactgttatccgaccccttttgcatgagttctttgatgaaaaaccaacctgggatatattcaagcagttcttatggggtccagcatttatggttaccccagtactggaaccttatgttcaaactgtaaatgcctacgtccccaatgctcggtggtttgactaccatacaggcaaagatattggcgtcagaggacaatttcaaacatttaatgcttcttatgacacaataaacctacatgtccgtggtggtcacatcctaccatgtcaagagccagctcaaaacacattttacagtcgacaaaaacacatgaagctcattgttgctgcagatgataatcagatggcacagggttctctgttttgggatgatggagagagtatagacacctatgaaagagacctatatttatctgtacaatttaatttaaaccagaccaccttaacaagcactatattgaagagaggttacataaataaaagtgaaacgaggcttggatcccttcatgtatgggggaaaggaactactcctgtcaatgcagttactctaacgtataacggaaataaaaattcgcttccttttaatgaagacactaccaacatgatattacgtattgatctgaccacacacaatgttactctagaagaaccaatagaaatcaactggtcatgaagatcaccatcaattttagttgtcaatgggaaaaaacaccaggatttaagtttcacagcacttacaattttccctcttcacttggttcttgtactctacaaaatatagctttcataacatcgaaaagttattttgtagcgtacatcaatgataatgctaattttattatagtaatgtgacttggattcaattttaaggcatatttaacaaaatttgaatagccctatttatccttgttaagtatcagctacaattgtaaactagttactaaacatgtatgtaaatagctaagatataatttaaacgtgatttttaaattaaataaaatttttatgtaattatatatactatatttttctcaatgtttagcagatttaagatatgtaacaacaattatttgaagatttaattacttcttagtatgtgcatttaattagaaaaagagaataaaaaatgtaagtgtaaaaaa

SEQ ID NO: 74289 - DNA, 532 bp, Homo sapiens
tgcaaagtgtataccaaaatatatgcatgcataaaagtgtgtctcataaatatgtaagcatgcatgtatagcatgatgtacatagtatttctatgcgtgtgtgtataaatgcatgtgcatatatggatgtacacatgtataaaggtaatgcatgtatcacacagaaatatatgcattgtatatgtgaaatatataccatattcagttgatcattatttgcatattctgtgtttgcattctgtatcacctactcattaatatttctttgtcaccccaaaatcagtagttgcaacaccttcacagtcatttatggacattggcagagctttgaaaatttttgattgtctgacacacacattcccagctgaagtagaacaaggcaatattctgccttctttattcagctctcgttctgtaaataagtgtcatttttgcagcccacttaatgccacgttttttgcattttttgtgcttttttgttgatgattttgctgtttaaaatggcccccaaatgtagtgttaaattgctggt

SEQ ID NO: 74290 - DNA, 380 bp, Homo sapiens
cctgctgaatgttgtaactcagtagacaaggctttttgtcttttgacagtggcagcccaggttgaattcttggcttcggaaatgattcctttctggtttgttacttaactttcccactttttgagggtcccacccccaccccaatggctagcttccgatttcctgtcttgaatttttctttctccaaactgcccttgggaagattctaaatcttgtaaaaagaagctgcttaccatctctttgaaacaccttatgggtccatggttaagctgtaaccttagctaaaacttattaatttcacatgggaagttacctgtggcaaagttcaaaagccagaaatattgactgtcctggctagagtctgataataagagattttt

SEQ ID NO: 74291 - DNA, 370 bp, Homo sapiens
tagggactataacccagctcagaaaggtcaacttcagaggaggacagtgggaaggtttgctttgctccgtgatatagagttggtttcctttggctggggcacagcaatgggcagatgcgttgctcaaatcagacgttgaaatgaagaaggaggaggaggcagctgggtgtccagtcttcagtctggtttcccgctaatggacagagctctgcaatgactgcacaataaaccttttattctgaagccagcattggtatttactgatatgctcttactggcacaattgtttaataaaatctgcacgatctttattgcctgaaaagcaatgtgtttttccaaagaaatgtatatggccataaaatattcaaaa

SEQ ID NO: 74292 - DNA, 833 bp, Homo sapiens
tgctatttagcaactacccaggtggaagccagattatgtgctgtggaagaagatacatttgaggtttacctttatgtaactataaaagatgaaaaagtttgtgttaatgatgatcttgttgcaaagaactatgcttgttatatgtcacctacaaagaataaaaaccttgattatttagaaaaaccaagattgaatataaaatcagcaccctccttcaataaactcaatccagcacttacactctggccaatgtttttgcaaggaaaagatgttcaaggaatggaagattcacatggtgtaaattttccggcacaatctctgcaacatacatggtgcaagggtattgtcggtgacctcaggccaacagccacagcacaggacaaagctgtaaaatgtaatatggattcattgagagattcacctaaagacaaatctgaaaagaaacaccattgcatctctttaaaagatacaaataagcgtgttgaatcctcagtgtactggccagcaaaaagaggcataaccatatatgctgatccagatgtaccagaagcaagtgctttaagtcagaagtcaaatgagaaacctcttagattgactgagaagaaagaatatgatgagaagaatagctgtgtgaaattactgcagtttttaaatcctgatcctttgagagctgacggaatctctgatctccagcagacttgagattagaagagaaactccttagatgggggacttaacctgaagacatccttttagaaacgatcgaatggattgttgcttctgagaaattgttccttgttttttggataataaacgatcttccttttggtaaa

SEQ ID NO: 74293 - DNA, 552 bp, Homo sapiens
cagagagactttactatcgtctcttgaaaaatataaaccttccttaggatgctgcccactgggagaagagggaagactcaggggaaaggattcctgctcagttccacaagttgtcgaaatttgcttaattagcaaaaactgaatttaaactccacactgtccacaaactcagcctctatgttctcagtgacccttttgtattcactgctggttcctctaccatctccacttccttcccatcaaagtaagaggaccccaagccttggctttgagcaaggaggtcttatttatttgctccattccccaactccggctctaaaatcacagggggaaaaactccaaaaacagagcaaagaaaatttttaaggtctcttgtcaaatttctagatactggccacgcgcagtggctcacacctgtaatcccagcactttggaaggccaaggcgggcggatcacgaggtcaggaggtcgagaccatcctggctaacacggtgaaacctcatctctactaaaaatacaaaaaaattagctgggcgtaagcgtagatggacg

SEQ ID NO: 74294 - DNA, 1535 bp, Homo sapiens
  misc_feature (1042)..(1043): n is a, c, g, or t
tgatcttggctcactgcagcctctgcctcccgggttcaagcaattctcctgcctcagcctccccagtagctgggattacaggcgcaggccaccacgcccggccagtttttgtatttttagtagagacgaggtttcaccacgttggccaggatggtcttgatctcctgacctggtgatcctacccgcctcggcctcccaaagtgctaggatgacaggcgtgagccaccgtgcccggtccagttgtgtttttatgcactggcaaggaacaattcaaaaatgtaattaagaaaaccgctgggcgtggtggctcacgcctgtagtcccagcactttgagcggccgaggcgggtggatcccttgatcccaggagttcaagaccatcctgggcaatgtggtgaaaccccctccctacaaaaaatacaaaaaattagcggcagtgatggcatgtgcctacgatcccagctactcaggaggctgacgtgggaggatcacccgagcctgggggtcaaggctgcagtgagctgtcacatcatgcatcattgcactccagcctgaaaaaggagtgaaattctgcaacatgttacaacgtgaatgaaccttgaaaacgtcattctaagtgaaataagccagatacaaaaggacaatattgcatgtttccacttatagagatacctacaagaatcaaattcatagagacggaaagtagaatagtggttaaaggggtctgggcggagggaggaaagggaagtttgttttacgggtagagtttcagtttgggatgtcgaaaaagttctggagataaataatggtgatggttacatgccaatggctacacgaatgtacttaatgccactgaattgtatatgtgaaaaatggttaaaatggtaaattttgtatctatttaataccatcccccctaaaaaaaaaattgtttttaagagtcaagatctcactctgtctcccaggctggggtgcagtggggtaactgatcagagctcactgcagctttgaactcagccagcttccctgactcaaacgatcannccgcttcagcctcccgagtagctgggactacagacggtgccatcacgcccagctcattgttgattcccgcccccttggtagagacgggattccgctatattgcctgggctggtgtcgaactcatagaacaaaggatcctccctcctgggcctgggcgtgggctcgcaaaacgctgggattcccggattacaggcgggcgcaccacaccaggagcaaacacttccggttttaaaaattcagtttgtgattggctgtcattcagtattatgctaattaagcatgcccggttttaaacctcttaaaacaacttttaaaattacctttccacctaaaacgttaaaatttgtcaagtgataatattcgacaagctgttattgccaaactattttcctatttgtttcctaatggcatcggaactagcgaaagtttctcgccatcagttaaaagtttgcggcagatgtagacctagcagaggtgtgcgaggaggccgtt

SEQ ID NO: 74295 - DNA, 919 bp, Homo sapiens
gggatctcggactccctggaccctccctccagcccagcctcgctagctccgcctgcggtacgtgctcccgcctccgactcaaaatgcctgtctggggaggtggaaacaagtgtggggcctgtgggaggaccgtgtaccacgcagaagaggtgcagtgtgatggcaggagcttccaccgctgctgctttctctgcatggtttgcaggaaaaatttagatagcacaacagtggcaattcacgatgaagagatctactgcaaatcctgctacggaaagaagtatgggccaaaaggctacggttatggccagggcgctggcacgcttaacatggaccgtggcgagaggctgggcatcaaaccagagagtgttcagcctcacaggcctacaacaaatccaaacacttctaaatttgctcagaaatatggaggtgctgagaagtgttccagatgtggggattctgtatatgctgccgagaagataattggagctggaaagccctggcacaaaaactgtttccgatgtgcaaagtgtgggaagagtcttgaatcaacaactctgactgaaaaagaaggtgaaatctattgtaaaggatgctatgcaaagaactttgggcccaagggatttggctatggccaaggagcaggggctcttgttcatgcccagtaagatgtaaaccctgaactaaacatcacacactgagaatctcttcataatctaggcacagataatctttaacactaaactactgtgaaattctaccagcattaagtactgtatatcgccctgtacttggataggctggctaactcgtaggaagagagcactgtatggtatccttttgctttattcaccagcattttgggggaacatttcttttacattttaaataaaacttcagcttgaaaaaaaaatatatgtaa

SEQ ID NO: 74296 - DNA, 558 bp, Homo sapiens
catgcttgcaactcagcaggaccacgctgaacactatagggccagaatgtgtggacttgtctttgcagctttaagatatttagtacatgacacatttaacatcttaaataagttgagctcttttacacagcagtttaatttatgggggtttgttgagtgggtcttaagcagtgctagcaaagcttaatggacttgcactaactatccttcctccctttcctttgtaggatgctatgcaaagaactttgggcccaagggatttggctatggccaaggagcaggggctcttgttcatgcccagtaagatgtaaaccctgaactaaacatcacacactgagaatctcttcataatctaggcacagataatctttaacactaaactactgtgaaattctaccagcattaagtactgtatatcgccctgtacttggataggctggctaactcgtaggaagagagcactgtatggtatccttttgctttattcaccagcattttgggggaacatttcttttacattttaaataaaacttcagcttgaaaaaaaaatatatgtaa

SEQ ID NO: 74297 - DNA, 663 bp, Homo sapiens
aagcggcggcgaaggaggggaagaagagccgcgaccgagagaggccgccgagcgtccccgccctcagagagcagcctcccgagacagagcctcagcctgcctggaagatgccgagatcgtgctgcagccgctcgggggccctgttgctggccttgctgcttcaggcctccatggaagtgcgtggctggtgcctggagagcagccagtgtcaggacctcaccacggaaagcaacctgctggagtgcatccgggcctgcaagcccgacctctcggccgagactcccatgttcccgggaaatggcgacgagcagcctctgaccgagaacccccggaagtacgtcatgggccacttccgctgggaccgattcggccgccgcaacagcagcagcagcggcagcagcggcgcagggcagaagcgcgaggacgtctcagcgggcgaagactgcggcccgctgcctgagggcggccccgagccccgcagcgatggtgccaagccgggcccgcgcgagggcaagcgctcctactccatggagcacttccgctggggcaagccggtgggcaagaagcggcgcccacgaagaggtcccctcgcccccaggccggttttaccccacgcttccccccgggtataggctttattccgtctccccctcgcgacgtatt

SEQ ID NO: 74298 - DNA, 427 bp, Homo sapiens
  misc_feature (385)..(385): n is a, c, g, or t
aagcggcggcgaaggaggggaagaagagccgcgaccgagagaggccgccgagcgtccccgccctcagagagcagcctcccgagacaggcacttgctggattctccaaaagtatctgcagtggctgttccaccaggagagcctcagcctgcctggaagatgccgagatcgtgctgcagccgctcgggggccctgttgctggccttgctgcttcaggcctccatggaagtgcgtggctggtgcctggagagcagccagtgtcaggacctcaccacggaaagcaacctgctggagtgcatccgggcctgcaagcccgacctctcggccgagactcccatgttcccgggaaatggcgacgagcagcctctgaccgagaacccccggagngcccttcgtcctgggaaaccggtgaggccggaaaggcggtcc

SEQ ID NO: 74299 - DNA, 1092 bp, Homo sapiens
aagcggcggcgaaggaggggaagaagagccgcgaccgagagaggccgccgagcgtccccgccctcagagagcagcctcccgagacagagcctcagcctgcctggaagatgccgagatcgtgctgcagccgctcgggggccctgttgctggccttgctgcttcaggcctccatggaagtgcgtggctggtgcctggagagcagccagtgtcaggacctcaccacggaaagcaacctgctggagtgcatccgggcctgcaagcccgacctctcggccgagactcccatgttcccgggaaatggcgacgagcagcctctgaccgagaacccccggaagtacgtcatgggccacttccgctgggaccgattcggccgccgcaacagcagcagcagcggcagcagcggcgcagggcagaagcgcgaggacgtctcagcgggcgaagactgcggcccgctgcctgagggcggccccgagccccgcagcgatggtgccaagccgggcccgcgcgagggcaagcgctcctactccatggagcacttccgctggggcaagccggtgggcaagaagcggcgcccagtgaaggtgtaccctaacggcgccgaggacgagtcggccgaggccttccccctggagttcaagagggagctgactggccagcgactccgggagggagatggccccgacggccctgccgatgacggcgcaggggcccaggccgacctggagcacagcctgctggtggcggccgagaagaaggacgagggcccctacaggatggagcacttccgctggggcagcccgcccaaggacaagcgctacggcggtttcatgacctccgagaagagccagacgcccctggtgacgctgttcaaaaacgccatcatcaagaacgcctacaagaagggcgagtgagggcacagcggggccccagggctaccctcccccaggaggtcgaccccaaagccccttgctctcccctgccctgctgccgcctcccagcctggggggtcgtggcagataatcagcctcttaaagctgcctgtagttaggaaataaaacctttcaaatttcaaaaaaaaaaaaaagatccgtc

SEQ ID NO: 74300 - DNA, 1071 bp, Homo sapiens
aagcggcggcgaaggaggggaagaagagccgcgaccgagagaggccgccgagcgtccccgccctcagagagcagcctcccgagacagagcctcagcctgcctggaagatgccgagatcgtgctgcagccgctcgggggccctgttgctggccttgctgcttcaggcctccatggaagtgcgtggctggtgcctggagagcagccagtgtcaggacctcaccacggaaagcaacctgctggagtgcatccgggcctgcaagcccgacctctcggccgagactcccatgttcccgggaaatggcgacgagcagcctctgaccgagaacccccggaagtacgtcatgggccacttccgctgggaccgattcggccgccgcaacagcagcagcagcggcagcagcggcgcagggcagaagcgcgaggacgtctcagcgggcgaagactgcggcccgctgcctgagggcggccccgagccccgcagcgatggtgccaagccgggcccgcgcgagggcaagcgctcctactccatggagcacttccgctggggcaagccggtgggcaagaagcggcgcccagtgaaggtgtaccctaacggcgccgaggacgagtcggccgaggccttccccctggagttcaagagggagctgactggccagcgactccgggagggagatggccccgacggccctgccgatgacggcgcaggggcccaggccgacctggagcacagcctgctggtggcggccgagaagaaggacgagggcccctacaggatggagcacttccgctggggcagcccgcccaaggacaagcgctacggcggtttcatgacctccgagaagagccagacgcccctggtgacgctgttcaaaaacgccatcatcaagaacgcctacaagaagggcgagtgagggcacagcggggccccagggctaccctcccccaggaggtcgaccccaaagccccttgctctcccctgccctgctgccgcctcccagcctggggggtcgtggcagataatcagcctcttaaagctgcctgtagttaggaaataaaacctttcaaatttca

SEQ ID NO: 74301 - DNA, 1121 bp, Homo sapiens
aagcggcggcgaaggaggggaagaagagccgcgaccgagagaggccgccgagcgtccccgccctcagagagcagcctcccgagacaggcacttgctggattctccaaaagtatctgcagtggctgttccaccaggagagcctcagcctgcctggaagatgccgagatcgtgctgcagccgctcgggggccctgttgctggccttgctgcttcaggcctccatggaagtgcgtggctggtgcctggagagcagccagtgtcaggacctcaccacggaaagcaacctgctggagtgcatccgggcctgcaagcccgacctctcggccgagactcccatgttcccgggaaatggcgacgagcagcctctgaccgagaacccccggaagtacgtcatgggccacttccgctgggaccgattcggccgccgcaacagcagcagcagcggcagcagcggcgcagggcagaagcgcgaggacgtctcagcgggcgaagactgcggcccgctgcctgagggcggccccgagccccgcagcgatggtgccaagccgggcccgcgcgagggcaagcgctcctactccatggagcacttccgctggggcaagccggtgggcaagaagcggcgcccagtgaaggtgtaccctaacggcgccgaggacgagtcggccgaggccttccccctggagttcaagagggagctgactggccagcgactccgggagggagatggccccgacggccctgccgatgacggcgcaggggcccaggccgacctggagcacagcctgctggtggcggccgagaagaaggacgagggcccctacaggatggagcacttccgctggggcagcccgcccaaggacaagcgctacggcggtttcatgacctccgagaagagccagacgcccctggtgacgctgttcaaaaacgccatcatcaagaacgcctacaagaagggcgagtgagggcacagcggggccccagggctaccctcccccaggaggtcgaccccaaagccccttgctctcccctgccctgctgccgcctcccagcctggggggtcgtggcagataatcagcctcttaaagctgcctgtagttaggaaataaaacctttcaaatttca

SEQ ID NO: 74302 - DNA, 1372 bp, Homo sapiens
aagcggcggcgaaggaggggaagaagagccgcgaccgagagaggccgccgagcgtccccgccctcagagagcagcctcccgagacagagcctcagcctgcctggaagatgccgagatcgtgctgcagccgctcgggggccctgttgctggccttgctgcttcaggcctccatggaagtgcgtggctggtgcctggagagcagccagtgtcaggacctcaccacggaaagcaacctgctggagtgcatccgggcctgcaagcccgacctctcggccgagactcccatgttcccgggaaatggcgacgagcagcctctgaccgagaacccccggaagtacgtcatgggccacttccgctgggaccgattcggccgccgcaacagcagcagcagcggcagcagcggcgcagggcagaagcgcgaggacgtctcagcgggcgaagactgcggcccgctgcctgagggcggccccgagccccgcagcgatggtgccaagccgggcccgcgcgagggcaagcgctcctactccatggagcacttccgctggggcaagccggtgggcaagaagcggcgcccagtgaaggtgtaccctaacggcgccgaggacgagtcggccgaggccttccccctggagttcaagagggagctgactggccagcgactccgggagggagatggccccgacggccctgccgatgacggcgcaggggcccaggccgacctggagcacagcctgctggtggcggccgagaagaaggacgagggcccctacaggatggagcacttccgctggggcagcccgcccaaggacaagcgctacggcggtttcatgacctccgagaagagccagacgcccctggtgacgctgttcaaaaacgccatcatcaagaacgcctacaagaagggcgagtgagggcacagcggggccccagggctaccctcccccaggaggtcgaccccaaagccccttgctctcccctgccctgctgccgcctcccagcctggggggtcgtggcagataatcagcctcttaaagctgcctgtagttaggaaataaaacctttcaaatttcacatccacctctgactttgaatgtaaactgtgtgaataaagtaaaaatacgtagccgtcaaataacagcaaacatgataaaaatacaataagatgatattgaaaccttaaaactaggcatatgtaaatattaaaccataagatggcaggtgaagtcctgtaaacactaaactgtggggggggcccgtaacccacttagccctttccgggagtctttttcccccctataggggaccggtgttttaaagaggttttctgggaaaacccgggggttatccaagttaagacctttacatgcataat

SEQ ID NO: 74303 - DNA, 1922 bp, Homo sapiens
cgcacctcggccccgctcccgaggccctacgggcgtggcctctgtcccgggtcccgccccccagcactccggaacagcgcgctcgcagcgggaggtcgcgaagcctgggactgtgtctgtcgcccatggccgccgcgctgctcgcccgggcctcgggccctgcccgcagagctctctgtcctagggcctggcggcagttacacaccatctaccagtctgtggaactgcccgagacacaccagatgttgctccagacatgccgggactttgccgagaaggagttgtttcccattgcagcccaggtggataaggaacatctcttcccagcggctcaggtgaagaagatgggcgggcttgggcttctggccatggacgtgcccgaggagcttggcggtgctggcctcgattacctggcctacgccatcgccatggaggagatcagccgtggctgcgcctccaccggagtcatcatgagtgtcaacaactctctctacctggggcccatcttgaagtttggctccaaggagcagaagcaggcgtgggtcacgcctttcaccagtggtgacaaaattggctgctttgccctcagcgaaccagggaacggcagtgatgcaggagctgcgtccaccaccgcccgggccgagggcgactcatgggttctgaatggaaccaaagcctggatcaccaatgcctgggaggcttcggctgccgtggtctttgccagcacggacagagccctgcaaaacaagggcatcagtgccttcctggtccccatgccaacgcctgggctcacgttggggaagaaagaagacaagctgggcatccggggctcatccacggccaacctcatctttgaggactgtcgcatccccaaggacagcatcctgggggagccagggatgggcttcaagatagccatgcaaaccctggacatgggccgcatcggcatcgcctcccaggccctgggcattgcccagaccgccctcgattgtgctgtgaactacgctgagaatcgcatggccttcggggcgcccctcaccaagctccaggtcatccagttcaagttggcagacatggccctggccctggagagtgcccggctgctgacctggcgcgctgccatgctgaaggataacaagaagcctttcatcaaggaggcagccatggccaagctggccgcctcggaggccgcgaccgccatcagccaccaggccatccagatcctgggcggcatgggctacgtgacagagatgccggcagagcggcactaccgcgacgcccgcatcactgagatctacgagggcaccagcgaaatccagcggctggtgatcgccgggcatctgctcaggagctaccggagctgagcccgcggcggactgccccaggactgcgggaaggcgcgggagccaggggcctccaccccaaccccggctcagagactgggcggcccggcgggggctccctggggaccccagatgggctcagtgctgccacccagatcagatcacatgggaatgaggccctccgaccattggcagctccgcctctgggcctttccgcctcctcaccactgtgcctcaagttcctcatctaagtggccctggctcctgggggcggggttgtgggggggctgagcgacactcagggacacctcagttgtcctcccgcgggccctggtgccctggcatgaaggcccagtgcgacaggcccttggtggggtctgtcttttccttgaggtcagaggtcaggagcagggctggggtcaggatgacgaggcctggggtcctggtgttgggcaggtggtggggctgggccatggagctggcccagaggcccctcagccctttgtaaagtctgatgaaggcaggggtggtgattcatgctgtgtgactgactgtgggtaataaacacacctgtccccc

SEQ ID NO: 74304 - DNA, 859 bp, Homo sapiens
  misc_feature (680)..(680): n is a, c, g, or t
cgcacctcggccccgctcccgaggccctacgggcgtggcctctgtcccgggtcccgccccccagcactccggaacagcgcgctcgcagcgggaggtcgcgaagcctgggactgtgtctgtcgcccatggccgccgcgctgctcgcccgggcctcgggccctgcccgcagagctctctgtcctagggcctggcggcagttacacaccatctaccagtctgtggaactgcccgagacacaccagatgttgctccagacatgccgggactttgccgagaaggagttgtttcccattgcagcccaggtggataaggaacatctcttcccagcggctcaggtgaagaagatgggcgggcttgggcttctggccatggacgtgcccgaggagcttggcggtgctggcctcgattacctggcctacgccatcgccatggaggagatcagccgtggctgcgcctccaccggagtcatcatgagtgtcaacaacgtgagccccctcccaggcccctgggacacacgggtggagggaggctccgtgagcgggcaggctctggcctcggctcccagccctgatctctctggagacgtcacaggccttggtcctactgggtaggccctggacagaacaggccctgaggtgcagcccgcaggtgggcaggatgcgcctgggcctggggcctcngaccgctccccgctgtcctcctagtctctctacctggggcccatcttgaagtttggctccaaggagcagaagcaggcgtgggtcacgcctttcaccagtggtgacaaaattggctgctttgccctcagcgaaccaggtacctgccctgtcccctcacctgtccttagggtgacaggccc

SEQ ID NO: 74305 - DNA, 1059 bp, Homo sapiens
aataacttgatagagagaaaagaattttgaaatacattccaaagtatttaagccccccaaattaaaatgaattaagacatatgcaaatagatcatgttcccaatagtttctcctgcacacacacacacacacacacacacacacgcacacactagcagcaactagtaaagccttttgcaacttgcggtgtttcccaatcatctaaatataagaagctatgagcagctccaggctgccttatctctctcacagatatctgcctcctcttggtcctgggattaaatcttctctagatcactatctcacccttcagctattcagttccccattgacaatgtaaatgtcactttgaaataactgtccctgtgacttactttgaggatgcttgaaaaagtagtgcttttgcagaagttgacgttgggttatattatttcacataaaacagaatgtggtcagtgggcaaattctgcttcttaagggtgttctagttccttttaagaaagattttatgccaagagaaaataaaaagtaactgaccttaccttgggccacccctccttttttcatgattgtaacatccatattatgtcaggaggctaacaggtcataggtagtggtgttttttttaactaaaaattagtgtcctccactgttgtacattttggccaaatgtttgttccacactggtgtggagtggagatttctgattctcagaaggccttgcctaactgttcaccatcttctatcagctctcacaaccctctcttaataacaaaccttggccgggcatggtggctcatgcctgtaatcccagcactttgggaggccaaggcgggtagatcacctgaggtcaggagttcgagaccagcctgaccaacatggtgaaaccccgtctctactaaaaatacaaaattagctgggtgtggtggtgcatgcctgtaatcccagctactctggaggctgaggcaggagaatcacttgaacccaggaggtggaggttgcagtgagccgagattgcacactctggcctgggcaacaagagcaaaactcgatctcagg

SEQ ID NO: 74306 - DNA, 624 bp, Homo sapiens
ttgtcatcacagattcttataatgctatcagttttaaactataaacatggaggcagcacccatgggagtaagatattgaacgtttacagcatgtgtacataagttacctcaaaggataattagatgattataatgacactttctttgagatagctaattttaaaaatctattgctcccaagtctaattatttgagtaatgataacatattagcaatcatgaaacttcagtcacagccaaccccattgaagaaaaaaaagtaaatcatagcattttctataaagacccaaaggattgcaccagaccaatccttgcattttctgctgtgtattctatgcccagcctcccatccgtgtgtactctaaactacctacacatgtatcattcatgtgatttcactctatttgttttcatttgttttataactcttcctttggtaccagggagataattttctagttcttctccatcctttgtgaacctctgaaagaaggcttttataattagacttcatagctttaacaaacatttcataacctgccagtaaaaatgtcagttctctgggccagggcataattaaatgagtaagtatcagtgtggtaattcagccacaaaataaaataat

SEQ ID NO: 74307 - DNA, 464 bp, Homo sapiens
ctttccgaggaacggtggtggggttacccccacagcttgtaacccctggaagcgcggttgaaccccttgttcgcccgcgcgccttgcgttggtacccgggaacatattagcaatcatgaaacttgagtcacagccaaccctattcaatccttgcattttctgctgtgtattctatgcccagcctcccatccgtgtgtactctaaactacctacacatgtatcattcatgtgatttcactctatttgttttcatttgttttataactcttcctttggtaccagggagataattttctagttcttctccatcctttgtgaacctctgaaagaaggcttttataattagacttcatagctttaacaaacatttcataacctgccagtaaaaatgtcagttctctgggccagggcataattaaatgagtaagtatcagtgtggtaattcagccacaaaataaaataat

SEQ ID NO: 74308 - DNA, 385 bp, Homo sapiens
cagtacccagttcttaagtagtcaatgtgaagtcaacacaaagagaacgacctctttagaaaatcgaaaggggacagaagtgctgtttttcttttctgttgtctttgtttattattagcattattatttttgcaaagtgccgttatgtcaaaggtatggtgtacagtttctcatcctggaataggacaaatttctgggcatcaacttcctcttctctaaagtggggatgataatgtcacacacctcactgggttttgacgattaaagatgtggagtttttagaatagtgtctgatactcagtaagagctccactattagctatcattgttaatattggaagattacaaagactatatcaattacaaagacttttacaatataagt

SEQ ID NO: 74309 - DNA, 515 bp, Homo sapiens
cctgtctgtctccgtttgcaatcccagccgctttgtatggagagcttttacgcagcacctgaaaattcaatttgaacacctgtgtccccttcttttcaatctgggaggctgaaatttgacagacacatcatggcaaagttgtgcagcagcgatacaagtagatgctgaagaaaagggaggaatctgagcgcaggataaaatgctcaagaaaatcccattggtggaatgtttgtgagagaaaaaaaaggtggcagaaagactggtattatagtagtccctgcttatcttcgggggatattctccagaaaccccatcccgccgccagtggatgcctgagaccttggatagtaccgaaccagattgccatctattggaacatgtttctcttccatccacagatgtaatgccttttccatcttaactcagcactcatcatgcactgcggccataacttttgcagtctgaggcacaacagcaaaactagcacaaatttatttttcctacttgacaatttc

SEQ ID NO: 74310 - DNA, 366 bp, Homo sapiens
tggcatggttgcatgtgcctgtaatctcagctacttggaggctgaggcaggagaattgcttgaacctgggaggtggagtttgcagtgagccaagatcgcaccactgcactctagcctgggtgaccgagcaagattcattttcaaaataaataaataaataaatgagaaaaaaatatagatatagtaaagggaacaattacattctacaatattttagcagaagtaaatatggtttaattcaatggaaacagctctgctctatagaaaattcacaaatattaaaaataaacacactctacattaaacctctgagcactagaagcttacctacttattcataggctcacatactgtaagggggtaaat

SEQ ID NO: 74311 - DNA, 383 bp, Homo sapiens
agccttgtccatgacggactccttaaaccctgtatgtccccttataacactgtaaggaagccagacgggtcatactggctagtgcaagatctccgggctattaatcaaatagttcagaccacccacactgttgttcccaatccttacaccaatgtcagtagaatccctcacaaccaccagcggttcacggtggtagatttaaaagatgccttttgcgcttgccttttagcagaggacagccaggacatgtttgcctgtgagtgggaggaccctcactccggtcaaaaacagcagtaccaatggacagtcttgccccaagggtttacaaagtccccaaatctatttggtcaaattttagaacaagtcttggaaacttctccctg

SEQ ID NO: 74312 - DNA, 433 bp, Homo sapiens
gattagcaatactgccttgtacagatgtgacattactctttgaaaatcttcacaaaaccagagagcttcaagtcagaagtccagaccaaagaacttgagtctactgataaacaaaatattactcttgtaacaatcactgtttgacacagattttttggctttctatcctagtaaaacagcttcaaaaaattattatgagatttttttgaaattggtgagattctactagacaaaaccttactaaagaaataactaatttctcacagggaaaaaagatagcatcttgtcaatgctatataaatggcttaaaatcacaatgtaggctgggtgcagtggttcacacctgtaagcccagcactttgagaggccacagcgagcagatcacttgaggtcagaagttcaagactaacgtgatataaaaccccatctctac

SEQ ID NO: 74313 - DNA, 593 bp, Homo sapiens
tgagacagagtcttgctctgtcgcccaggctggagtgcagtggcgtgatctcggctcactgcaagccctacctcccggattcatgccattctcctgcctcagcctcccaagtagctaggactacaggtgcccgccaccacgcgcagctaatttttttgtattttttttagtagagatgggtttcaccgtgttagccaggatggtgtcgatctcctgacctcgtgatctgcccacctcagcctcccaaagtgctgggattacaggtgtgagccactgcgcccagccgagcatgactatttttaaagttcatggtgcttctagcccaactgggaggactacatcgagataagacattgttaaccgtctttgccaagaacgtttgaaagcaaaaccatagggttggagggttcctcttttgtaagctgtaggagtcccagggggatgtatgggagacacttagtgacttttaaattgattctgagctgtgatcactggtgttaagaaattatgtcctcttcttgaggggtgtacaaaatggggagtttaataataatcctctgaaacgtgaaatgaattacttagtgtctactgca

SEQ ID NO: 74314 - DNA, 375 bp, Homo sapiens
ctcccatatctctggttcaaccattttaattttcttcttttttctcatgattttttcccatcactgtagatgttctagtacatctacaaaaagtaataatgcaattttacccttcttatgtatattgatataatccagtaatcaatttatttgataactatttatagggtcccttgcaggttttattgattctacaggtaactaataatataaaagagaaataaacatgttttgacctaattgaggtgctaaatgtcattttcttatacaattgtcactaatttttcttgctttgatttctttttcatttattatacaaatctttctttgcatttttatcattggtatctattatttgatttgtttcttctgtgt

SEQ ID NO: 74315 - DNA, 280 bp, Homo sapiens
cccagttccaatttctgggatctttgggaattgatcctgaagtgctctgctgctctgaacttgagcacaggtatttttaaacctctgtggtgtctgactcctttcctgagttatttaagaactggggtgggatcccacgtccttctcccagaggtgactcgcccagttcagttctcttaaattgctggacttggagtaccagtccaggcaaggcagactctctgtaagcccactgccatctgaaacccatatgagggatgggggatgagccagatctgag

SEQ ID NO: 74316 - DNA, 958 bp, Homo sapiens
caatcctaggtatttaagtggacttgctgggtagacacagtttgcctaaataaaatggtacttgggttgattataacacttcagggatttcaaaacactttacaaacactgccattaatcctagaatatcatggtatggggaaataaagaagaagtaaagttaaggaattttcaaagacaaggatgtattcagaatgtactgatagaacagtaataactaatatgtatagtgttcttactaagtacctgaaatatttttgtaaaacttcttatatcttatctcatctgaaatgggacccaggttttcttccaaccaatataattctgtgccttatcagtaatatgtttacattctcattcaaatggccatatagcaggctttgcaattggcctcttaaacttggtgttttcccccattaccccttagcagtaattactgtcactagttttgcaaactcctactccccaaaccaagctactcaagtttatttcagtgatgaaggcatatgagcatagtcaaaacaaggagatcttggagtcaaattagaaatgagaaagaaacatcagtccagttaatagtcaagaatggacatttgaaccagacatcactgagccagagactggagatgcaaagatgagtcccatgtgactcctgccttccaggatctcaccatttagcagaggatccagacatacacacagctaactgcaatataaagtgatggggcaagagtacaggtgcagactcacttttaatgcttatctttcaaagttgtgtttctgacatgaagtgtgatttttcttttaagcatgaagttaaagagtgaaggggttatgtaaagtagagggatctcctgctcttgttagggtatttttaaggttttttctagatagtgtgtctttttggtatggtttcttggttagtattaatactttcccagactccttgagaaaaata

SEQ ID NO: 74317 - DNA, 335 bp, Homo sapiens
tttttgtatttttagtagagacggggtttcactgtgttagccaggatggtttcaatctcctgacctcgcgatctgcccgcctcagcctcccaaagtgccaggattacaggcgtgagccattgcacccaacccatttgccaattttttataaagcacttactgtgttccaggtgttattctagaagcttggaatacatttgtggacaaaataggcaaagacttctacacttgtgggccctttatgatgtagcctagagctgtgcagtgtacaacctgtgcagctgtacgtgatctacatggtggccctggagaagccccagctctggaatatgtct

SEQ ID NO: 74318 - DNA, 730 bp, Homo sapiens
gtgaatgacacatgatttacagtattgctagggcctgtaggctttgctggagcatgaggggttaaagaactaatgtgagtcaaggacagtatctgttgcgcacctacttgacacaaactactttactaggccatttcagatacacagacaaatgtcgtaaagtaatgattgagtccacaccttccttctgatatttatttgtaaggaattttatttgcatctgggagagttccattagtctctctttgtaacagacaaatctaaaacctactcccacagtttcttgtaaagaccagcacatctttgaattgtcttggttttttaataagatttccagcttttataccagatcaaggcaaactggatgtaaatatagcgttatccttgctgaacactgttgcagaccaacaggttcacagtttcctacatcctacccatttataactgaaacagtatgtcagttgatttttaaaagtgcaggtggttttctgatcgttcactatgatttcctttacagcaagggcatgagagcaccatttccccacttttatatctagtccgttcttgaaaatgtgtaacaaatgactatgcatatatatatatatagacatacatacacacatacacatatatataaagttatatatatacacacacataaacatatatattcacagaagttgtgttctcagaataatagtaaaataaacaatgatgcttcatgcaggca

SEQ ID NO: 74319 - DNA, 391 bp, Homo sapiens
ttaaaactgagtgggtcacttggtaaacgttttggaggaaacaagaggaattgggtgagggtaaggaagaaaaaaccacactaatcatctggaactcagaaattcttttgtttgtttgagacaggatctcactctgttgcccaggctggactacagtggcacgatctcggctcactgcagcctccacctctgcggctcaagcaattcttctgcgtcagcctccctagtagccaggattacagacatgcaccaccatgccctgctaatttagcatttttttttagtggggtttcgccatgttggccaggctggtctccaactcctgacctcaggtgatctacccatctcggcctcccaaagtgctgggattatacttgcgagccaccatgcc

SEQ ID NO: 74320 - DNA, 993 bp, Homo sapiens
atgtgctaaggtgtagtgtttggccaagtaggggcctgaggattagggagacacagatggagagaaacaaagaccttagaagctgaaggggaagctgggagggatgcccaggagagagagtcctcaggaaaaggccccagaggacctgaaggagaagaaggagaaggtggaggagaaggcaagccggaaagagcgaaagaaagaagtggtggaggctccagtcccattggtggtgatggtgggcaaggcatgcagccagcctgaggctactccctctcctggtccccacaggaggaggagaacggggctgaggaggaagaagaagaaactgccgaggatggagaggaggaagatgaaggggaagaagaagatgaggaagaagaagaagaggatgatgaagggcccgcgctgaagagagctgccgaagaggaggatgaagcggatcccaaacggcagaagacagaaaatggggcatcggcgtgagcccctgccaacaggctggggttgggaggcctctctgggcctggaggtgggggtgggggcagccaagtccagccactcttcacctggctccctgctctgggccctgcaccagagctgccaccctcttctttctccccagccttctcatttccgcctctccagacactgcgccctccaccctcactctgccattgttccacctcctgacctgctccatctgagctctccagctggcccccaattgctcctctctctctttgctctctttctccctcccctaccagcctcattcttcctccggtagcctctcccacctaacctctgcatcccccagcctcatgtcctgccccatccctatcctgcctgatccctggatctccctcagatcccctcttctcagacagcgccaggccggggtggggccggggttggggccgagccccacagctgcccccctcccctccctttttgtataatttaataaagaaatggtcgcgcttctgtttttaa

SEQ ID NO: 74321 - DNA, 625 bp, Homo sapiens
ggacgcgtgggtcgacccacgcgtcggtgaagggcccgcgctgaagagagctgccgaagaggaggatgaagcggatcccaaacggcagaagacagaaaatggggcatcggcgtgagcccctgccaacaggctggggttgggaggcctctctgggcctggaggtgggggtgggggcagccaagtccagccactcttcacctggctccctgctctgggccctgcaccagagctgccaccctcttctttctccccagccttctcatttccgcctctccagacactgcgccctccaccctcactctgccattgttccacctcctgacctgctccatctgagctctccagctggcccccaattgctcctctctctctttgctctctttctccctcccctaccagcctcattcttcctccggtagcctctcccacctaacctctgcatcccccagcctcatgtcctgccccatccctatcctgcctgatccctggatctccctcagatcccctcttctcagacagcgccaggccggggtggggccggggttggggccgagccccacagctgcccccctcccctccctttttgtataatttaataaagaaatggtcgcgcttctgtttttaa

SEQ ID NO: 74322 - DNA, 1995 bp, Homo sapiens
  misc_feature (70)..(70): n is a, c, g, or t
acaggggtgaaggcccagagaccagcagaacggcatcccagccacgacggccactttgctctgtctgctntccgccacggccctgctctgttccctgggacacccccgcccccacctcctcaggctgcctgatctgcccagctttccagctttcctctggattccggcctctggtcatccctccccaccctctctccaaggccctctcctggtctcccttcttctagaaccccttcctccacctccctctctgcagaacttctcctttaccccccaccccccaccactgccccctttccttttctgacctccttttggagggctcagcgctgcccagaccataggagagatgtgggaggctcagttcctgggcttgctgtttctgcagccgctttgggtggctccagtgaagcctctccagccaggggctgaggtcccggtggtgtgggcccaggagggggctcctgcccagctcccctgcagccccacaatccccctccaggatctcagccttctgcgaagagcaggggtcacttggcagcatcagccagacagtggcccgcccgctgccgcccccggccatcccctggcccccggccctcacccggcggcgccctcctcctgggggcccaggccccgccgctacacggtgctgagcgtgggtcccggaggcctgcgcagcgggaggctgcccctgcagccccgcgtccagctggatgagcgcggccggcagcgcggggacttctcgctatggctgcgcccagcccggcgcgcggacgccggcgagtaccgcgccgcggtgcacctcagggaccgcgccctctcctgccgcctccgtctgcgcctgggccaggcctcgatgactgccagccccccaggatctctcagagcctccgactgggtcattttgaactgctccttcagccgccctgaccgcccagcctctgtgcattggttccggaaccggggccagggccgagtccctgtccgggagtccccccatcaccacttagcggaaagcttcctcttcctgccccaagtcagccccatggactctgggccctggggctgcatcctcacctacagagatggcttcaacgtctccatcatgtataacctcactgttctgggtctggagcccccaactcccttgacagtgtacgctggagcaggttccagggtggggctgccctgccgcctgcctgctggtgtggggacccggtctttcctcactgccaagtggactcctcctgggggaggccctgacctcctggtgactggagacaatggcgactttacccttcgactagaggatgtgagccaggcccaggctgggacctacacctgccatatccatctgcaggaacagcagctcaatgccactgtcacattggcaatcatcacagtgactcccaaatcctttgggtcacctggatccctggggaagctgctttgtgaggtgactccagtatctggacaagaacgctttgtgtggagctctctggacaccccatcccagaggagtttctcaggaccttggctggaggcacaggaggcccagctcctttcccagccttggcaatgccagctgtaccagggggagaggcttcttggagcagcagtgtacttcacagagctgtctagcccaggtgcccaacgctctgggagagccccaggtgccctcccagcaggccacctcctgctgtttctcacccttggtgtcctttctctgctccttttggtgactggagcctttggctttcacctttggagaagacagtggcgaccaagacgattttctgccttagagcaagggattcaccctccgcaggctcagagcaagatagaggagctggagcaagaaccggagccggagccggagccggaaccggagcccgagcccgagcccgagccggagcagctctgacctggagctgaggcagccagcagatctcagcagcccagtccaaataaactccctgtcagcagcaaaaa

SEQ ID NO: 74323 - DNA, 407 bp, Homo sapiens
tgggagcgattcgagttataattggttgtgaaggaggggtctaggtacagatgactgaggacggatgaagagaaatagaaggaccaggcgaataaaagtgaggacctgctccatctgagctctccagctggcccccaattgctcctctctctctttgctctctttctccctcccctaccagcctcattcttcctccggtagcctctcccacctaacctctgcatcccccagcctcatgtcctgccccatccctatcctgcctgatccctggatctccctcagatcccctcttctcagacagcgccaggccggggtggggccggggttggggccgagccccacagctgcccccctcccctccctttttgtataatttaataaagaaatggtcgcgcttctgtttttaa

SEQ ID NO: 74324 - DNA, 463 bp, Homo sapiens
cggaggtcgtgaatgcccggaggcgttgaatggcccggaggcgttgaatggcccggaggcgttgaatggcccgcgctgaagagagctgccgaagagggatgaagcggatcccaaacggcagaagacagaaaatggggcatcggcgtgagcccctgccaacaggctggggttgggaggcctctctgggcctggaggtgggggtgggggcagccaagtccagccactcttcacctggctccctgctctgggccctgcaccagagctgccaccctcttctttctccccagccttctcatttccgcctctccagacactgcgccctccaccctcactctgccattgttccacctcctgacctgctccatctgagctctccagctggcccccaattgctcctctctctctttcctcccctccctttttgtataatttaataaagaaatggtcgcgcttctgtttttaa

SEQ ID NO: 74325 - DNA, 421 bp, Homo sapiens
agagccccccttcttcataagcctctcactccagggatggcttgtgcctgggtaggctggaaggggggttgggagaaagccaggaccagatggggagggcaggggcgctgagaaaaaatagagggactcagtgtccctcctcatccgcttcccttcatccttctcctccttccgccctccgtctctctctccatctcttctcacagtggcgaccaagacgattttctgccttagagcaagggattcaccctccgcaggctcagagcaagatagaggagctggagcaagaaccggagccggagccggagccggaaccggagcccgagcccgagcccgagccggagcagctctgacctggagctgaggcagccagcagatctcagcagcccagtccaaataaactccctgtcagcagcaaaaa

SEQ ID NO: 74326 - DNA, 483 bp, Homo sapiens
ggcaaagtccgggctcaaaggagagcagagtcagggtgggtttgaagacctgaagcagggctgagggcgaccacgggggctctgccagagcttcctgcccttccccaatgacccatttctggctcctcagatgaggaagaagaagaagaggatgatgaagggcccgcgctgaagagagctgccgaagaggaggtttgggctgggttgctgggcctgaggggctgtcagggatgcagccgggctgggcgccctttggatttggacccagtggcgaccaagacgattttctgccttagagcaagggattcaccctccgcaggctcagagcaagatagaggagctggagcaagaaccggagccggagccggagccggaaccggagcccgagcccgagcccgagccggagcagctctgacctggagctgaggcagccagcagatctcagcagcccagtccaaataaactccctgtcagcagcaaaaa

SEQ ID NO: 74327 - DNA, 1361 bp, Homo sapiens
cccctcctggtctcgtcctccctcccgactccctagctctccctcccctcgctttcatcctcctatccccacctctccaacctcctctttcatccccctcccctctcctctcctccccgctcccgcctgccccacccctgggaagcccctcccgtcgggcagcgccgccttataagcgggttcccttcccgggggcggcagcggctggtcggcggcagctctgctggtgcgggggcggcgagcccgggatcgagctaccgcggccgagcgcgccggccaccgcctgcaccgcccttccgcccgccctccggacggccgcagccctgcgggtctccgctccagacccacccccgccccaccccgcgcgcctctgccgcctcttccagagacccagcttgccgagcggccgccgctgccgctgtcgccgccgccgccgccaccgcgccaggttccggccgcggccaccctccgccgtccagggcccctccgtctcggccccgggaccccggctccccgccagccccggccccggccccggcaccatgtcggagaaaagcgtggaggcagcggccgagttgagcgccaaggacctgaaggagaagaaggagaaggtggaggagaaggcaagccggaaagagcgaaagaaagaagtggtggaggaggaggagaacggggctgaggaggaagaagaagaaactgccgaggatggagaggaggaagatgaaggggaagaagaagatgaggaagaagaagaagaggatgatgaagggcccgcgctgaagagagctgccgaagaggaggatgaagcggatcccaaacggcagaagacagaaaatggggcatcggcgtgagcccctgccaacaggctggggttgggaggcctctctgggcctggaggtgggggtgggggcagccaagtccagccactcttcacctggctccctgctctgggccctgcaccagagctgccaccctcttctttctccccagccttctcatttccgcctctccagacactgcgccctccaccctcactctgccattgttccacctcctgacctgctccatctgagctctccagctggcccccaattgctcctctctctctttgctctctttctccctcccctaccagcctcattcttcctccggtagcctctcccacctaacctctgcatcccccagcctcatgtcctgccccatccctatcctgcctgatccctggatctccctcagatcccctcttctcagacagcgccaggccggggtggggccggggttggggccgagccccacagctgcccccctcccctccctttttgtataatttaataaagaaatggtcgcgcttctgtttttaa

SEQ ID NO: 74328 - DNA, 1190 bp, Homo sapiens
aattaggctaggtcgaggcctggtgtgaatcggctggtcggcggcagctctgctggtgcgggggcggcgagcccgggatcgagctaccgcggccgagcgcgccggccaccgcctgcaccgcccttccgcccgccctccggacggccgcagccctgcgggtctccgctccagacccacccccgccccaccccgcgcgcctctgccgcctcttccagagacccagcttgccgagcggccgccgctgccgctgtcgccgccgccgccgccaccgcgccaggttccggccgcggccaccctccgccgtccagggcccctccgtctcggccccgggaccccggctccccgccagccccggccccggccccggcaccatgtcggagaaaagcgtggaggcagcggccgagttgagcgccaaggacctgaaggagaagaaggagaaggtggaggagaaggcaagccggaaagagcgaaagaaagaagtggtggaggaggaggagaacggggctgaggaggaagaagaagaaactgccgaggatggagaggaggaagatgaaggggaagaagaagatgaggaagaagaagaagaggatgatgaagggcccgcgctgaagagagctgccgaagaggaggatgaagcggatcccaaacggcagaagacagaaaatggggcatcggcgtgagcccctgccaacaggctggggttgggaggcctctctgggcctggaggtgggggtgggggcagccaagtccagccactcttcacctggctccctgctctgggccctgcaccagagctgccaccctcttctttctccccagccttctcatttccgcctctccagacactgcgccctccaccctcactctgccattgttccacctcctgacctgctccatctgagctctccagctggcccccaattgctcctctctctctttgctctctttctccctcccctaccagcctcattcttcctccggtagcctctcccacctaacctctgcatcccccagcctcatgtcctgccccatccctatcctgcctgatccctggatctccctcagatcccctcttctcagacagcgccaggccggggtggggccggggttggggccgagccccacagctgcccccctcccctccctttttgtataatttaataaagaaatggtcgcgcttctgtttttaa

SEQ ID NO: 74329 - DNA, 1382 bp, Homo sapiens
cccctcctggtctcgtcctccctcccgactccctagctctccctcccctcgctttcatcctcctatccccacctctccaacctcctctttcatccccctcccctctcctctcctccccgctcccgcctgccccacccctgggaagcccctcccgtcgggcagcgccgccttataagcgggttcccttcccgggggcggcagcggctggtcggcggcagctctgctggtgcgggggcggcgagcccgggatcgagctaccgcggccgagcgcgccggccaccgcctgcaccgcccttccgcccgccctccggacggccgcagccctgcgggtctccgctccagacccacccccgccccaccccgcgcgcctctgccgcctcttccagagacccagcttgccgagcggccgccgctgccgctgtcgccgccgccgccgccaccgcgccaggttccggccgcggccaccctccgccgtccagggcccctccgtctcggccccgggaccccggctccccgccagccccggccccggccccggcaccatgtcggagaaaagcgtggaggcagcggccgagttgagcgccaaggacctgaaggagaagaaggagaaggtggaggagaaggcaagccggaaagagcgaaagaaagaagtggtggaggaggaggagaacggggctgaggaggaagaagaagaaactgccgaggatggagaggaggaagatgaaggggaagaagaagatgaggaagaagaagaagaggatgatgaagggcccgcgctgaagagagctgccgaagaggaggatgaagcggatcccaaacggcagaagacagaaaatggggcatcggcgtgagcccctgccaacaggctggggttgggaggcctctctgggcctggaggtgggggtgggggcagccaagtccagccactcttcacctggctccctgctctgggccctgcaccagagctgccaccctcttctttctccccagccttctcatttccgcctctccagacactgcgccctccaccctcactctgccattgttccacctcctgacctgctccatctgagctctccagctggcccccaattgctcctctctctctttgctctctttctccctcccctaccagcctcattcttcctccggtagcctctcccacctaacctctgcatcccccagcctcatgtcctgccccatccctatcctgcctgatccctggatctccctcagatcccctcttctcagacagcgccaggccggggtggggccggggttggggccgagccccacagctgcccccctcccctccctttttgtataatttaataaagaaatggtcgcgcttctgtttttaaaaaaaaaaacccacgcgtccg

SEQ ID NO: 74330 - DNA, 1607 bp, Homo sapiens
cccctcctggtctcgtcctccctcccgactccctagctctccctcccctcgctttcatcctcctatccccacctctccaacctcctctttcatccccctcccctctcctctcctccccgctcccgcctgccccacccctgggaagcccctcccgtcgggcagcgccgccttataagcgggttcccttcccgggggcggcagcggctggtcggcggcagctctgctggtgcgggggcggcgagcccgggatcgagctaccgcggccgagcgcgccggccaccgcctgcaccgcccttccgcccgccctccggacggccgcagccctgcgggtctccgctccagacccacccccgccccaccccgcgcgcctctgccgcctcttccagagacccagcttgccgagcggccgccgctgccgctgtcgccgccgccgccgccaccgcgccaggttccggccgcggccaccctccgccgtccagggcccctccgtctcggccccgggaccccggctccccgccagccccggccccggccccggcaccatgtcggagaaaagcgtggaggcagcggccgagttgagcgccaaggacctgaaggagaagaaggagaaggtggaggagaaggcaagccggaaagagcgaaagaaagaagtggtggaggaggaggagaacggggctgaggaggaagaagaagaaactgccgaggatggagaggaggaagatgaaggggaagaagaagatgaggaagaagaagaagaggatgatgaagggcccgcgctgaagagagctgccgaagaggaggatgaagcggatcccaaacggcagaagacagaaaatggggcatcggcgtgagcccctgccaacaggctggggttgggaggcctctctgggcctggaggtgggggtgggggcagccaagtccagccactcttcacctggctccctgctctgggccctgcaccagagctgccaccctcttctttctccccagccttctcatttccgcctctccagacactgcgccctccaccctcactctgccattgttccacctcctgacctgctccatctgagctctccagctggcccccaattgctcctctctctctttgctctctttctccctcccctaccagcctcattcttcctccggtagcctctcccacctaacctctgcatcccccagcctcatgtcctgccccatccctatcctgcctgatccctggatctccctcagatcccctcttctcagacagcgccaggccggggtggggccggggttggggccgagccccacagctgcccccctcccctccctttttgtataatttaataaagaaatggtcgcgcttctgtttttaaaaaacaaaaaaaaaaaccttccggggaccattattgccggggattgcagacacacaagacgggcaacatgcaacggtggccgatggtgggtccaatagagcgtgttaccctgtgtgacccagcgtttatgttggatacacagggggggaaaaaactgtggcggcggattaccgcaattaggtgacgccggatataacatctgggatgaggccgagtttaacccgtggttaataaccgcgtgggcaa

SEQ ID NO: 74331 - DNA, 2097 bp, Homo sapiens
cccctcctggtctcgtcctccctcccgactccctagctctccctcccctcgctttcatcctcctatccccacctctccaacctcctctttcatccccctcccctctcctctcctccccgctcccgcctgccccacccctgggaagcccctcccgtcgggcagcgccgccttataagcgggttcccttcccgggggcggcagcggctggtcggcggcagctctgctggtgcgggggcggcgagcccgggatcgagctaccgcggccgagcgcgccggccaccgcctgcaccgcccttccgcccgccctccggacggccgcagccctgcgggtctccgctccagacccacccccgccccaccccgcgcgcctctgccgcctcttccagagacccagcttgccgagcggccgccgctgccgctgtcgccgccgccgccgccaccgcgccaggttccggccgcggccaccctccgccgtccagggcccctccgtctcggccccgggaccccggctccccgccagccccggccccggccccggcaccatgtcggagaaaagcgtggaggcagcggccgagttgagcgccaaggacctgaaggagaagaaggagaaggtggaggagaaggcaagccggaaagagcgaaagaaagaagtggtggaggaggaggagaacggggctgaggaggaagaagaagaaactgccgaggatggagaggaggaagatgaaggggaagaagaagatgaggaagaagaagaagaggatgatgaagggcccgcgctgaagagagctgccgaagaggaggatgaagcggatcccaaacggcagaagacagaaaatggggcatcggcgtgagcccctgccaacaggctggggttgggaggcctctctgggcctggaggtgggggtgggggcagccaagtccagccactcttcacctggctccctgctctgggccctgcaccagagctgccaccctcttctttctccccagccttctcatttccgcctctccagacactgcgccctccaccctcactctgccattgttccacctcctgacctgctccatctgagctctccagctggcccccaattgctcctctctctctttgctctctttctccctcccctaccagcctcattcttcctccggtagcctctcccacctaacctctgcatcccccagcctcatgtcctgccccatccctatcctgcctgatccctggatctccctcagatcccctcttctcagacagcgccaggccggggtggggccggggttggggccgagccccacagctgcccccctcccctccctttttgtataatttaataaagaaatggtcgcgcttctgtttttaaaaaaaaaaaaaaaaaaaaaaaaaacaaaaaaaaaaaaaaaaaaaaaaaaaaaagggggcgcgcgcgcggcctaagaaagagtctactcctccgaggaggggcgcccagaacgtttcggtcgcgagcacctccgacggttattctggtgtgtaacaagcaggtgggcgtcccccataaaaaggggagccgcggtatatatatatataccgcagaagcgacgcagtgagcgcccggcgctggttaatcacaacgcggtcgctgagagctaggtgagagacaacacgtgtagcgtaacgttgtggaggcgatctctttgtgaggaggagagaagagagagcctcccttaatatctctcatgcgagggggggcggggagagagacaaatattatattgtgggtgggacgaacaacatctactactctctacaaagagagtagatatatataaagaaggcgtctctcatatgaggagggagcagatattactatatattaaaatactttttacgaagagggtggtgatatatatagtgtgtgtgggttatatacaaaacatattaacggcgctgtggtgatatatatgtgctgtgtgtggcggcgcgtgctgtgagaaaaaaaatgatgtgtgttgtgcgctatatacgtgtaaattaatatttgatattatttttatgtgatgataaacaatatatatttatatatacaccgacggcgggagagacactatttggtgatt

SEQ ID NO: 74332 - DNA, 1979 bp, Homo sapiens
cccctcctggtctcgtcctccctcccgactccctagctctccctcccctcgctttcatcctcctatccccacctctccaacctcctctttcatccccctcccctctcctctcctccccgctcccgcctgccccacccctgggaagcccctcccgtcgggcagcgccgccttataagcgggttcccttcccgggggcggcagcggctggtcggcggcagctctgctggtgcgggggcggcgagcccgggatcgagctaccgcggccgagcgcgccggccaccgcctgcaccgcccttccgcccgccctccggacggccgcagccctgcgggtctccgctccagacccacccccgccccaccccgcgcgcctctgccgcctcttccagagacccagcttgccgagcggccgccgctgccgctgtcgccgccgccgccgccaccgcgccaggttccggccgcggccaccctccgccgtccagggcccctccgtctcggccccgggaccccggctccccgccagccccggccccggccccggcaccatgtcggagaaaagcgtggaggcagcggccgagttgagcgccaaggacctgaaggagaagaaggagaaggtggaggagaaggcaagccggaaagagcgaaagaaagaagtggtggaggaggaggagaacggggctgaggaggaagaagaagaaactgccgaggatggagaggaggaagatgaaggggaagaagaagatgaggaagaagaagaagaggatgatgaagggcccgcgctgaagagagctgccgaagaggaggatgaagcggatcccaaacggcagaagacagaaaatggggcatcggcgtgagcccctgccaacaggctggggttgggaggcctctctgggcctggaggtgggggtgggggcagccaagtccagccactcttcacctggctccctgctctgggccctgcaccagagctgccaccctcttctttctccccagccttctcatttccgcctctccagacactgcgccctccaccctcactctgccattgttccacctcctgacctgctccatctgagctctccagctggcccccaattgctcctctctctctttgctctctttctccctcccctaccagcctcattcttcctccggtagcctctcccacctaacctctgcatcccccagcctcatgtcctgccccatccctatcctgcctgatccctggatctccctcagatcccctcttctcagacagcgccaggccggggtggggccggggttggggccgagccccacagctgcccccctcccctccctttttgtataatttaataaagaaatggtcgcgcttctgtttttaaaaaaaaaaaaaaaaaaaaaaaaaacaaaaaaaaaaaaaaaaaaaaaaaaaaaaaaaagaaaccaaaaaaaaaaaaaaaaaaaaaaaagaaaaaaaaaaaaaaaaaacaaagcaaccacaaaacacagacaaaaaacacataaccaaaaaacaacaccacaaaacccaggaccaacgacaggcggcgccgacacacacccatccacacgcgccacacccatcccaccacatgcgtaggagcccccgacgccgccgacttttccgtctacaactcaggcagccaggtgacccgtggcgtcctcctataatacagaagacgtcccacccgctgcaggtgatgacctcgcgccgcacccagtctcacaccatcatctactataagccaaagaacataacacactccctcccatttcactcctatcctctaccaagcattaattctcacacctaccctaacccaacctaatccacacagcacagagaccactaacacactaccacatcacgtcttcacctcccccacacacaaactcaacccaatccatatcccacacacttccctgccatcactcacaacaaaatagcaatacaaataaacacaaacataaattcttatatc

SEQ ID NO: 74333 - DNA, 1362 bp, Homo sapiens
cccctcctggtctcgtcctccctcccgactccctagctctccctcccctcgctttcatcctcctatccccacctctccaacctcctctttcatccccctcccctctcctctcctccccgctcccgcctgccccacccctgggaagcccctcccgtcgggcagcgccgccttataagcgggttcccttcccgggggcggcagcggctggtcggcggcagctctgctggtgcgggggcggcgagcccgggatcgagctaccgcggccgagcgcgccggccaccgcctgcaccgcccttccgcccgccctccggacggccgcagccctgcgggtctccgctccagacccacccccgccccaccccgcgcgcctctgccgcctcttccagagacccagcttgccgagcggccgccgctgccgctgtcgccgccgccgccgccaccgcgccaggttccggccgcggccaccctccgccgtccagggcccctccgtctcggccccgggaccccggctccccgccagccccggccccggccccggcaccatgtcggagaaaagcgtggaggcagcggccgagttgagcgccaaggacctgaaggagaagaaggagaaggtggaggagaaggcaagccggaaagagcgaaagaaagaagtggtggaggaggaggagaacggggctgaggaggaagaagaagaaactgccgaggatggagaggaggaagatgaaggggaagaagaagatgaggaagaagaagaagaggatgatgaagggcccgcgctgaagagagctgccgaagaggaggatgaagcggatcccaaacggcagaagacagaaaatggggcatcggcgtgagcccctgccaacaggctggggttgggaggcctctctgggcctggaggtgggggtgggggcagccaagtccagccactcttcacctggctccctgctctgggccctgcaccagagctgccaccctcttctttctccccagccttctcatttccgcctctccagacactgcgccctccaccctcactctgccattgttccacctcctgacctgctccatctgagctctccagctggcccccaattgctcctctctctctttgctctctttctccctcccctaccagcctcattcttcctccggtagcctctcccacctaacctctgcatcccccagcctcatgtcctgccccatccctatcctgcctgatccctggatctccctcagatcccctcttctcagacagcgccaggccggggtggggccggggttggggccgagccccacagctgccccaccaggcttcagtgcctgaccaggcttcagtgcctgaccaggcttcagtgcctgacc

SEQ ID NO: 74334 - DNA, 1438 bp, Homo sapiens
cccctcctggtctcgtcctccctcccgactccctagctctccctcccctcgctttcatcctcctatccccacctctccaacctcctctttcatccccctcccctctcctctcctccccgctcccgcctgccccacccctgggaagcccctcccgtcgggcagcgccgccttataagcgggttcccttcccgggggcggcagcggctggtcggcggcagctctgctggtgcgggggcggcgagcccgggatcgagctaccgcggccgagcgcgccggccaccgcctgcaccgcccttccgcccgccctccggacggccgcagccctgcgggtctccgctccagacccacccccgccccaccccgcgcgcctctgccgcctcttccagagacccagcttgccgagcggccgccgctgccgctgtcgccgccgccgccgccaccgcgccaggttccggccgcggccaccctccgccgtccagggcccctccgtctcggccccgggaccccggctccccgccagccccggccccggccccggcaccatgtcggagaaaagcgtggaggcagcggccgagttgagcgccaaggacctgaaggagaagaaggagaaggtggaggagaaggcaagccggaaagagcgaaagaaagaagtggtggaggctccagtcccattggtggtgatggtgggcaaggcatgcagccagcctgaggctactccctctcctggtccccacaggaggaggagaacggggctgaggaggaagaagaagaaactgccgaggatggagaggaggaagatgaaggggaagaagaagatgaggaagaagaagaagaggatgatgaagggcccgcgctgaagagagctgccgaagaggaggatgaagcggatcccaaacggcagaagacagaaaatggggcatcggcgtgagcccctgccaacaggctggggttgggaggcctctctgggcctggaggtgggggtgggggcagccaagtccagccactcttcacctggctccctgctctgggccctgcaccagagctgccaccctcttctttctccccagccttctcatttccgcctctccagacactgcgccctccaccctcactctgccattgttccacctcctgacctgctccatctgagctctccagctggcccccaattgctcctctctctctttgctctctttctccctcccctaccagcctcattcttcctccggtagcctctcccacctaacctctgcatcccccagcctcatgtcctgccccatccctatcctgcctgatccctggatctccctcagatcccctcttctcagacagcgccaggccggggtggggccggggttggggccgagccccacagctgcccccctcccctccctttttgtataatttaataaagaaatggtcgcgcttctgtttttaa

SEQ ID NO: 74335 - DNA, 1139 bp, Homo sapiens
cccctcctggtctcgtcctccctcccgactccctagctctccctcccctcgctttcatcctcctatccccacctctccaacctcctctttcatccccctcccctctcctctcctccccgctcccgcctgccccacccctgggaagcccctcccgtcgggcagcgccgccttataagcgggttcccttcccgggggcggcagcggctggtcggcggcagctctgctggtgcgggggcggcgagcccgggatcgagctaccgcggccgagcgcgccggccaccgcctgcaccgcccttccgcccgcccccggccccggcaccatgtcggagaaaagcgtggaggcagcggccgagttgagcgccaaggacctgaaggagaagaaggagaaggtggaggagaaggcaagccggaaagagcgaaagaaagaagtggtggaggaggaggagaacggggctgaggaggaagaagaagaaactgccgaggatggagaggaggaagatgaaggggaagaagaagatgaggaagaagaagaagaggatgatgaagggcccgcgctgaagagagctgccgaagaggaggatgaagcggatcccaaacggcagaagacagaaaatggggcatcggcgtgagcccctgccaacaggctggggttgggaggcctctctgggcctggaggtgggggtgggggcagccaagtccagccactcttcacctggctccctgctctgggccctgcaccagagctgccaccctcttctttctccccagccttctcatttccgcctctccagacactgcgccctccaccctcactctgccattgttccacctcctgacctgctccatctgagctctccagctggcccccaattgctcctctctctctttgctctctttctccctcccctaccagcctcattcttcctccggtagcctctcccacctaacctctgcatcccccagcctcatgtcctgccccatccctatcctgcctgatccctggatctccctcagatcccctcttctcagacagcgccaggccggggtggggccggggttggggccgagccccacagctgcccccctcccctccctttttgtataatttaataaagaaatggtcgcgcttctgtttttaa

SEQ ID NO: 74336 - DNA, 1058 bp, Homo sapiens
ccacgcgtcgcggacgcggtgggcttctctcctccccgctcccgcctgccccacccctgggaagcccctcccgtcgggcagcgccgccttataagcgggttcccttcccgggggcggcagcggctggtcggcggcagctctgctggtgcgggggcggcgagcccgggatcgagctaccgcggccgagcgcgccggccaccgcctgcaccgcccttccgcccgcccccggccccggcaccatgtcggagaaaagcgtggaggcagcggccgagttgagcgccaaggacctgaaggagaagaaggagaaggtggaggagaaggcaagccggaaagagcgaaagaaagaagtggtggaggaggaggagaacggggctgaggaggaagaagaagaaactgccgaggatggagaggaggaagatgaaggggaagaagaagatgaggaagaagaagaagaggatgatgaagggcccgcgctgaagagagctgccgaagaggaggatgaagcggatcccaaacggcagaagacagaaaatggggcatcggcgtgagcccctgccaacaggctggggttgggaggcctctctgggcctggaggtgggggtgggggcagccaagtccagccactcttcacctggctccctgctctgggccctgcaccagagctgccaccctcttctttctccccagccttctcatttccgcctctccagacactgcgccctccaccctcactctgccattgttccacctcctgacctgctccatctgagctctccagctggcccccaattgctcctctctctctttgctctctttctccctcccctaccagcctcattcttcctccggtagcctctcccacctaacctctgcatcccccagcctcatgtcctgccccatccctatcctgcctgatccctggatctccctcagatcccctcttctcagacagcgccaggccggggtggggccggggttggggccgagccccacagctgcccccctcccctccctttttgtataatttaataaagaaatggtcgcgcttctgtttttaa

SEQ ID NO: 74337 - DNA, 876 bp, Homo sapiens
tgggagcgattcgagttataattggttgtgaaggaggggtctaggtacagatgactgaggacggatgaagagaaatagaaggaccaggcgaataaaagtgaggacctgaaggagaagaaggagaaggtggaggagaaggcaagccggaaagagcgaaagaaagaagtggtggaggaggaggagaacggggctgaggaggaagaagaagaaactgccgaggatggagaggaggaagatgaaggggaagaagaagatgaggaagaagaagaagaggatgatgaagggcccgcgctgaagagagctgccgaagaggaggatgaagcggatcccaaacggcagaagacagaaaatggggcatcggcgtgagcccctgccaacaggctggggttgggaggcctctctgggcctggaggtgggggtgggggcagccaagtccagccactcttcacctggctccctgctctgggccctgcaccagagctgccaccctcttctttctccccagccttctcatttccgcctctccagacactgcgccctccaccctcactctgccattgttccacctcctgacctgctccatctgagctctccagctggcccccaattgctcctctctctctttgctctctttctccctcccctaccagcctcattcttcctccggtagcctctcccacctaacctctgcatcccccagcctcatgtcctgccccatccctatcctgcctgatccctggatctccctcagatcccctcttctcagacagcgccaggccggggtggggccggggttggggccgagccccacagctgcccccctcccctccctttttgtataatttaataaagaaatggtcgcgcttctgtttttaa

SEQ ID NO: 74338 - DNA, 968 bp, Homo sapiens
cgcacgccccgcaggtagcgcccccgcccgcggcccagagtgcgctcgcgccggcaccagctcccggataaacggcgcgccgcgcggagatgacagccgaggagatgaaggcgaccgagagcggggcgcagtcggcgccgctgcccatggagggagtggacatcagccccaaacaggacgaaggcgtgctgaaggacctgaaggagaagaaggagaaggtggaggagaaggcaagccggaaagagcgaaagaaagaagtggtggaggaggaggagaacggggctgaggaggaagaagaagaaactgccgaggatggagaggaggaagatgaaggggaagaagaagatgaggaagaagaagaagaggatgatgaagggcccgcgctgaagagagctgccgaagaggaggatgaagcggatcccaaacggcagaagacagaaaatggggcatcggcgtgagcccctgccaacaggctggggttgggaggcctctctgggcctggaggtgggggtgggggcagccaagtccagccactcttcacctggctccctgctctgggccctgcaccagagctgccaccctcttctttctccccagccttctcatttccgcctctccagacactgcgccctccaccctcactctgccattgttccacctcctgacctgctccatctgagctctccagctggcccccaattgctcctctctctctttgctctctttctccctcccctaccagcctcattcttcctccggtagcctctcccacctaacctctgcatcccccagcctcatgtcctgccccatccctatcctgcctgatccctggatctccctcagatcccctcttctcagacagcgccaggccggggtggggccggggttggggccgagccccacagctgcccccctcccctccctttttgtataatttaataaagaaatggtcgcgcttctgtttttaa

SEQ ID NO: 74339 - DNA, 916 bp, Homo sapiens
atgtgctaaggtgtagtgtttggccaagtaggggcctgaggattagggagacacagatggagagaaacaaagaccttagaagctgaaggggaagctgggagggatgcccaggagagagagtcctcaggaaaaggccccagaggacctgaaggagaagaaggagaaggtggaggagaaggcaagccggaaagagcgaaagaaagaagtggtggaggaggaggagaacggggctgaggaggaagaagaagaaactgccgaggatggagaggaggaagatgaaggggaagaagaagatgaggaagaagaagaagaggatgatgaagggcccgcgctgaagagagctgccgaagaggaggatgaagcggatcccaaacggcagaagacagaaaatggggcatcggcgtgagcccctgccaacaggctggggttgggaggcctctctgggcctggaggtgggggtgggggcagccaagtccagccactcttcacctggctccctgctctgggccctgcaccagagctgccaccctcttctttctccccagccttctcatttccgcctctccagacactgcgccctccaccctcactctgccattgttccacctcctgacctgctccatctgagctctccagctggcccccaattgctcctctctctctttgctctctttctccctcccctaccagcctcattcttcctccggtagcctctcccacctaacctctgcatcccccagcctcatgtcctgccccatccctatcctgcctgatccctggatctccctcagatcccctcttctcagacagcgccaggccggggtggggccggggttggggccgagccccacagctgcccccctcccctccctttttgtataatttaataaagaaatggtcgcgcttctgtttttaa

SEQ ID NO: 74340 - DNA, 1533 bp, Homo sapiens
cccctcctggtctcgtcctccctcccgactccctagctctccctcccctcgctttcatcctcctatccccacctctccaacctcctctttcatccccctcccctctcctctcctccccgctcccgcctgccccacccctgggaagcccctcccgtcgggcagcgccgccttataagcgggttcccttcccgggggcggcagcggctggtcggcggcagctctgctggtgcgggggcggcgagcccgggatcgagctaccgcggccgagcgcgccggccaccgcctgcaccgcccttccgcccgccctccggacggccgcagccctgcgggtctccgctccagacccacccccgccccaccccgcgcgcctctgccgcctcttccagagacccagcttgccgagcggccgccgctgccgctgtcgccgccgccgccgccaccgcgccaggttccggccgcggccaccctccgccgtccagggcccctccgtctcggccccgggaccccggctccccgccagccccggccccggccccggcaccatgtcggagaaaagcgtggaggcagcggccgagttgagcgccaaggacctgaaggagaagaaggagaaggtggaggagaaggcaagccggaaagagcgaaagaaagaagtggtggaggaggaggagaacggggctgaggaggaagaagaagaaactgccgaggatggagaggaggaagatgaaggggaagaagaagatgaggaagaagaagaagaggatgatgaagggcccgcgctgaagagagctgccgaagaggaggtttgggctgggttgctgggcctgaggggctgtcagggatgcagccgggctgggcgccctttggatttggacccagatccctgtgtggcaggggtgggggctggaacaggaccgggacagggggaggtctcccctcccattttacagctcccccattctctccctctccacagatgaagcggatcccaaacggcagaagacagaaaatggggcatcggcgtgagcccctgccaacaggctggggttgggaggcctctctgggcctggaggtgggggtgggggcagccaagtccagccactcttcacctggctccctgctctgggccctgcaccagagctgccaccctcttctttctccccagccttctcatttccgcctctccagacactgcgccctccaccctcactctgccattgttccacctcctgacctgctccatctgagctctccagctggcccccaattgctcctctctctctttgctctctttctccctcccctaccagcctcattcttcctccggtagcctctcccacctaacctctgcatcccccagcctcatgtcctgccccatccctatcctgcctgatccctggatctccctcagatcccctcttctcagacagcgccaggccggggtggggccggggttggggccgagccccacagctgcccccctcccctccctttttgtataatttaataaagaaatggtcgcgcttctgtttttaa

SEQ ID NO: 74341 - DNA, 713 bp, Homo sapiens
atcccttccagtggggctctgcactgaggcagcgccgaccttgctgttgggccagcagggaggaggaggaagaagaaggggaagaagaaaatgaggaagaagaagaagaggatgatgaagggcccgcgctgaagagagctgccgaagaggaggatgaagcggatcccaaacggcagaagacagaaaatggggcatcggcgtgagcccctgccaacaggctggggttgggaggcctctctgggcctggaggtgggggtgggggcagccaagtccagccactcttcacctggctccctgctctgggccctgcaccagagctgccaccctcttctttctccccagccttctcatttccgcctctccagacactgcgccctccaccctcactctgccattgttccacctcctgacctgctccatctgagctctccagctggcccccaattgctcctctctctctttgctctctttctccctcccctaccagcctcattcttcctccggtagcctctcccacctaacctctgcatcccccagcctcatgtcctgccccatccctatcctgcctgatccctggatctccctcagatcccctcttctcagacagcgccaggccggggtggggccggggttggggccgagccccacagctgcccccctcccctccctttttgtataatttaataaagaaatggtcgcgcttctgtttttaa

SEQ ID NO: 74342 - DNA, 1208 bp, Homo sapiens
cccctcctggtctcgtcctccctcccgactccctagctctccctcccctcgctttcatcctcctatccccacctctccaacctcctctttcatccccctcccctctcctctcctccccgctcccgcctgccccacccctgggaagcccctcccgtcgggcagcgccgccttataagcgggttcccttcccgggggcggcagcggctggtcggcggcagctctgctggtgcgggggcggcgagcccgggatcgagctaccgcggccgagcgcgccggccaccgcctgcaccgcccttccgcccgccctccggacggccgcagccctgcgggtctccgctccagacccacccccgccccaccccgcgcgcctctgccgcctcttccagagacccagcttgccgagcggccgccgctgccgctgtcgccgccgccgccgccaccgcgccaggttccggccgcggccaccctccgccgtccagggcccctccgtctcggccccgggaccccggctccccgccagccccggccccggccccggcaccatgtcggagaaaagcgtggaggcagcggccgagttgagcgccaaggacctgaaggagaagaaggagaaggtggaggagaaggcaagccggaaagagcgaaagaaagaagtggtggaggaggaggagaacggggctgaggaggaagaagaagaaactgccgaggatggagaggaggaagatgaaggggaagaagaagatgaggaagaagaagaagaggatgatgaagggcccgcgctgaagagagctgccgaagaggaggatgaagcggatcccaaacggcagaagacagaaaatggggcatcggcgtgagcccctgccaacaggctggggttgggaggcctctctgggcctggaggtgggggtgggggcagccaagtccagccactcttcacctggctccctgctctgggccctgcaccagagctgccaccctcttctttctccccagccttctcatttccgcctctccagacactgcgccctccaccctcactctgccattgttccacctcctgacctgctccatctgagctctccagctggcccccaattgctcctctctctctttgctctctttctccctcccctaccagcctcattcttcctccggcctcccctccctttttgtataatttaataaagaaatggtcgcgcttctgtttttaa

SEQ ID NO: 74343 - DNA, 1166 bp, Homo sapiens
cccctcctggtctcgtcctccctcccgactccctagctctccctcccctcgctttcatcctcctatccccacctctccaacctcctctttcatccccctcccctctcctctcctccccgctcccgcctgccccacccctgggaagcccctcccgtcgggcagcgccgccttataagcgggttcccttcccgggggcggcagcggctggtcggcggcagctctgctggtgcgggggcggcgagcccgggatcgagctaccgcggccgagcgcgccggccaccgcctgcaccgcccttccgcccgccctccggacggccgcagccctgcgggtctccgctccagacccacccccgccccaccccgcgcgcctctgccgcctcttccagagacccagcttgccgagcggccgccgctgccgctgtcgccgccgccgccgccaccgcgccaggttccggccgcggccaccctccgccgtccagggcccctccgtctcggccccgggaccccggctccccgccagccccggccccggccccggcaccatgtcggagaaaagcgtggaggcagcggccgagttgagcgccaaggacctgaaggagaagaaggagaaggtggaggagaaggcaagccggaaagagcgaaagaaagaagtggtggaggaggaggagaacggggctgaggaggaagaagaagaaactgccgaggatggagaggaggaagatgaaggggaagaagaagatgaggaagaagaagaagaggatgatgaagggcccgcgctgaagagagctgccgaagaggaggatgaagcggatcccaaacggcagaagacagaaaatggggcatcggcgtgagcccctgccaacaggctggggttgggaggcctctctgggcctggaggtgggggtgggggcagccaagtccagccactcttcacctggctccctgctctgggccctgcaccagagctgccaccctcttctttctccccagccttctcatttccgcctctccagacactgcgccctccaccctcactctgccattgttccacctcctgacctgctccatctgagctctccagctggcccccaattgctcctctctctctttcctcccctccctttttgtataatttaataaagaaatggtcgcgcttctgtttttaa

SEQ ID NO: 74344 - DNA, 1291 bp, Homo sapiens
cccctcctggtctcgtcctccctcccgactccctagctctccctcccctcgctttcatcctcctatccccacctctccaacctcctctttcatccccctcccctctcctctcctccccgctcccgcctgccccacccctgggaagcccctcccgtcgggcagcgccgccttataagcgggttcccttcccgggggcggcagcggctggtcggcggcagctctgctggtgcgggggcggcgagcccgggatcgagctaccgcggccgagcgcgccggccaccgcctgcaccgcccttccgcccgccctccggacggccgcagccctgcgggtctccgctccagacccacccccgccccaccccgcgcgcctctgccgcctcttccagagacccagcttgccgagcggccgccgctgccgctgtcgccgccgccgccgccaccgcgccaggttccggccgcggccaccctccgccgtccagggcccctccgtctcggccccgggaccccggctccccgccagccccggccccggccccggcaccatgtcggagaaaagcgtggaggcagcggccgagttgagcgccaaggacctgaaggagaagaaggagaaggtggaggagaaggcaagccggaaagagcgaaagaaagaagtggtggaggaggaggagaacggggctgaggaggaagaagaagaaactgccgaggatggagaggaggaagatgaaggggaagaagaagatgaggaagaagaagaagaggatgatgaagggcccgcgctgaagagagctgccgaagaggaggatgaagcggatcccaaacggcagaagacagaaaatggggcatcggcgtgagcccctgccaacaggctggggttgggaggcctctctgggcagagctgccaccctcttctttctccccagccttctcatttccgcctctccagacactgcgccctccaccctcactctgccattgttccacctcctgacctgctccatctgagctctccagctggcccccaattgctcctctctctctttgctctctttctccctcccctaccagcctcattcttcctccggtagcctctcccacctaacctctgcatcccccagcctcatgtcctgccccatccctatcctgcctgatccctggatctccctcagatcccctcttctcagacagcgccaggccggggtggggccggggttggggccgagccccacagctgcccccctcccctccctttttgtataatttaataaagaaatggtcgcgcttctgtttttaa

SEQ ID NO: 74345 - DNA, 925 bp, Homo sapiens
ggcaaagtccgggctcaaaggagagcagagtcagggtgggtttgaagacctgaagcagggctgagggcgaccacgggggctctgccagagcttcctgcccttccccaatgacccatttctggctcctcagatgaggaagaagaagaagaggatgatgaagggcccgcgctgaagagagctgccgaagaggaggtttgggctgggttgctgggcctgaggggctgtcagggatgcagccgggctgggcgccctttggatttggacccagatccctgtgtggcaggggtgggggctggaacaggaccgggacagggggaggtctcccctcccattttacagctcccccattctctccctctccacagatgaagcggatcccaaacggcagaagacagaaaatggggcatcggcgtgagcccctgccaacaggctggggttgggaggcctctctgggcctggaggtgggggtgggggcagccaagtccagccactcttcacctggctccctgctctgggccctgcaccagagctgccaccctcttctttctccccagccttctcatttccgcctctccagacactgcgccctccaccctcactctgccattgttccacctcctgacctgctccatctgagctctccagctggcccccaattgctcctctctctctttgctctctttctccctcccctaccagcctcattcttcctccggtagcctctcccacctaacctctgcatcccccagcctcatgtcctgccccatccctatcctgcctgatccctggatctccctcagatcccctcttctcagacagcgccaggccggggtggggccggggttggggccgagccccacagctgcccccctcccctccctttttgtataatttaataaagaaatggtcgcgcttctgtttttaa

SEQ ID NO: 74346 - DNA, 658 bp, Homo sapiens
cggaggtcgtgaatgcccggaggcgttgaatggcccggaggcgttgaatggcccggaggcgttgaatggcccgcgctgaagagagctgccgaagagggatgaagcggatcccaaacggcagaagacagaaaatggggcatcggcgtgagcccctgccaacaggctggggttgggaggcctctctgggcctggaggtgggggtgggggcagccaagtccagccactcttcacctggctccctgctctgggccctgcaccagagctgccaccctcttctttctccccagccttctcatttccgcctctccagacactgcgccctccaccctcactctgccattgttccacctcctgacctgctccatctgagctctccagctggcccccaattgctcctctctctctttgctctctttctccctcccctaccagcctcattcttcctccggtagcctctcccacctaacctctgcatcccccagcctcatgtcctgccccatccctatcctgcctgatccctggatctccctcagatcccctcttctcagacagcgccaggccggggtggggccggggttggggccgagccccacagctgcccccctcccctccctttttgtataatttaataaagaaatggtcgcgcttctgtttttaa

SEQ ID NO: 74347 - DNA, 1068 bp, Homo sapiens
cccctcctggtctcgtcctccctcccgactccctagctctccctcccctcgctttcatcctcctatccccacctctccaacctcctctttcatccccctcccctctcctctcctccccgctcccgcctgccccacccctgggaagcccctcccgtcgggcagcgccgccttataagcgggttcccttcccgggggcggcagcggctggtcggcggcagctctgctggtgcgggggcggcgagcccgggatcgagctaccgcggccgagcgcgccggccaccgcctgcaccgcccttccgcccgccctccggacggccgcagccctgcgggtctccgctccagacccacccccgccccaccccgcgcgcctctgccgcctcttccagagacccagcttgccgagcggccgccgctgccgctgtcgccgccgccgccgccaccgcgccaggttccggccgcggccaccctccgccgtccagggcccctccgtctcggccccgggaccccggctccccgccagccccggccccggccccggcaccatgtcggagaaaagcgtggaggcagcggccgagttgagcgccaaggacctgaaggagaagaaggagaaggtggaggagaaggcaagccggaaagagcgaaagaaagaagtggtggaggaggaggagaacggggctgaggaggaagaagaagaaactgccgaggatggagaggaggaagatgaaggggaagaagaagatgaggaagaagaagaagaggatgagacctgctccatctgagctctccagctggcccccaattgctcctctctctctttgctctctttctccctcccctaccagcctcattcttcctccggtagcctctcccacctaacctctgcatcccccagcctcatgtcctgccccatccctatcctgcctgatccctggatctccctcagatcccctcttctcagacagcgccaggccggggtggggccggggttggggccgagccccacagctgcccccctcccctccctttttgtataatttaataaagaaatggtcgcgcttctgtttttaa

SEQ ID NO: 74348 - DNA, 1167 bp, Homo sapiens
cccctcctggtctcgtcctccctcccgactccctagctctccctcccctcgctttcatcctcctatccccacctctccaacctcctctttcatccccctcccctctcctctcctccccgctcccgcctgccccacccctgggaagcccctcccgtcgggcagcgccgccttataagcgggttcccttcccgggggcggcagcggctggtcggcggcagctctgctggtgcgggggcggcgagcccgggatcgagctaccgcggccgagcgcgccggccaccgcctgcaccgcccttccgcccgccctccggacggccgcagccctgcgggtctccgctccagacccacccccgccccaccccgcgcgcctctgccgcctcttccagagacccagcttgccgagcggccgccgctgccgctgtcgccgccgccgccgccaccgcgccaggttccggccgcggccaccctccgccgtccagggcccctccgtctcggccccgggaccccggctccccgccagccccggccccggccccggcaccatgtcggagaaaagcgtggaggcagcggccgagttgagcgccaaggacctgaaggagaagaaggagaaggtggaggagaaggcaagccggaaagagcgaaagaaagaagtggtggaggaggaggagaacggggctgaggaggaagaagaagaaactgccgaggatggagaggaggaagatgaaggggaagaagaagatgaggaagaagaagaagaggatgatgaagggcccgcgctgaagagagctgccgaagaggagatgaagcgcatcccaaacggtagaagacagtttggcctggaggtgggggtgggggcagccaagtccagccactcttcacctggctccctgctctgggccctgcaccagagctgccaccctcttctttctccccagccttctcatttccgccttcccttcctttttgtataatttaataaagaaatggttgcgcttttgttttataaactaaatataaatttcgagtgggtctcgtaccaatttgtcctaaactgagtgtattacactttactggctcgcgtttaacacgtccgcctgcttaaaccttggtgttctccatctatattctttgttcttaattctctttttccctgtttggtcattgtct

SEQ ID NO: 74349 - DNA, 1022 bp, Homo sapiens
cccctcctggtctcgtcctccctcccgactccctagctctccctcccctcgctttcatcctcctatccccacctctccaacctcctctttcatccccctcccctctcctctcctccccgctcccgcctgccccacccctgggaagcccctcccgtcgggcagcgccgccttataagcgggttcccttcccgggggcggcagcggctggtcggcggcagctctgctggtgcgggggcggcgagcccgggatcgagctaccgcggccgagcgcgccggccaccgcctgcaccgcccttccgcccgccctccggacggccgcagccctgcgggtctccgctccagacccacccccgccccaccccgcgcgcctctgccgcctcttccagagacccagcttgccgagcggccgccgctgccgctgtcgccgccgccgccgccaccgcgccaggttccggccgcggccaccctccgccgtccagggcccctccgtctcggccccgggaccccggctccccgccagccccggccccggccccggcaccatgtcggagaaaagcgtggaggcagcggccgagttgagcgccaaggacctgaaggagaagaaggagaaggtggaggagaaggcaagccggaaagagcgaaagaaagaagtggtggaggaggaggagaacggggctgaggaggaagaagaagaaatctgccattgttccacctcctgacctgctccatctgagctctccagctggcccccaattgctcctctctctctttgctctctttctccctcccctaccagcctcattcttcctccggtagcctctcccacctaacctctgcatcccccagcctcatgtcctgccccatccctatcctgcctgatccctggatctccctcagatcccctcttctcagacagcgccaggccggggtggggccggggttggggccgagccccacagctgcccccctcccctccctttttgtataatttaataaagaaatggtcgcgcttctgtttttaa

SEQ ID NO: 74350 - DNA, 586 bp, Homo sapiens
tcttgcagaagtgacctgaagaagacgacaagcctgctcagtcacacctggaagctgactggtccacgcatggccgaagcacgaggaagctcatcgttagattcatttttcttaaattttggacttatacagtaagggccaagtccagccactcttcacctggctccctgctctgggccctgcaccagagctgccaccctcttctttctccccagccttctcatttccgcctctccagacactgcgccctccaccctcactctgccattgttccacctcctgacctgctccatctgagctctccagctggcccccaattgctcctctctctctttgctctctttctccctcccctaccagcctcattcttcctccggtagcctctcccacctaacctctgcatcccccagcctcatgtcctgccccatccctatcctgcctgatccctggatctccctcagatcccctcttctcagacagcgccaggccggggtggggccggggttggggccgagccccacagctgcccccctcccctccctttttgtataatttaataaagaaatggtcgcgcttctgtttttaa

SEQ ID NO: 74351 - DNA, 1188 bp, Homo sapiens
cccctcctggtctcgtcctccctcccgactccctagctctccctcccctcgctttcatcctcctatccccacctctccaacctcctctttcatccccctcccctctcctctcctccccgctcccgcctgccccacccctgggaagcccctcccgtcgggcagcgccgccttataagcgggttcccttcccgggggcggcagcggctggtcggcggcagctctgctggtgcgggggcggcgagcccgggatcgagctaccgcggccgagcgcgccggccaccgcctgcaccgcccttccgcccgccctccggacggccgcagccctgcgggtctccgctccagacccacccccgccccaccccgcgcgcctctgccgcctcttccagagacccagcttgccgagcggccgccgctgccgctgtcgccgccgccgccgccaccgcgccaggttccggccgcggccaccctccgccgtccagggcccctccgtctcggccccgggaccccggctccccgccagccccggccccggccccggcaccatgtcggagaaaagcgtggaggcagcggccgagttgagcgccaaggacctgaaggagaagaaggagaaggtggaggagaaggcaagccggaaagagcgaaagaaagaagtggtggagtgtgggaagaaagttagatttacgccgatgaatatgatagtgaaatggattttggcgtaggtttggtctagggtgtagcctgagaataggggaaatcagtgaatgaagcctcctatgatggcaaatacagctcctattgataggacatagtggaagtgagctacaacgtattacgtgtcgtgtagtacgatgtctagtgatgagtttgctaatacaatgccagtcaggccacctacggtgaaaagaaagatgaatcctagggctcagagcactgcagcagatcatttcatattgcttccgtggagtgtggcgagtcagctaaatactttgacgccggtggggatagcgatgattatggtagcggaggtgaaatatgctcgtgtgtctacgtctattcctactgtaaatatatggtgtgctcacacgataaaacctaggaagccaattgatatcatagctcagtacatacctatttatcccaatggttctctttttcccggagtagtaagttacaatatgggagatattc

SEQ ID NO: 74352 - DNA, 436 bp, Homo sapiens
gtctgtattgcattgtcgtgactggtgaaaaaccttagagctgccaccctcttctttctccccagccttctcatttccgcctctccagacactgcgccctccaccctcactctgccattgttccacctcctgacctgctccatctgagctctccagctggcccccaattgctcctctctctctttgctctctttctccctcccctaccagcctcattcttcctccggtagcctctcccacctaacctctgcatcccccagcctcatgtcctgccccatccctatcctgcctgatccctggatctccctcagatcccctcttctcagacagcgccaggccggggtggggccggggttggggccgagccccacagctgcccccctcccctccctttttgtataatttaataaagaaatggtcgcgcttctgtttttaa

SEQ ID NO: 74353 - DNA, 445 bp, Homo sapiens
cagcacagaggagggagccaggtgaagagtggctggacttggctgagagctgccaccctcttctttctccccagccttctcatttccgcctctccagacactgcgccctccaccctcactctgccattgttccacctcctgacctgctccatctgagctctccagctggcccccaattgctcctctctctctttgctctctttctccctcccctaccagcctcattcttcctccggtagcctctcccacctaacctctgcatcccccagcctcatgtcctgccccatccctatcctgcctgatccctggatctccctcagatcccctcttctcagacagcgccaggccggggtggggccggggttggggccgagccccacagctgcccccctcccctccctttttgtataatttaataaagaaatggtcgcgcttctgtttttaa

SEQ ID NO: 74354 - DNA, 718 bp, Homo sapiens
cccctcctggtctcgtcctccctcccgactccctagctctccctcccctcgctttcatcctcctatccccacctctccaacctcctctttcatccccctcccctctcctctcctccccgctcccgcctgccccacccctgggaagcccctcccgtcgggcagcgccgccttataagcgggttcccttcccgggggcggcagcggctggtcggcggcagctctgctggtgcgggggcggcgagcccgggatcgagctaccgcggccgagcgcgccggccaccgcctgcaccgcccttccgcccgccctccggacggccgcagccctgcgggtctccgctccagacccacccccgccccaccccgcgcgcctctgccgcctcttccagagacccagcttgccgagcggccgccgctgccgctgtcgccgccgccgccgccaccgcgccaggttccggccgcggccaccctccgccgtccagggcccctccgtctcggccccgggaccccggtagcctctcccacctaacctctgcatcccccagcctcatgtcctgccccatccctatcctgcctgatccctggatctccctcagatcccctcttctcagacagcgccaggccggggtggggccggggttggggccgagccccacagctgcccccctcccctccctttttgtataatttaataaagaaatggtcgcgcttctgtttttaa

SEQ ID NO: 74355 - DNA, 836 bp, Homo sapiens
cccctcctggtctcgtcctccctcccgactccctagctctccctcccctcgctttcatcctcctatccccacctctccaacctcctctttcatccccctcccctctcctctcctccccgctcccgcctgccccacccctgggaagcccctcccgtcgggcagcgccgccttataagcgggttcccttcccgggggcggcagcggctggtcggcggcagctctgctggtgcgggggcggcgagcccgggatcgagctaccgcggccgagcgcgccggccaccgcctgcaccgcccttccgcccgccctccggacggccgcagccctgcgggtctccgctccagacccacccccgccccaccccgcgcgcctctgccgcctcttccagagacccagcttgccgagcggccgccgctgccgctgtcgccgccgccgccgccaccgcgccaggttccggccgcggccaccctccgccgtccagggcccctccgtctcggccccgggaccccggctccccgccagccccggccccggccccggcaccatgtcggagaaaagcgtggaggcagcggccgagttgagcgccaagacctgaaggtggaatttgaggcggatcttttttttttttttttttttttttgagacagagtctcgctctgtcgcccaggctggagtgcagtggcgtgagctcgactcactgcaagctccgccttccgggttcacgccattctcctgcctcagcctcccaagtagctgggactacaggcgcccgccaccacacccggctaattttttgtatttttagtagagatggggtttcaccgtgttagccaggatg

SEQ ID NO: 74356 - DNA, 995 bp, Homo sapiens
ggtcgattagaggtccccagcgcatagctcatgtactcactatctctccttagcctctcccacctaacctctgcatcccccagcctcatgtcctgccccatccctatcctgcctgatccctggatctccctcagatcccctcttctcagacagcgccaggccggggtggggccggggttggggccgagccccacagctgcccccctcccctccctttttgtataatttaataaagaaatggtcgcgcttctgtttttaaaaaaaaaaaaaaaaaaaaaaaaaacaaaaaaaaaaaaaaaaaaaaaaaaaaaagggggcgcgcgcgcggcctaagaaagagtctactcctccgaggaggggcgcccagaacgtttcggtcgcgagcacctccgacggttattctggtgtgtaacaagcaggtgggcgtcccccataaaaaggggagccgcggtatatatatatataccgcagaagcgacgcagtgagcgcccggcgctggttaatcacaacgcggtcgctgagagctaggtgagagacaacacgtgtagcgtaacgttgtggaggcgatctctttgtgaggaggagagaagagagagcctcccttaatatctctcatgcgagggggggcggggagagagacaaatattatattgtgggtgggacgaacaacatctactactctctacaaagagagtagatatatataaagaaggcgtctctcatatgaggagggagcagatattactatatattaaaatactttttacgaagagggtggtgatatatatagtgtgtgtgggttatatacaaaacatattaacggcgctgtggtgatatatatgtgctgtgtgtggcggcgcgtgctgtgagaaaaaaaatgatgtgtgttgtgcgctatatacgtgtaaattaatatttgatattatttttatgtgatgataaacaatatatatttatatatacaccgacggcgggagagacactatttggtgatt

SEQ ID NO: 74357 - DNA, 602 bp, Homo sapiens
cagagaagaaacagaaacccaagttcttcctgcaccctgtttctccctcgggaaacacccaggctccttctctacccctgcctctcggctcacgccccctccccttggcctctcttttgctcacctagtgaagcctctccagccaggggctgaggtcccggtggtgtgggcccaggagggggctcctgcccagctcccctgcagccccacaatccccctccaggatctcagccttctgcgaagagcaggggtcacttggcagcatcagccagacaggtatgcaccccaaacttgagcaacaggacctccgaatccagcactcaaccccacacccgtgccggtcctctgtcccctgccctgaggtgtcactccctctgaagccagtgacccagtctccctgccctcgcttgcaccgttcctgcccttgctctgcaatcagcgaccctcacgccagcatcccttctctccagaagtggatgcggccagtccaacagaggggtcgggcgtgaggggacggttggtggtcaagagaactcttggggcgggctttctcatcctcaacgggtggctgcctgcatcctcccgggcttcctacccctgga

SEQ ID NO: 74358 - DNA, 716 bp, Homo sapiens
tagtcttttttctttttctcatatttagaaaataaccgtttggaaaaaatacttactctagtttagtatttttcatgctgtgcctccagctttatgttatggtttaatagtatccctttggcttggggttgggaagatttagaaataagagtatattagatatgtaataagcttgaaaagacatcttgtggaaatagatccttgggaaaacacttagatggaaacaacatttagaactctgtgaaatggaatttactgaaaacttagaggtgctactgttttcctaagcactctacttgtgacagttaagtgtagattgagcccagggctcagcacattagagacttaaggaagaaatcatttcttcaatttttcctctgcagtggtggtgaccgcggtggcttcaaaaattttggtggtcacagggattatggacccagaacagatgctgattcagaatctgataattcagataacaacacaatctttgtgcaaggacttggggagggtgtgtctacagatcaagttggggagttctttaaacaaataggaattatcaagacaaataagaagaccggaaaaccaatgataaatctttatacagacaaggacacaggaaagccaaagggggaggcaacagtgtcatttgatgaccctccttcagctaaggcagccattgactggtttgatggaatatgcctcattcgtatagtttt

SEQ ID NO: 74359 - DNA, 704 bp, Homo sapiens
aagtggcagatccagaattcatacatgtaagtgcttgctcattccactatgccactctcctatttagagtgctggaactgggacagtttctgatcttctgaaatatttgtggtttggagttttaagtggaaaatttttaagagagtgaagcaaagcttcttctaggaactttgtgaatcttaaagctggtaaattagacatttaagtatcttctaggagtacagaaataaatgaggcatggtgtcattctttagaaattgtctagctgatgccaatcactagtaccctgaagaagtgtctaatgctcccccttcgtagaaaattagaatttagtccggctctttatttttcattcctagaaacgactacagaaatgatcagcgcaaccgaccatactgatgactgttttgaatgttcctttgtctctgacatgatccatagtgaaattgccagagttttgcctgctgctttcctcgtggcctcttcttgggtagtgaaattaagtgacatttggatttttatttgggtgggagggctgggacagtttttcttctagaaatgtctgttgagatttccccctttagtttccaaccttctccccaacccttggagctaaatgcgttgtaaaatattgccaaaatgaaaagtgttttgtaatactgcaataaaggctgcttgtttttgtggaacttttgtacatacta

SEQ ID NO: 74360 - DNA, 396 bp, Homo sapiens
tcccctggccccatccccctaggccgtggaggatatagaggtcgtggaggctttcaagggagaggtggagaccccaaaagtggggattgggtttgccctaatccgtcatgcggaaatatgaactttgctcgaaggaattcctgcaatcagtgcaatgagcctagaccagaggactctcgtccctcaggaggagatttccgggggagaggctacggtggagagaggggctacagaggtcgtgggggcagaggtggagaccgaggcggctatggtggctcgggaggctaaggtaggagaatcgcttcaacctgggaggcggaggttgtggtgagccgagatcgtgccattgcactccagcctgggcaacaagagcgaaacttcgtctcacacacacaa

SEQ ID NO: 74361 - DNA, 574 bp, Homo sapiens
ctccgccccatacctcttcaaatgtttaaaaaaaaaaaaaaaaaagtactgtacattccttttttcatattaaaatttagaaatccattttgtattttgcatttagagcacatcttaatttagactggctacatttccagtgctcaacaggccacatgtaggtagtggatactgtattggacagtgcagctctagaatgatagattcttggcctcctgagatgttgataaatgctgaatccagaaagcctttttaccatgcatgtaagacataggaggaaataaaatgtaaatacagctgttatggagaatagtacttaaatccattgagtcacttaaatgtggaattaatgttggtcttttcctcacacctgtaatcccagcgctttgggaggccgaggcatttccactaaaactacaaaaaaattagccgggcatggtggcgggcgcctgtagtcccagctactcgggaggctgaggcaggagaatggtgggaacccaggaggcggagcttgcagtgagccgagatcgcgccactgcactccagcctgggcgacagagcaagactccgtcgc

SEQ ID NO: 74362 - DNA, 444 bp, Homo sapiens
ctccgccccatacctcttcaaatgtttaaaaaaaaaaaaaaaaaagtactgtacattccttttttcatattaaaatttagaaatccattttgtattttgcatttagagcacatcttaatttagactggctacatttccagtgctcaacaggccacatgtaggtagtggatactgtattggacagtgcagctctagaatgatagattcttggcctcctgagatgttgataaatgctgaatccagaaagcctttttaccatgcatagagagagacctggagtagagattctgtcaaagaactttttctttcttgagaagcatctgaaatggaatctgttgtctcttcgaaatatgtactgctgtaacagtgaaacaaccctcagagtatgccttcgtgtgggctgctcgttgtggttttgaccgcggtgcgcgtggggatcctcag

SEQ ID NO: 74363 - DNA, 397 bp, Homo sapiens
tagtcttttttctttttctcatatttagaaaataaccgtttggaaaaaatacttactctagtttagtatttttcatgctgtgcctccagctttatgttatggtttaatagtatccctttggcttggggttgggaagatttagaaataagagtatattagatatgtaataagcttgaaaagacatcttgtggaaatagatccttgggaaaacacttagatggaaacaacatttagaactctgtgaaatggaatttactatacaggaggagagagatgatgaacctcatatgcattatgcctcataatgttgaaatgatgtttgaggacacgctcagtcccctacatgcatgtattatcttgtgaaataatagctgcgtcaggtaatgcagcgtttgga

SEQ ID NO: 74364 - DNA, 316 bp, Homo sapiens
cctagttttagaagtttcaatagccctagttttagaagtttcgatagcagttaagtgtagattgagcccagggctcagcacattagagacttaaggaagaaatcatttcttcaatttttcctctgcagtggtggtgaccgcggtggcttcaaaaattttggtggtaagtgctgagtatcccaaaatgtttcagtggaaatgctattgaaacttctaaaactaggcctagtttagaagtttcaatagcatgactttaaataacacttatactgagagcacttacacttttatctgtcgtgacatttttctcaaactt

SEQ ID NO: 74365 - DNA, 2209 bp, Homo sapiens
aaaaaaaaaaaaaaaaaaaaaattataaaaaaaatttaaagtacagctccggccgccgcgccgcctggctttcgtattcgttgttctcggcgggctgtggggcctccgcgccgcggccgttagtcatgtcggattctggaagttacggtcagtctgggggtgagcagcaaagttattctacctatggaaatccaggcagccaaggctatggacaagcatcacaaagctattctggctatgggcaaacgactgattcctcttatggacagaactacagcggttactccagttatggacaaagtcagtcaggttattcacagtcctatggtggttatgagaatcaaaagcagagctcatatagccagcaaccatataataaccagggacagcagcaaaacatggaatcatcaggaagccaaggtggaagagcaccttcctatgaccagccagactatggtcaacaagattcatatgaccagcagtcaggctatgatcaacatcaaggctcatatgatgagcagtcaaattatgatcagcagcatgattcctatagtcaaaaccagcagtcctatcattcacaaagggaaaactacagccaccacacacaagatgaccgtcgtgatgtgagtaggtatggagaagataatagaggatatggcgggtcacagggaggaggtagagggcgtgggggatatgacaaggatggaagaggtcctatgacaggatcaagtggtggtgaccgcggtggcttcaaaaattttggtggtcacagggattatggacccagaacagatgctgattcagaatctgataattcagataacaacacaatctttgtgcaaggacttggggagggtgtgtctacagatcaagttggggagttctttaaacaaataggaattatcaagacaaataagaagaccggaaaaccaatgataaatctttatacagacaaggacacaggaaagccaaagggggaggcaacagtgtcatttgatgaccctccttcagctaaggcagccattgactggtttgatggaaaagaattccatggcaacatcattaaagtgtcctttgccactagaagacctgaattcatgagaggaggtggaagtggaggtgggcggcgaggccgtggaggatatagaggtcgtggaggctttcaagggagaggtggagaccccaaaagtggggattgggtttgccctaatccgtcatgcggaaatatgaactttgctcgaaggaattcctgcaatcagtgcaatgagcctagaccagaggactctcgtccctcaggaggagatttccgggggagaggctacggtggagagaggggctacagaggtcgtgggggcagaggtggagaccgaggcggctatggtggagacagaagtgggggtggctatggtggagacagaagcagcggtggtggctacagcggagatagaagtgggggcggctatggtggagacagaagtgggggtggctatggtggggacagaggcggcggctatggtggggacagaggaggcggctatggaggagaccgaggaggtggctatggaggagatcgaggtggctatggaggagaccgaggtggaggctatggtggagaccgaggaggctatggaggagatcgaggaggttacggaggagatcgaggaggttatggaggagatcgaggaggctatggaggagacagaagccgggggggctatggaggagaccgtggtggtggcagtggctacggtggagaccgaagtggaggctatggaggagacaggagtggtggcggctatggaggagaccgaggtgggggctacggaggagaccgaggtggctatggaggcaaaatgggaggaagaaacgactacagaaatgatcagcgcaaccgaccatactgatgactgttttgaatgttcctttgtctctgacatgatccatagtgaaattgccagagttttgcctgctgctttcctcgtggcctcttcttgggtagtgaaattaagtgacatttggatttttatttgggtgggagggctgggacagtttttcttctagaaatgtctgttgagatttccccctttagtttccaaccttctccccaacccttggagctaaatgcgttgtaaaatattgccaaaatgaaaagtgttttgtaatactgcaataaaggctgcttgtttttgtggaacttttgtacatacta

SEQ ID NO: 74366 - DNA, 2200 bp, Homo sapiens
  misc_feature (8)..(8): n is a, c, g, or t
ttaaaagnggcggacggtccggaattcccgggtacagctccggccgccgcgccgcctggctttcgtattcgttgttctcggcgggctgtggggcctccgcgccgcggccgttagtcatgtcggattctggaagttacggtcagtctgggggtgagcagcaaagttattctacctatggaaatccaggcagccaaggctatggacaagcatcacaaagctattctggctatgggcaaacgactgattcctcttatggacagaactacagcggttactccagttatggacaaagtcagtcaggttattcacagtcctatggtggttatgagaatcaaaagcagagctcatatagccagcaaccatataataaccagggacagcagcaaaacatggaatcatcaggaagccaaggtggaagagcaccttcctatgaccagccagactatggtcaacaagattcatatgaccagcagtcaggctatgatcaacatcaaggctcatatgatgagcagtcaaattatgatcagcagcatgattcctatagtcaaaaccagcagtcctatcattcacaaagggaaaactacagccaccacacacaagatgaccgtcgtgatgtgagtaggtatggagaagataatagaggatatggcgggtcacagggaggaggtagagggcgtgggggatatgacaaggatggaagaggtcctatgacaggatcaagtggtggtgaccgcggtggcttcaaaaattttggtggtcacagggattatggacccagaacagatgctgattcagaatctgataattcagataacaacacaatctttgtgcaaggacttggggagggtgtgtctacagatcaagttggggagttctttaaacaaataggaattatcaagacaaataagaagaccggaaaaccaatgataaatctttatacagacaaggacacaggaaagccaaagggggaggcaacagtgtcatttgatgaccctccttcagctaaggcagccattgactggtttgatggaaaagaattccatggcaacatcattaaagtgtcctttgccactagaagacctgaattcatgagaggaggtggaagtggaggtgggcggcgaggccgtggaggatatagaggtcgtggaggctttcaagggagaggtggagaccccaaaagtggggattgggtttgccctaatccgtcatgcggaaatatgaactttgctcgaaggaattcctgcaatcagtgcaatgagcctagaccagaggactctcgtccctcaggaggagatttccgggggagaggctacggtggagagaggggctacagaggtcgtgggggcagaggtggagaccgaggcggctatggtggagacagaagtgggggtggctatggtggagacagaagcagcggtggtggctacagcggagatagaagtgggggcggctatggtggagacagaagtgggggtggctatggtggggacagaggcggcggctatggtggggacagaggaggcggctatggaggagaccgaggaggtggctatggaggagatcgaggtggctatggaggagaccgaggtggaggctatggtggagaccgaggaggctatggaggagatcgaggaggttacggaggagatcgaggaggttatggaggagatcgaggaggctatggaggagacagaagccgggggggctatggaggagaccgtggtggtggcagtggctacggtggagaccgaagtggaggctatggaggagacaggagtggtggcggctatggaggagaccgaggtgggggctacggaggagaccgaggtggctatggaggcaaaatgggaggaagaaacgactacagaaatgatcagcgcaaccgaccatactgatgactgttttgaatgttcctttgtctctgacatgatccatagtgaaattgccagagttttgcctgctgctttcctcgtggcctcttcttgggtagtgaaattaagtgacatttggatttttatttgggtgggagggctgggacagtttttcttctagaaatgtctgttgagatttccccctttagtttccaaccttctccccaacccttggagctaaatgcgttgtaaaatattgccaaaatgaaaagtgttttgtaatactgcaataaaggctgcttgtttttgtggaacttttgtacatacta

SEQ ID NO: 74367 - DNA, 2547 bp, Homo sapiens
ctttggaaatatttttgaggtgctgacagccaaagcagtccaatacagaggaatggtgtatatcttggggtggtaaggatgttcaagtagatgtaatcctggggatgtcatagtgcatgtctttcccctttttggacctgattagttttaacagatgtctttttgtatataataatattgcttaaggtcttgagtctgtttaaagaatggattttcactgtttacatttgttcactgggttcttgtgaccctagcacacatgtagaatagtagtttgcaaatacgtagttattgtaaaaagtaaatactatttgtacaaatttcttgtttcatagtatttaacttgagttagtttttctttctgcagttctttacattttcttaccacatttcttctgtatgagctaaagtcagcctttgaaggaaccataattttaaataagatttaaaattctttttatgtgttctagattctggaagttacggtcagtctgggggtgagcagcaaagttattctacctatggaaatccaggcagccaaggctatggacaagcatcacaaagctattctggctatgggcaaacgactgattcctcttatggacagaactacagcggttactccagttatggacaaagtcagtcaggttattcacagtcctatggtggttatgagaatcaaaagcagagctcatatagccagcaaccatataataaccagggacagcagcaaaacatggaatcatcaggaagccaaggtggaagagcaccttcctatgaccagccagactatggtcaacaagattcatatgaccagcagtcaggctatgatcaacatcaaggctcatatgatgagcagtcaaattatgatcagcagcatgattcctatagtcaaaaccagcagtcctatcattcacaaagggaaaactacagccaccacacacaagatgaccgtcgtgatgtgagtaggtatggagaagataatagaggatatggcgggtcacagggaggaggtagagggcgtgggggatatgacaaggatggaagaggtcctatgacaggatcaagtggtggtgaccgcggtggcttcaaaaattttggtggtcacagggattatggacccagaacagatgctgattcagaatctgataattcagataacaacacaatctttgtgcaaggacttggggagggtgtgtctacagatcaagttggggagttctttaaacaaataggaattatcaagacaaataagaagaccggaaaaccaatgataaatctttatacagacaaggacacaggaaagccaaagggggaggcaacagtgtcatttgatgaccctccttcagctaaggcagccattgactggtttgatggaaaagaattccatggcaacatcattaaagtgtcctttgccactagaagacctgaattcatgagaggaggtggaagtggaggtgggcggcgaggccgtggaggatatagaggtcgtggaggctttcaagggagaggtggagaccccaaaagtggggattgggtttgccctaatccgtcatgcggaaatatgaactttgctcgaaggaattcctgcaatcagtgcaatgagcctagaccagaggactctcgtccctcaggaggagatttccgggggagaggctacggtggagagaggggctacagaggtcgtgggggcagaggtggagaccgaggcggctatggtggagacagaagtgggggtggctatggtggagacagaagcagcggtggtggctacagcggagatagaagtgggggcggctatggtggagacagaagtgggggtggctatggtggggacagaggcggcggctatggtggggacagaggaggcggctatggaggagaccgaggaggtggctatggaggagatcgaggtggctatggaggagaccgaggtggaggctatggtggagaccgaggaggctatggaggagatcgaggaggttacggaggagatcgaggaggttatggaggagatcgaggaggctatggaggagacagaagccgggggggctatggaggagaccgtggtggtggcagtggctacggtggagaccgaagtggaggctatggaggagacaggagtggtggcggctatggaggagaccgaggtgggggctacggaggagaccgaggtggctatggaggcaaaatgggaggaagaaacgactacagaaatgatcagcgcaaccgaccatactgatgactgttttgaatgttcctttgtctctgacatgatccatagtgaaattgccagagttttgcctgctgctttcctcgtggcctcttcttgggtagtgaaattaagtgacatttggatttttatttgggtgggagggctgggacagtttttcttctagaaatgtctgttgagatttccccctttagtttccaaccttctccccaacccttggagctaaatgcgttgtaaaatattgccaaaatgaaaagtgttttgtaatactgcaataaaggctgcttgtttttgtggaacttttgtacatacta

SEQ ID NO: 74368 - DNA, 2119 bp, Homo sapiens
gggtcgtctagaggatccctagctggtcgcaagtcatgtcggattctggaagttacggtcagtctgggggtgagcagcaaagttattctacctatggaaatccaggcagccaaggctatggacaagcatcacaaagctattctggctatgggcaaacgactgattcctcttatggacagaactacagcggttactccagttatggacaaagtcagtcaggttattcacagtcctatggtggttatgagaatcaaaagcagagctcatatagccagcaaccatataataaccagggacagcagcaaaacatggaatcatcaggaagccaaggtggaagagcaccttcctatgaccagccagactatggtcaacaagattcatatgaccagcagtcaggctatgatcaacatcaaggctcatatgatgagcagtcaaattatgatcagcagcatgattcctatagtcaaaaccagcagtcctatcattcacaaagggaaaactacagccaccacacacaagatgaccgtcgtgatgtgagtaggtatggagaagataatagaggatatggcgggtcacagggaggaggtagagggcgtgggggatatgacaaggatggaagaggtcctatgacaggatcaagtggtggtgaccgcggtggcttcaaaaattttggtggtcacagggattatggacccagaacagatgctgattcagaatctgataattcagataacaacacaatctttgtgcaaggacttggggagggtgtgtctacagatcaagttggggagttctttaaacaaataggaattatcaagacaaataagaagaccggaaaaccaatgataaatctttatacagacaaggacacaggaaagccaaagggggaggcaacagtgtcatttgatgaccctccttcagctaaggcagccattgactggtttgatggaaaagaattccatggcaacatcattaaagtgtcctttgccactagaagacctgaattcatgagaggaggtggaagtggaggtgggcggcgaggccgtggaggatatagaggtcgtggaggctttcaagggagaggtggagaccccaaaagtggggattgggtttgccctaatccgtcatgcggaaatatgaactttgctcgaaggaattcctgcaatcagtgcaatgagcctagaccagaggactctcgtccctcaggaggagatttccgggggagaggctacggtggagagaggggctacagaggtcgtgggggcagaggtggagaccgaggcggctatggtggagacagaagtgggggtggctatggtggagacagaagcagcggtggtggctacagcggagatagaagtgggggcggctatggtggagacagaagtgggggtggctatggtggggacagaggcggcggctatggtggggacagaggaggcggctatggaggagaccgaggaggtggctatggaggagatcgaggtggctatggaggagaccgaggtggaggctatggtggagaccgaggaggctatggaggagatcgaggaggttacggaggagatcgaggaggttatggaggagatcgaggaggctatggaggagacagaagccgggggggctatggaggagaccgtggtggtggcagtggctacggtggagaccgaagtggaggctatggaggagacaggagtggtggcggctatggaggagaccgaggtgggggctacggaggagaccgaggtggctatggaggcaaaatgggaggaagaaacgactacagaaatgatcagcgcaaccgaccatactgatgactgttttgaatgttcctttgtctctgacatgatccatagtgaaattgccagagttttgcctgctgctttcctcgtggcctcttcttgggtagtgaaattaagtgacatttggatttttatttgggtgggagggctgggacagtttttcttctagaaatgtctgttgagatttccccctttagtttccaaccttctccccaacccttggagctaaatgcgttgtaaaatattgccaaaatgaaaagtgttttgtaatactgcaataaaggctgcttgtttttgtggaacttttgtacatacta

SEQ ID NO: 74369 - DNA, 4080 bp, Homo sapiens
aaaaaaaaaaaaaaaaaaaaaattataaaaaaaatttaaagtacagctccggccgccgcgccgcctggctttcgtattcgttgttctcggcgggctgtggggcctccgcgccgcggccgttagtcatgtcggattctggaagttacggtcagtctgggggtgagcagcaaagttattctacctatggaaatccaggcagccaaggctatggacaagcatcacaaagctattctggctatgggcaaacgactgattcctcttatggacagaactacagcggttactccagttatggacaaagtcagtcaggttattcacagtcctatggtggttatgagaatcaaaagcagagctcatatagccagcaaccatataataaccagggacagcagcaaaacatggaatcatcaggaagccaaggtggaagagcaccttcctatgaccagccagactatggtcaacaagattcatatgaccagcagtcaggctatgatcaacatcaaggctcatatgatgagcagtcaaattatgatcagcagcatgattcctatagtcaaaaccagcagtcctatcattcacaaagggaaaactacagccaccacacacaagatgaccgtcgtgatgtgagtaggtatggagaagataatagaggatatggcgggtcacagggaggaggtagagggcgtgggggatatgacaaggatggaagaggtcctatgacaggatcaaggtaagtatgtagataaagatgcgtacatttcttcttcttcctctttttttttttttttaaggtgttacttggctggatcaattccagcatctaatttagttaagagactttaaaaagggattatatattggagaaaaaggcagaaattaaaagtgtattttcagtcttaatatctcacataaatgaccttagaattggctatgttagtagttagtttatgtggtacatgttaaacaccagtagagaaacaactatggttgtgattaaatcacttgactttcctgccagagctagaatcttaactcctttaaaagacgactctgggaaatccagtgtttgtatgtaaaaataaaaggtaagttaattctagattgaggggcagaggctatttcttaatctccaatctccttgggaagggaaagtattaggaggcagtaatggagtagaaaggtggggatggcaaataagagaaagatttaatgtaacaaaactgttttgtccctcttcttaagtaaataattattggaataattagtgtaacatcacatagtaatgtgtattttgtcttgactaagttgtgtaaaggaatgtctttttaattcagcttttcttttctccatgctagtgttatcaggttttggtatttatttacttacagcatatgttatgaagctggtttgaaaattggttttagatatatctgcaagtttactactttgactgtaaaaaaaaaaaaatgaaaaagtagttgacatctgtcctcagaagaagtttgcaggttgcatatttgtgtgtaaatacacaggctaaaaggtaatttatgttccttgggaattgaaatggtcagtggcccgttacagaaacttatcagtcatatatcagcaccagttcattcttttgcaccttagggaccatctgtcccctgaggtgacctgagaaacaaccagttgcccacagactgttatttcttcaagtgagccaggatttgatttcactgccttatattctatttttagtgtacagtgctttgattttttggaaaaactaaattttaaacatatttgaaaaatgttataagacttggacattaagtctgttgatagccaaagtcagtttaccaaagtaaaacaaataaattctatgcttcttcattgtcaaagagcagtctgccatcatgtggatataaatggactatgtaaagtgacatggtgcttactctctacctaataatagcctccctcctgttccaaacaagataaccaacaggtatatttaatttaccagttaatatgttttggataattggctgccttgaaatgctatatgttttatagtacatcatagctttagttttcttcataaggaaattacagttacatcctggctaacatggtgaaactccatctctactaaaaatacaaaaaattagccgggcgtggtggcgggcacttgtagtcccagctactcgggaggctgaggcaggagaatggcgtgaacccaggaggcggaggttgcagtgagccgagatcgtgccactgtactctggcctgggagacagagcgagactccatctcaaaaaaaaaaaaaaaaaaaaaaaaagagagagagagacctggagtagagattctgtcaaagaactttttctttcttgagaagcatctgaaatggaatctgttgtctcttcgaaatatgtactgctgtaacagtgaaacaaccctcagagtatgccttcgtgtgggctgctcgttgtggttttgaacttgggggaactgtctgtgtttgggtcaagaatatgcaactggctgggcacattggctcacgcctgtaatcccagcaatttgggaggctgaggcaggtggatcacctgaggtcagggcttcaagaccagactggccaacatggtgaaaccccgtctctactgaaaatacaaaaattagctgggcatggtggcaggtgcctgtaatcccagctactcgggaggctgacgtgagagaatcgcttgaacccgggagttggaggttgcagtgagccgagattgcaccattgcactccagcttgggcaacaagagtgaaactcttgtctcagaaaaaaaaaaaaaagtatgcaactagctgggggctgtgacgcgtacctgtagtcccagctacttaggaggctgaggtgggaggatcactgatgctcaggagttcgtgaccagactaggcaaaatagcaagacaccatctcaaaaaacaaacaaaaaaaccagctagttttcttatgcagggggtactctgccaataaagttgagtatgcttatattgtgtttctgttaaatatctctgctacttcaggaattctttatgtgtaaatgttttctgctttttctgggaattaaagcaaatttgttgtgtcaacatcttgactcagatgttcaagtacctttgtgtcttgatttgccttagcatgtagaaaagggacttgtaacattaatgcagatttgaaagaaagattgttaacctcaggcacatcttctgttaatatctaatagtactacttgaaggttattttctgtatttaataaattccttaaaaaggataattttctaataaggagagagaaaatgattgaaacgtttgaacttgaaagaaggctttgcataaaattacagatcatctagatcaatgcctaaaccaaatgtctagacattttagacttaaatgtgcatatgaattacttgggggatcttattaaatgcaggttcttattcagtaggtctagggtggggcctgagatcctgcttttctcagaaccttccaggctatgcttacgcttatattccatcatgttttgattagtaaggggacagacccttattttgttaaggagattgaagcttatggagaaccactgacatgtccagattttcaagattgattagttatagttaagactgtaccctgagtttcttgaagactagttctttttccagtgtactatggtatttccaaatttatggccatgtgttgaaatcttcagctgctttattttcaaaggaaatgcacagtaaagatgacgttcaaggccgggcgcagtgactcatgcctgtaatcccagtgctttgggaggccgagacgggcggatcatgaaggtcaggagattgagaccatcctggctaacacggtgaaaccccgtctctactaaaaatacaaaaacaaaaattagccgggcatggtggcgggcgcctgtagtcccagctactcgggaggctgaggcaggagaatggtgggaacccaggaggcggagcttgcagtgagccgagatcgcgccactgcactccagcctgggcgacagagcaagactccgtcgc

SEQ ID NO: 74370 - DNA, 2008 bp, Homo sapiens
aaaaaaaaaaaaaaaaaaaaaattataaaaaaaatttaaagtacagctccggccgccgcgccgcctggctttcgtattcgttgttctcggcgggctgtggggcctccgcgccgcggccgttagtcatgtcggattctggaagttacggtcagtctgggggtgagcagcaaagttattctacctatggaaatccaggcagccaaggctatggacaagcatcacaaagctattctggctatgggcaaacgactgattcctcttatggacagaactacagcggttactccagttatggacaaagtcagtcaggttattcacagtcctatggtggttatgagaatcaaaagcagagctcatatagccagcaaccatataataaccagggacagcagcaaaacatggaatcatcaggaagccaaggtggaagagcaccttcctatgaccagccagactatggtcaacaagattcatatgaccagcagtcaggctatgatcaacatcaaggctcatatgatgagcagtcaaattatgatcagcagcatgattcctatagtcaaaaccagcagtcctatcattcacaaagggaaaactacagccaccacacacaagatgaccgtcgtgatgtgagtaggtatggagaagataatagaggatatggcgggtcacagggaggaggtagagggcgtgggggatatgacaaggatggaagaggtcctatgacaggatcaagtggtggtgaccgcggtggcttcaaaaattttggtggtcacagggattatggacccagaacagatgctgattcagaatctgataattcagataacaacacaatctttgtgcaaggacttggggagggtgtgtctacagatcaagttggggagttctttaaacaaataggaattatcaagacaaataagaagaccggaaaaccaatgataaatctttatacagacaaggacacaggaaagccaaagggggaggcaacagtgtcatttgatgaccctccttcagctaaggcagccattgactggtttgatggaaaagaattccatggcaacatcattaaagtgtcctttgccactagaagacctgaattcatgagaggaggtggaagtggaggtgggcggcgaggccgtggaggatatagaggtcgtggaggctttcaagggagaggtggagaccccaaaagtggggattgggtttgccctaatccgtcatgcggaaatatgaactttgctcgaaggaattcctgcaatcagtgcaatgagcctagaccagaggactctcgtccctcaggaggaggcggcggctatggtggggacagaggaggcggctatggaggagaccgaggaggtggctatggaggagatcgaggtggctatggaggagaccgaggtggaggctatggtggagaccgaggaggctatggaggagatcgaggaggttacggaggagatcgaggaggttatggaggagatcgaggaggctatggaggagacagaagccgggggggctatggaggagaccgtggtggtggcagtggctacggtggagaccgaagtggaggctatggaggagacaggagtggtggcggctatggaggagaccgaggtgggggctacggaggagaccgaggtggctatggaggcaaaatgggaggaagaaacgactacagaaatgatcagcgcaaccgaccatactgatgactgttttgaatgttcctttgtctctgacatgatccatagtgaaattgccagagttttgcctgctgctttcctcgtggcctcttcttgggtagtgaaattaagtgacatttggatttttatttgggtgggagggctgggacagtttttcttctagaaatgtctgttgagatttccccctttagtttccaaccttctccccaacccttggagctaaatgcgttgtaaaatattgccaaaatgaaaagtgttttgtaatactgcaataaaggctgcttgtttttgtggaacttttgtacatacta

SEQ ID NO: 74371 - DNA, 1972 bp, Homo sapiens
  misc_feature (1910)..(1910): n is a, c, g, or t
  misc_feature (1921)..(1921): n is a, c, g, or t
  misc_feature (1949)..(1949): n is a, c, g, or t
aaaaaaaaaaaaaaaaaaaaaattataaaaaaaatttaaagtacagctccggccgccgcgccgcctggctttcgtattcgttgttctcggcgggctgtggggcctccgcgccgcggccgttagtcatgtcggattctggaagttacggtcagtctgggggtgagcagcaaagttattctacctatggaaatccaggcagccaaggctatggacaagcatcacaaagctattctggctatgggcaaacgactgattcctcttatggacagaactacagcggttactccagttatggacaaagtcagtcaggttattcacagtcctatggtggttatgagaatcaaaagcagagctcatatagccagcaaccatataataaccagggacagcagcaaaacatggaatcatcaggaagccaaggtggaagagcaccttcctatgaccagccagactatggtcaacaagattcatatgaccagcagtcaggctatgatcaacatcaaggctcatatgatgagcagtcaaattatgatcagcagcatgattcctatagtcaaaaccagcagtcctatcattcacaaagggaaaactacagccaccacacacaagatgaccgtcgtgatgtgagtaggtatggagaagataatagaggatatggcgggtcacagggaggaggtagagggcgtgggggatatgacaaggatggaagaggtcctatgacaggatcaagtggtggtgaccgcggtggcttcaaaaattttggtggtcacagggattatggacccagaacagatgctgattcagaatctgataattcagataacaacacaatctttgtgcaaggacttggggagggtgtgtctacagatcaagttggggagttctttaaacaaataggaattatcaagacaaataagaagaccggaaaaccaatgataaatctttatacagacaaggacacaggaaagccaaagggggaggcaacagtgtcatttgatgaccctccttcagctaaggcagccattgactggtttgatggaaaagaattccatggcaacatcattaaagtgtcctttgccactagaagacctgaattcatgagaggaggtggaagtggaggtgggcggcgaggccgtggaggatatagaggtcgtggaggctttcaagggagaggtggagaccccaaaagtggggattgggtttgccctaatccgtcatgcggaaatatgaactttgctcgaaggaattcctgcaatcagtgcaatgagcctagaccagaggactctcgtccctcaggaggagatttccgggggagaggctacggtggagagaggggctacagaggtcgtgggggcagaggtggagaccgaggcggctatggtggagacagaagtgggggtggctatggtggagacagaagcagcggtggtggctacagcggagatagaagtgggggcggctatggtggagacagaagtgggggtggctatggtggggacagaggcggcggctatggtggggacagaggaggcggctatggaggagaccgaggaggtggctatggaggagatcgaggtggctatggaggagaccgaggtggaggctatggtggagaccgaggaggctatggaggagatcgaggaggttacggaggagatcgaggaggttatggaggagatcgaggaggctatggaggagacagaagccgggggggctatggaggagaccgtggtggtggcagtggctacggtggagaccgaagtggaggctatggaggagacaggagtggtggcggctatggaggagaccgaggtgggggctacggaggagaccgaggtggctatggaggcaaaatgggaggaagtttccctctttaaggaagaaaggaaagtgtttctcctggatactangatatgctgangttgggacacggagctaacggacacganatgttcacgggtaccggagctcg

SEQ ID NO: 74372 - DNA, 1944 bp, Homo sapiens
tctgaggatcccgtggcttctcgtattatcgcaaagtcagtcaggttattcacagtcctatggtggttatgagaatcaaaagcagagctcatatagccagcaaccatataataaccagggacagcagcaaaacatggaatcatcaggaagccaaggtggaagagcaccttcctatgaccagccagactatggtcaacaagattcatatgaccagcagtcaggctatgatcaacatcaaggctcatatgatgagcagtcaaattatgatcagcagcatgattcctatagtcaaaaccagcagtcctatcattcacaaagggaaaactacagccaccacacacaagatgaccgtcgtgatgtgagtaggtatggagaagataatagaggatatggcgggtcacagggaggaggtagagggcgtgggggatatgacaaggatggaagaggtcctatgacaggatcaagtggtggtgaccgcggtggcttcaaaaattttggtggtcacagggattatggacccagaacagatgctgattcagaatctgataattcagataacaacacaatctttgtgcaaggacttggggagggtgtgtctacagatcaagttggggagttctttaaacaaataggaattatcaagacaaataagaagaccggaaaaccaatgataaatctttatacagacaaggacacaggaaagccaaagggggaggcaacagtgtcatttgatgaccctccttcagctaaggcagccattgactggtttgatggaaaagaattccatggcaacatcattaaagtgtcctttgccactagaagacctgaattcatgagaggaggtggaagtggaggtgggcggcgaggccgtggaggatatagaggtcgtggaggctttcaagggagaggtggagaccccaaaagtggggattgggtttgccctaatccgtcatgcggaaatatgaactttgctcgaaggaattcctgcaatcagtgcaatgagcctagaccagaggactctcgtccctcaggaggagatttccgggggagaggctacggtggagagaggggctacagaggtcgtgggggcagaggtggagaccgaggcggctatggtggagacagaagtgggggtggctatggtggagacagaagcagcggtggtggctacagcggagatagaagtgggggcggctatggtggagacagaagtgggggtggctatggtggggacagaggcggcggctatggtggggacagaggaggcggctatggaggagaccgaggaggtggctatggaggagatcgaggtggctatggaggagaccgaggtggaggctatggtggagaccgaggaggctatggaggagatcgaggaggttacggaggagatcgaggaggttatggaggagatcgaggaggctatggaggagacagaagccgggggggctatggaggagaccgtggtggtggcagtggctacggtggagaccgaagtggaggctatggaggagacaggagtggtggcggctatggaggagaccgaggtgggggctacggaggagaccgaggtggctatggaggcaaaatgggaggaagaaacgactacagaaatgatcagcgcaaccgaccatactgatgactgttttgaatgttcctttgtctctgacatgatccatagtgaaattgccagagttttgcctgctgctttcctcgtggcctcttcttgggtagtgaaattaagtgacatttggatttttatttgggtgggagggctgggacagtttttcttctagaaatgtctgttgagatttccccctttagtttccaaccttctccccaacccttggagctaaatgcgttgtaaaatattgccaaaatgaaaagtgttttgtaatactgcaataaaggctgcttgtttttgtggaacttttgtacatacta

SEQ ID NO: 74373 - DNA, 3061 bp, Homo sapiens
aaaaaaaaaaaaaaaaaaaaaattataaaaaaaatttaaagtacagctccggccgccgcgccgcctggctttcgtattcgttgttctcggcgggctgtggggcctccgcgccgcggccgttagtcatgtcggattctggaagttacggtcagtctgggggtgagcagcaaagttattctacctatggaaatccaggcagccaaggctatggacaagcatcacaaagctattctggctatgggcaaacgactgattcctcttatggacagaactacagcggttactccagttatggacaaagtcagtcaggttattcacagtcctatggtggttatgagaatcaaaagcagagctcatatagccagcaaccatataataaccagggacagcagcaaaacatggaatcatcaggaagccaaggtggaagagcaccttcctatgaccagccagactatggtcaacaagattcatatgaccagcagtcaggctatgatcaacatcaaggctcatatgatgagcagtcaaattatgatcagcagcatgattcctatagtcaaaaccagcagtcctatcattcacaaagggaaaactacagccaccacacacaagatgaccgtcgtgatgtgagtaggtatggagaagataatagaggatatggcgggtcacagggaggaggtagagggcgtgggggatatgacaaggatggaagaggtcctatgacaggatcaaggtaagtatgtagataaagatgcgtacatttcttcttcttcctctttttttttttttttaaggtgttacttggctggatcaattccagcatctaatttagttaagagactttaaaaagggattatatattggagaaaaaggcagaaattaaaagtgtattttcagtcttaatatctcacataaatgaccttagaattggctatgttagtagttagtttatgtggtacatgttaaacaccagtagagaaacaactatggttgtgattaaatcacttgactttcctgccagagctagaatcttaactcctttaaaagacgactctgggaaatccagtgtttgtatgtaaaaataaaaggtaagttaattctagattgaggggcagaggctatttcttaatctccaatctccttgggaagggaaagtattaggaggcagtaatggagtagaaaggtggggatggcaaataagagaaagatttaatgtaacaaaactgttttgtccctcttcttaagtaaataattattggaataattagtgtaacatcacatagtaatgtgtattttgtcttgactaagttgtgtaaaggaatgtctttttaattcagcttttcttttctccatgctagtgttatcaggttttggtatttatttacttacagcatatgttatgaagctggtttgaaaattggttttagatatatctgcaagtttactactttgactgtaaaaaaaaaaaaatgaaaaagtagttgacatctgtcctcagaagaagtttgcaggttgcatatttgtgtgtaaatacacaggctaaaaggtaatttatgttccttgggaattgaaatggtcagtggcccgttacagaaacttatcagtcatatatcagcaccagttcattcttttgcaccttagggaccatctgtcccctgaggtgacctgagaaacaaccagttgcccacagactgttatttcttcaagtgagccaggatttgatttcactgccttatattctatttttagtgtacagtgctttgattttttggaaaaactaaattttaaacatatttgaaaaatgttataagacttggacattaagtctgttgatagccaaagtcagtttaccaaagtaaaacaaataaattctatgcttcttcattgtcaaagagcagtctgccatcatgtggatataaatggactatgtaaagtgacatggtgcttactctctacctaataatagcctccctcctgttccaaacaagataaccaacaggtatatttaatttaccagttaatatgttttggataattggctgccttgaaatgctatatgttttatagtacatcatagctttagttttcttcataaggaaattacagttacatcctaatcgattattaaactatcactgtgtctaagaatggtggaagaagatagggaataggtagggaagtcattataaatatattttcactggccaggcgtggtgacccatgcctgtaatcccagcactttgggaggccgaggcgggcggatcacgaggtcaggagatggagaccatcctggccaacacagtgaaaccccgtctctactaaaaatacaaaaagttggccggacgtggtggcaggcgcctgtagtcgtagtccgaactactcaggaggctgaggcaggagaatgttgtgaacccgggaggcggagcatgcagtgagccgagatcgtgccactgcactccagcctgggcgacagagcaagactccgtctcaaaaaaaaaaacattaaaaaaaaatgtattttcatttgtgactcatcttgtaactagaggatcgaaaggactttgaatgatcctcctgacaaaggagggaagcagtaccttaatcaaccctggggtccaattaagtacttttataaaccccttgcaacatacttcatataatttgtggcctagatactgacttataaactaaattttttattttcctttaataccccttaatacaaaatcatatgcagaagtccaatatctagttggtccaaatgatgtgctgatctggtttcagtgggggaaaggtcgggtgaggaagggatctgcaatcttgccttatactctgttatttgttgagatgttcatgaaaggccttttttagaaatccgtatggatgccgattactctttatattgagttggcaagctgtgtgaaaggccagatagtaaatgttctgggtttggtgaaccatatggtttctattgtaactattcatctctgcccttggagcaccagagcagccgtaattaatatgtaaatgaataaacagagttgtgttccagtaaagcttcatt

SEQ ID NO: 74374 - DNA, 2718 bp, Homo sapiens
ctttggaaatatttttgaggtgctgacagccaaagcagtccaatacagaggaatggtgtatatcttggggtggtaaggatgttcaagtagatgtaatcctggggatgtcatagtgcatgtctttcccctttttggacctgattagttttaacagatgtctttttgtatataataatattgcttaaggtcttgagtctgtttaaagaatggattttcactgtttacatttgttcactgggttcttgtgaccctagcacacatgtagaatagtagtttgcaaatacgtagttattgtaaaaagtaaatactatttgtacaaatttcttgtttcatagtatttaacttgagttagtttttctttctgcagttctttacattttcttaccacatttcttctgtatgagctaaagtcagcctttgaaggaaccataattttaaataagatttaaaattctttttatgtgttctagattctggaagttacggtcagtctgggggtgagcagcaaagttattctacctatggaaatccaggcagccaaggctatggacaagcatcacaagtaggttgaaatataaattgtattcttcataagtagttatttttatcttaagtaggtgatgaaacttgagtatttacctaaatttcagagctattctggctatgggcaaacgactgattcctcttatggacagaactacagcggttactccagttatggacaaagtcagtcaggttggactagtttgttaaatttgttgtttcagagattgaaaaatcagagccttcactaaatgatatactcatctaatctttaggttattcacagtcctatggtggttatgagaatcaaaagcagagctcatatagccagcaaccatataataaccagggacagcagcaaaacatggaatcatcaggaagccaaggtggaagagcaccttcctatgaccagccagactatggtcaacaagattcatatgaccagcagtcaggctatgatcaacatcaaggctcatatgatgagcagtcaaattatgatcagcagcatgattcctatagtcaaaaccagcagtcctatcattcacaaagggaaaactacagccaccacacacaagatgaccgtcgtgatgtgagtaggtatggagaagataatagaggatatggcgggtcacagggaggaggtagagggcgtgggggatatgacaaggatggaagaggtcctatgacaggatcaagtggtggtgaccgcggtggcttcaaaaattttggtggtcacagggattatggacccagaacagatgctgattcagaatctgataattcagataacaacacaatctttgtgcaaggacttggggagggtgtgtctacagatcaagttggggagttctttaaacaaataggaattatcaagacaaataagaagaccggaaaaccaatgataaatctttatacagacaaggacacaggaaagccaaagggggaggcaacagtgtcatttgatgaccctccttcagctaaggcagccattgactggtttgatggaaaagaattccatggcaacatcattaaagtgtcctttgccactagaagacctgaattcatgagaggaggtggaagtggaggtgggcggcgaggccgtggaggatatagaggtcgtggaggctttcaagggagaggtggagaccccaaaagtggggattgggtttgccctaatccgtcatgcggaaatatgaactttgctcgaaggaattcctgcaatcagtgcaatgagcctagaccagaggactctcgtccctcaggaggagatttccgggggagaggctacggtggagagaggggctacagaggtcgtgggggcagaggtggagaccgaggcggctatggtggagacagaagtgggggtggctatggtggagacagaagcagcggtggtggctacagcggagatagaagtgggggcggctatggtggagacagaagtgggggtggctatggtggggacagaggcggcggctatggtggggacagaggaggcggctatggaggagaccgaggaggtggctatggaggagatcgaggtggctatggaggagaccgaggtggaggctatggtggagaccgaggaggctatggaggagatcgaggaggttacggaggagatcgaggaggttatggaggagatcgaggaggctatggaggagacagaagccgggggggctatggaggagaccgtggtggtggcagtggctacggtggagaccgaagtggaggctatggaggagacaggagtggtggcggctatggaggagaccgaggtgggggctacggaggagaccgaggtggctatggaggcaaaatgggaggaagaaacgactacagaaatgatcagcgcaaccgaccatactgatgactgttttgaatgttcctttgtctctgacatgatccatagtgaaattgccagagttttgcctgctgctttcctcgtggcctcttcttgggtagtgaaattaagtgacatttggatttttatttgggtgggagggctgggacagtttttcttctagaaatgtctgttgagatttccccctttagtttccaaccttctccccaacccttggagctaaatgcgttgtaaaatattgccaaaatgaaaagtgttttgtaatactgcaataaaggctgcttgtttttgtggaacttttgtacatacta

SEQ ID NO: 74375 - DNA, 2371 bp, Homo sapiens
  misc_feature (8)..(8): n is a, c, g, or t
ttaaaagnggcggacggtccggaattcccgggtacagctccggccgccgcgccgcctggctttcgtattcgttgttctcggcgggctgtggggcctccgcgccgcggccgttagtcatgtcggattctggaagttacggtcagtctgggggtgagcagcaaagttattctacctatggaaatccaggcagccaaggctatggacaagcatcacaagtaggttgaaatataaattgtattcttcataagtagttatttttatcttaagtaggtgatgaaacttgagtatttacctaaatttcagagctattctggctatgggcaaacgactgattcctcttatggacagaactacagcggttactccagttatggacaaagtcagtcaggttggactagtttgttaaatttgttgtttcagagattgaaaaatcagagccttcactaaatgatatactcatctaatctttaggttattcacagtcctatggtggttatgagaatcaaaagcagagctcatatagccagcaaccatataataaccagggacagcagcaaaacatggaatcatcaggaagccaaggtggaagagcaccttcctatgaccagccagactatggtcaacaagattcatatgaccagcagtcaggctatgatcaacatcaaggctcatatgatgagcagtcaaattatgatcagcagcatgattcctatagtcaaaaccagcagtcctatcattcacaaagggaaaactacagccaccacacacaagatgaccgtcgtgatgtgagtaggtatggagaagataatagaggatatggcgggtcacagggaggaggtagagggcgtgggggatatgacaaggatggaagaggtcctatgacaggatcaagtggtggtgaccgcggtggcttcaaaaattttggtggtcacagggattatggacccagaacagatgctgattcagaatctgataattcagataacaacacaatctttgtgcaaggacttggggagggtgtgtctacagatcaagttggggagttctttaaacaaataggaattatcaagacaaataagaagaccggaaaaccaatgataaatctttatacagacaaggacacaggaaagccaaagggggaggcaacagtgtcatttgatgaccctccttcagctaaggcagccattgactggtttgatggaaaagaattccatggcaacatcattaaagtgtcctttgccactagaagacctgaattcatgagaggaggtggaagtggaggtgggcggcgaggccgtggaggatatagaggtcgtggaggctttcaagggagaggtggagaccccaaaagtggggattgggtttgccctaatccgtcatgcggaaatatgaactttgctcgaaggaattcctgcaatcagtgcaatgagcctagaccagaggactctcgtccctcaggaggagatttccgggggagaggctacggtggagagaggggctacagaggtcgtgggggcagaggtggagaccgaggcggctatggtggagacagaagtgggggtggctatggtggagacagaagcagcggtggtggctacagcggagatagaagtgggggcggctatggtggagacagaagtgggggtggctatggtggggacagaggcggcggctatggtggggacagaggaggcggctatggaggagaccgaggaggtggctatggaggagatcgaggtggctatggaggagaccgaggtggaggctatggtggagaccgaggaggctatggaggagatcgaggaggttacggaggagatcgaggaggttatggaggagatcgaggaggctatggaggagacagaagccgggggggctatggaggagaccgtggtggtggcagtggctacggtggagaccgaagtggaggctatggaggagacaggagtggtggcggctatggaggagaccgaggtgggggctacggaggagaccgaggtggctatggaggcaaaatgggaggaagaaacgactacagaaatgatcagcgcaaccgaccatactgatgactgttttgaatgttcctttgtctctgacatgatccatagtgaaattgccagagttttgcctgctgctttcctcgtggcctcttcttgggtagtgaaattaagtgacatttggatttttatttgggtgggagggctgggacagtttttcttctagaaatgtctgttgagatttccccctttagtttccaaccttctccccaacccttggagctaaatgcgttgtaaaatattgccaaaatgaaaagtgttttgtaatactgcaataaaggctgcttgtttttgtggaacttttgtacatacta

SEQ ID NO: 74376 - DNA, 1533 bp, Homo sapiens
aaaaaaaaaaaaaaaaaaaaaattataaaaaaaatttaaagtacagctccggccgccgcgccgcctggctttcgtattcgttgttctcggcgggctgtggggcctccgcgccgcggccgttagtcatgtcggattctggaagttacggtcagtctgggggtgagcagcaaagttattctacctatggaaatccaggcagccaaggctatggacaagcatcacaaagctattctggctatgggcaaacgactgattcctcttatggacagaactacagcggttactccagttatggacaaagtcagtcaggttattcacagtcctatggtggttatgagaatcaaaagcagagctcatatagccagcaaccatataataaccagggacagcagcaaaacatggaatcatcaggaagccaaggtggaagagcaccttcctatgaccagccagactatggtcaacaagattcatatgaccagcagtcaggctatgatcaacatcaaggctcatatgatgagcagtcaaattatgatcagcagcatgattcctatagtcaaaaccagcagtcctatcattcacaaagggaaaactacagccaccacacacaagatgaccgtcgtgatgtgagtaggtatggagaagataatagaggatatggcgggtcacagggaggaggtagagggcgtgggggatatgacaaggatggaagaggtcctatgacaggatcaagtggtggtgaccgcggtggcttcaaaaattttggtggtcacagggattatggacccagaacagatgctgattcagaatctgataattcagataacaacacaatctttgtgcaaggacttggggagggtgtgtctacagatcaagttggggagttctttaaacaaataggaattatcaagacaaataagaagaccggaaaaccaatgataaatctttatacagacaaggacacaggaaagccaaagggggaggcaacagtgtcatttgatgaccctccttcagctaaggcagccattgactggtttgatggaaaagaattccatggcaacatcattaaagtgtcctttgccactagaagacctgaattcatgagaggaggtggaagtggaggtgggcggcgaggccgtggaggatatagaggtcgtggaggctttcaagggagaggtggagaccccaaaagtggggattgggtttgccctaatccgtcatgcggaaatatgaactttgctcgaaggaattcctgcaatcagtgcaatgagcctagaccagaggactctcgtccctcaggaggagatttccgggggagaggctacggtggagagaggggctacagaggtcgtgggggcagaggtggagaccgaggcggctatggtggggaggcggcccaggcttgacagaggctctgtccctgggacatcagcatttgctgagggaagggaaggcagacactgcggaactgctcatgggcatttcagtgtctgtctggagcttcatgtgtcacctgtgctcacatttcattggccc

SEQ ID NO: 74377 - DNA, 1492 bp, Homo sapiens
aaaaaaaaaaaaaaaaaaaaaattataaaaaaaatttaaagtacagctccggccgccgcgccgcctggctttcgtattcgttgttctcggcgggctgtggggcctccgcgccgcggccgttagtcatgtcggattctggaagttacggtcagtctgggggtgagcagcaaagttattctacctatggaaatccaggcagccaaggctatggacaagcatcacaaagctattctggctatgggcaaacgactgattcctcttatggacagaactacagcggttactccagttatggacaaagtcagtcaggttattcacagtcctatggtggttatgagaatcaaaagcagagctcatatagccagcaaccatataataaccagggacagcagcaaaacatggaatcatcaggaagccaaggtggaagagcaccttcctatgaccagccagactatggtcaacaagattcatatgaccagcagtcaggctatgatcaacatcaaggctcatatgatgagcagtcaaattatgatcagcagcatgattcctatagtcaaaaccagcagtcctatcattcacaaagggaaaactacagccaccacacacaagatgaccgtcgtgatgtgagtaggtatggagaagataatagaggatatggcgggtcacagggaggaggtagagggcgtgggggatatgacaaggatggaagaggtcctatgacaggatcaaggtaagtatgtagataaagatgcgtacatttcttcttcttcctctttttttttttttttaaggtgttacttggctggatcaattccagcatctaatttagttaagagactttaaaaagggattatatattggagaaaaaggcagaaattaaaagtgtattttcagtcttaatatctcacataaatgaccttagaattggctatgttagtagttagtttatgtggtacatgttaaacaccagtagagaaacaactatggttgtgattaaatcacttgactttcctgccagagctagaatcttaactcctttaaaagacgactctgggaaatccagtgtttgtatgtaaaaataaaaggtaagttaattctagattgaggggcagaggctatttcttaatctccaatctccttgggaagggaaagtattaggaggcagtaatggagtagaaaggtggggatggcaaataagagaaagatttaatgtaacaaaactgttttgtccctcttcttaagtaaataattattggaataattagtgtaacatcacatagtaatgtgtattttgtcttgactaagttgtgtaaaggaatgtctttttaattcagcttttcttttctccatgctagtgttatcaggttttggtatttatttacttacagcatatgttatgaagctggtttgaaaattggttttagatatatctgcaagtttactactttgactgtaaaaaaaaaattgaaatacacaggcttaaaggtaattt

SEQ ID NO: 74378 - DNA, 2149 bp, Homo sapiens
tgagccacgatcgcgccattgcactccagcagcctgggcaacacagagtgaacctctgtttccaaaaaaaaaaaaaaagttcaaggagatagtaaaaagccatagtaattttttgctttactgcagttttcaaagatacattttttttcataatgtggcacctcttcaatgttggcagaatcgtctttcgcagggaattccaggagactgcagataactaattaccatgagaaggtagtcataaatatggttaatgtctctaactggtcaggactcttaacatcagtttcagccaacttgctacagcaaatgtaatcttcctatgaagtctcttaagttctccatttctatttagccaaggtggaagagcaccttcctatgaccagccagactatggtcaacaagattcatatgaccagcagtcaggctatgatcaacatcaaggctcatatgatgagcagtcaaattatgatcagcagcatgattcctatagtcaaaaccagcagtcctatcattcacaaagggaaaactacagccaccacacacaagatgaccgtcgtgatgtgagtaggtatggagaagataatagaggatatggcgggtcacagggaggaggtagagggcgtgggggatatgacaaggatggaagaggtcctatgacaggatcaagtggtggtgaccgcggtggcttcaaaaattttggtggtcacagggattatggacccagaacagatgctgattcagaatctgataattcagataacaacacaatctttgtgcaaggacttggggagggtgtgtctacagatcaagttggggagttctttaaacaaataggaattatcaagacaaataagaagaccggaaaaccaatgataaatctttatacagacaaggacacaggaaagccaaagggggaggcaacagtgtcatttgatgaccctccttcagctaaggcagccattgactggtttgatggaaaagaattccatggcaacatcattaaagtgtcctttgccactagaagacctgaattcatgagaggaggtggaagtggaggtgggcggcgaggccgtggaggatatagaggtcgtggaggctttcaagggagaggtggagaccccaaaagtggggattgggtttgccctaatccgtcatgcggaaatatgaactttgctcgaaggaattcctgcaatcagtgcaatgagcctagaccagaggactctcgtccctcaggaggagatttccgggggagaggctacggtggagagaggggctacagaggtcgtgggggcagaggtggagaccgaggcggctatggtggagacagaagtgggggtggctatggtggagacagaagcagcggtggtggctacagcggagatagaagtgggggcggctatggtggagacagaagtgggggtggctatggtggggacagaggcggcggctatggtggggacagaggaggcggctatggaggagaccgaggaggtggctatggaggagatcgaggtggctatggaggagaccgaggtggaggctatggtggagaccgaggaggctatggaggagatcgaggaggttacggaggagatcgaggaggttatggaggagatcgaggaggctatggaggagacagaagccgggggggctatggaggagaccgtggtggtggcagtggctacggtggagaccgaagtggaggctatggaggagacaggagtggtggcggctatggaggagaccgaggtgggggctacggaggagaccgaggtggctatggaggcaaaatgggaggaagaaacgactacagaaatgatcagcgcaaccgaccatactgatgactgttttgaatgttcctttgtctctgacatgatccatagtgaaattgccagagttttgcctgctgctttcctcgtggcctcttcttgggtagtgaaattaagtgacatttggatttttatttgggtgggagggctgggacagtttttcttctagaaatgtctgttgagatttccccctttagtttccaaccttctccccaacccttggagctaaatgcgttgtaaaatattgccaaaatgaaaagtgttttgtaatactgcaataaaggctgcttgtttttgtggaacttttgtacatacta

SEQ ID NO: 74379 - DNA, 1862 bp, Homo sapiens
tagtcttttttctttttctcatatttagaaaataaccgtttggaaaaaatacttactctagtttagtatttttcatgctgtgcctccagctttatgttatggtttaatagtatccctttggcttggggttgggaagatttagaaataagagtatattagatatgtaataagcttgaaaagacatcttgtggaaatagatccttgggaaaacacttagatggaaacaacatttagaactctgtgaaatggaatttactgaaaacttagaggtgctactgttttcctaagcactctacttgtgacagttaagtgtagattgagcccagggctcagcacattagagacttaaggaagaaatcatttcttcaatttttcctctgcagtggtggtgaccgcggtggcttcaaaaattttggtggtcacagggattatggacccagaacagatgctgattcagaatctgataattcagataacaacacaatctttgtgcaaggacttggggagggtgtgtctacagatcaagttggggagttctttaaacaaataggaattatcaagacaaataagaagaccggaaaaccaatgataaatctttatacagacaaggacacaggaaagccaaagggggaggcaacagtgtcatttgatgaccctccttcagctaaggcagccattgactggtttgatggaaaagaattccatggcaacatcattaaagtgtcctttgccactagaagacctgaattcatgagaggaggtggaagtggaggtgggcggcgaggccgtggaggatatagaggtcgtggaggctttcaagggagaggtggagaccccaaaagtggggattgggtttgccctaatccgtcatgcggaaatatgaactttgctcgaaggaattcctgcaatcagtgcaatgagcctagaccagaggactctcgtccctcaggaggagatttccgggggagaggctacggtggagagaggggctacagaggtcgtgggggcagaggtggagaccgaggcggctatggtggagacagaagtgggggtggctatggtggagacagaagcagcggtggtggctacagcggagatagaagtgggggcggctatggtggagacagaagtgggggtggctatggtggggacagaggcggcggctatggtggggacagaggaggcggctatggaggagaccgaggaggtggctatggaggagatcgaggtggctatggaggagaccgaggtggaggctatggtggagaccgaggaggctatggaggagatcgaggaggttacggaggagatcgaggaggttatggaggagatcgaggaggctatggaggagacagaagccgggggggctatggaggagaccgtggtggtggcagtggctacggtggagaccgaagtggaggctatggaggagacaggagtggtggcggctatggaggagaccgaggtgggggctacggaggagaccgaggtggctatggaggcaaaatgggaggaagaaacgactacagaaatgatcagcgcaaccgaccatactgatgactgttttgaatgttcctttgtctctgacatgatccatagtgaaattgccagagttttgcctgctgctttcctcgtggcctcttcttgggtagtgaaattaagtgacatttggatttttatttgggtgggagggctgggacagtttttcttctagaaatgtctgttgagatttccccctttagtttccaaccttctccccaacccttggagctaaatgcgttgtaaaatattgccaaaatgaaaagtgttttgtaatactgcaataaaggctgcttgtttttgtggaacttttgtacatacta

SEQ ID NO: 74380 - DNA, 1792 bp, Homo sapiens
cgttagaggatccagtctggtccccagtatggtttaatagtatccctttggcttggggttgggaagatttagaaataagagtatattagatatgtaataagcttgaaaagacatcttgtggaaatagatccttgggaaaacacttagatggaaacaacatttagaactctgtgaaatggaatttactgaaaacttagaggtgctactgttttcctaagcactctacttgtgacagttaagtgtagattgagcccagggctcagcacattagagacttaaggaagaaatcatttcttcaatttttcctctgcagtggtggtgaccgcggtggcttcaaaaattttggtggtcacagggattatggacccagaacagatgctgattcagaatctgataattcagataacaacacaatctttgtgcaaggacttggggagggtgtgtctacagatcaagttggggagttctttaaacaaataggaattatcaagacaaataagaagaccggaaaaccaatgataaatctttatacagacaaggacacaggaaagccaaagggggaggcaacagtgtcatttgatgaccctccttcagctaaggcagccattgactggtttgatggaaaagaattccatggcaacatcattaaagtgtcctttgccactagaagacctgaattcatgagaggaggtggaagtggaggtgggcggcgaggccgtggaggatatagaggtcgtggaggctttcaagggagaggtggagaccccaaaagtggggattgggtttgccctaatccgtcatgcggaaatatgaactttgctcgaaggaattcctgcaatcagtgcaatgagcctagaccagaggactctcgtccctcaggaggagatttccgggggagaggctacggtggagagaggggctacagaggtcgtgggggcagaggtggagaccgaggcggctatggtggagacagaagtgggggtggctatggtggagacagaagcagcggtggtggctacagcggagatagaagtgggggcggctatggtggagacagaagtgggggtggctatggtggggacagaggcggcggctatggtggggacagaggaggcggctatggaggagaccgaggaggtggctatggaggagatcgaggtggctatggaggagaccgaggtggaggctatggtggagaccgaggaggctatggaggagatcgaggaggttacggaggagatcgaggaggttatggaggagatcgaggaggctatggaggagacagaagccgggggggctatggaggagaccgtggtggtggcagtggctacggtggagaccgaagtggaggctatggaggagacaggagtggtggcggctatggaggagaccgaggtgggggctacggaggagaccgaggtggctatggaggcaaaatgggaggaagaaacgactacagaaatgatcagcgcaaccgaccatactgatgactgttttgaatgttcctttgtctctgacatgatccatagtgaaattgccagagttttgcctgctgctttcctcgtggcctcttcttgggtagtgaaattaagtgacatttggatttttatttgggtgggagggctgggacagtttttcttctagaaatgtctgttgagatttccccctttagtttccaaccttctccccaacccttggagctaaatgcgttgtaaaatattgccaaaatgaaaagtgttttgtaatactgcaataaaggctgcttgtttttgtggaacttttgtacatacta

SEQ ID NO: 74381 - DNA, 973 bp, Homo sapiens
  misc_feature (10)..(10): n is a, c, g, or t
gagagtggantggagtgggcgcgagccgtggaggatatagaggtcgtggaggctttcaagggagaggtggagaccccaaaagtggggattgggtttgccctaatccgtcatgcggaaatatgaactttgctcgaaggaattcctgcaatcagtgcaatgagcctagaccagaggactctcgtccctcaggaggagatttccgggggagaggctacggtggagagaggggctacagaggtcgtgggggcagaggtggagaccgaggcggctatggtggagacagaagtgggggtggctatggtggagacagaagcagcggtggtggctacagcggagatagaagtgggggcggctatggtggagacagaagtgggggtggctatggtggggacagaggcggcggctatggtggggacagaggaggcggctatggaggagaccgaggaggtggctatggaggagacagaagccgggggggctatggaggagaccgtggtggtggcagtggctacggtggagaccgaagtggaggctatggaggagacaggagtggtggcggctatggaggagaccgaggtgggggctacggaggagaccgaggtggctatggaggcaaaatgggaggaagaaacgactacagaaatgatcagcgcaaccgaccatactgatgactgttttgaatgttcctttgtctctgacatgatccatagtgaaattgccagagttttgcctgctgctttcctcgtggcctcttcttgggtagtgaaattaagtgacatttggatttttatttgggtgggagggctgggacagtttttcttctagaaatgtctgttgagatttccccctttagtttccaaccttctccccaacccttggagctaaatgcgttgtaaaatattgccaaaatgaaaagtgttttgtaatactgcaataaaggctgcttgtttttgtggaacttttgtacatacta

SEQ ID NO: 74382 - DNA, 1105 bp, Homo sapiens
ctttggaaatatttttgaggtgctgacagccaaagcagtccaatacagaggaatggtgtatatcttggggtggtaaggatgttcaagtagatgtaatcctggggatgtcatagtgcatgtctttcccctttttggacctgattagttttaacagatgtctttttgtatataataatattgcttaaggtcttgagtctgtttaaagaatggattttcactgtttacatttgttcactgggttcttgtgaccctagcacacatgtagaatagtagtttgcaaatacgtagttattgtaaaaagtaaatactatttgtacaaatttcttgtttcatagtatttaacttgagttagtttttctttctgcagttctttacattttcttaccacatttcttctgtatgagctaaagtcagcctttgaaggaaccataattttaaataagatttaaaattctttttatgtgttctagattctggaagttacggtcagtctgggggtgagcagcaaagttattctacctatggaaatccaggcagccaaggctatggacaagcatcacaaagctattctggctatgggcaaacgactgattcctcttatggacagaactacagcggttactccagttatggacaaagtcagtcaggttattcacagtcctatggtggttatgagaatcaaaagcagagctcatatagccagcaaccatataataaccagggacagcagcaaaacatggaatcatcaggaagccaaggtggaagagcaccttcctatgaccagccagactatggtcaacaagattcatatgaccagcagtcaggctatgatcaacatcaaggctcatatgatgagcagtcaaattatgatcagcagcatgattcctatagtcaaaaccagcagtcctatcattcacaaagggaaaactacagccaccacacacaagatatgccctgcgtccaagcccaatatagcccttcccctccaggttccagttatgcggcgcagacatacagctcggaatacaccacggagatcatgaaccccgactacaccaagctgaccatggaccttggcagcactgagatcacggctacagccacc

SEQ ID NO: 74383 - DNA, 1988 bp, Homo sapiens
caacgatggtcctcagctgacactgtggggtctgtgctcactctggatggtgggcgtgagggttgagttaaattgtaggatgccgccgggcacagggctcatgcctgtaatcccagctactcgggaggctgaggcaggagaatggcgtgaacccaggaggcggaggttgcagtgagccgagatcgtgccactgtactctggcctgggagacagagcgagactccatctcaaaaaaaaaaaagagagagacctggagtagagattctgtcaaagaactttttctttcttgagaagcatctgaaatggaatctgttgtctcttcgaaatatgtactgctgtaacagtgaaacaaccctcagagtatgccttcgtgtgggctgctcgttgtggttttgaacttgggggaactgtctgtgtttgggtcaagaatatgcaactggctgggcacattggctcacgcctgtaatcccagcaatttgggaggctgaggcaggtggatcacctgaggtcagggcttcaagaccagactggccaacatggtgaaaccccgtctctactgaaaatacaaaaattagctgggcatggtggcaggtgcctgtaatcccagctactcgggaggctgacgtgagagaatcgcttgaacccgggagttggaggttgcagtgagccgagattgcaccattgcactccagcttgggcaacaagagtgaaactcttgtctcagaaaaaaaaaaaaaagtatgcaactagctgggggctgtgacgcgtacctgtagtcccagctacttaggaggctgaggtgggaggatcactgatgctcaggagttcgtgaccagactaggcaaaatagcaagacaccatctcaaaaaacaaacaaaaaaaccagctagttttcttatgcagggggtactctgccaataaagttgagtatgcttatattgtgtttctgttaaatatctctgctacttcaggaattctttatgtgtaaatgttttctgctttttctgggaattaaagcaaatttgttgtgtcaacatcttgactcagatgttcaagtacctttgtgtcttgatttgccttagcatgtagaaaagggacttgtaacattaatgcagatttgaaagaaagattgttaacctcaggcacatcttctgttaatatctaatagtactacttgaaggttattttctgtatttaataaattccttaaaaaggataattttctaataaggagagagaaaatgattgaaacgtttgaacttgaaagaaggctttgcataaaattacagatcatctagatcaatgcctaaaccaaatgtctagacattttagacttaaatgtgcatatgaattacttgggggatcttattaaatgcaggttcttattcagtaggtctagggtggggcctgagatcctgcttttctcagaaccttccaggctatgcttacgcttatattccatcatgttttgattagtaaggggacagacccttattttgttaaggagattgaagcttatggagaaccactgacatgtccagattttcaagattgattagttatagttaagactgtaccctgagtttcttgaagactagttctttttccagtgtactatggtatttccaaatttatggccatgtgttgaaatcttcagctgctttattttcaaaggaaatgcacagtaaagatgacgttcaaggccgggcgcagtgactcatgcctgtaatcccagtgctttgggaggccgagacgggcggatcatgaaggtcaggagattgagaccatcctggctaacacggtgaaaccccgtctctactaaaaatacaaaaacaaaaattagccgggcatggtggcgggcgcctgtagtcccagctactcgggaggctgaggcaggagaatggtgggaacccaggaggcggagcttgcagtgagccgagatcgcgccactgcactccagcctgggcgacagagcaagactccgtcgc

SEQ ID NO: 74384 - DNA, 1701 bp, Homo sapiens
ttgccaaagcgtagtacccaaaaaaataaaaaaaaaagaaactgaagctaagagaagtgaaacaaccctcagagtatgccttcgtgtgggctgctcgttgtggttttgaacttgggggaactgtctgtgtttgggtcaagaatatgcaactggctgggcacattggctcacgcctgtaatcccagcaatttgggaggctgaggcaggtggatcacctgaggtcagggcttcaagaccagactggccaacatggtgaaaccccgtctctactgaaaatacaaaaattagctgggcatggtggcaggtgcctgtaatcccagctactcgggaggctgacgtgagagaatcgcttgaacccgggagttggaggttgcagtgagccgagattgcaccattgcactccagcttgggcaacaagagtgaaactcttgtctcagaaaaaaaaaaaaaagtatgcaactagctgggggctgtgacgcgtacctgtagtcccagctacttaggaggctgaggtgggaggatcactgatgctcaggagttcgtgaccagactaggcaaaatagcaagacaccatctcaaaaaacaaacaaaaaaaccagctagttttcttatgcagggggtactctgccaataaagttgagtatgcttatattgtgtttctgttaaatatctctgctacttcaggaattctttatgtgtaaatgttttctgctttttctgggaattaaagcaaatttgttgtgtcaacatcttgactcagatgttcaagtacctttgtgtcttgatttgccttagcatgtagaaaagggacttgtaacattaatgcagatttgaaagaaagattgttaacctcaggcacatcttctgttaatatctaatagtactacttgaaggttattttctgtatttaataaattccttaaaaaggataattttctaataaggagagagaaaatgattgaaacgtttgaacttgaaagaaggctttgcataaaattacagatcatctagatcaatgcctaaaccaaatgtctagacattttagacttaaatgtgcatatgaattacttgggggatcttattaaatgcaggttcttattcagtaggtctagggtggggcctgagatcctgcttttctcagaaccttccaggctatgcttacgcttatattccatcatgttttgattagtaaggggacagacccttattttgttaaggagattgaagcttatggagaaccactgacatgtccagattttcaagattgattagttatagttaagactgtaccctgagtttcttgaagactagttctttttccagtgtactatggtatttccaaatttatggccatgtgttgaaatcttcagctgctttattttcaaaggaaatgcacagtaaagatgacgttcaaggccgggcgcagtgactcatgcctgtaatcccagtgctttgggaggccgagacgggcggatcatgaaggtcaggagattgagaccatcctggctaacacggtgaaaccccgtctctactaaaaatacaaaaacaaaaattagccgggcatggtggcgggcgcctgtagtcccagctactcgggaggctgaggcaggagaatggtgggaacccaggaggcggagcttgcagtgagccgagatcgcgccactgcactccagcctgggcgacagagcaagactccgtcgc

SEQ ID NO: 74385 - DNA, 817 bp, Homo sapiens
  misc_feature (8)..(8): n is a, c, g, or t
ttaaaagnggcggacggtccggaattcccgggtacagctccggccgccgcgccgcctggctttcgtattcgttgttctcggcgggctgtggggcctccgcgccgcggccgttagtcatgtcgggtaggtgacttcttcagcgagcagcggcagcgacgagaaggtcctggcggggttgggctgtcttcccgcccaccggagggccctgaggagaagcctccggccctgagggaggcttggggtgggggggcggccgctgccgccgccatgttgaactggaggcacgcacgctcccaatggctccccggctgcaaatcacggcgggagcgcctcgggcctcttgtcttttgaccctgtccttggaacccgaggagacttgccgttcccgggggagggtgtgtgtgagtcggggggcggaggccgtctacgccatcgtaggggcggggggagccgagattagagcatcagcctgagagaagcggtgcttctggttctccgctccgcctcggatctttcagcgaggcctcgggccagtcatctcgccgcctcgtacctcagttttcccatcctcgaagtggagctgggcctgcctgactcacccattcatcaggtgggggccttgacgctctgggagccctttcaaaggacgttgccttacacgaaatcgtacttatcgttattcactctgcagtaaccacctggatttgagttgggggtgtttgcatagtaatttagcttcctcttcaccctcctgccattcgtcttccccaccagtttatctcctgaaagagtttgaaagtgagccttgtctatctat

SEQ ID NO: 74386 - DNA, 838 bp, Homo sapiens
  misc_feature (8)..(8): n is a, c, g, or t
ttaaaagnggcggacggtccggaattcccgggtacagctccggccgccgcgccgcctggctttcgtattcgttgttctcggcgggctgtggggcctccgcgccgcggccgttagtcatgtcgggtaggtgacttcttcagcgagcagcggcagcgacgagaaggtcctggcggggttgggctgtcttcccgcccaccggagggccctgaggagaagcctccggccctgagggaggcttggggtgggggggcggccgctgccgccgccatgttgaactggaggcacgcacgctcccaatggctcctggctgcgctcccaacggtatccggctgcaaatcacggcgggagcgcctcgggcctcttgtcttttgaccctgtccttggaacccgaggagacttgccgttcccgggggagggtgtgtgtgagtcggggggcggaggccgtctacgccatcgtaggggcggggggagccgagattagagcatcagcctgagagaagcggtgcttctggttctccgctccgcctcggatctttcagcgaggcctcgggccagtcatctcgccgcctcgtacctcagttttcccatcctcgaagtggagctgggcctgcctgactcacccattcatcaggtgggggccttgacgctctgggagccctttcaaaggacgttgccttacacgaaatcgtacttatcgttattcactctgcagtaaccacctggatttgagttgggggtgtttgcatagtaatttagcttcctcttcaccctcctgccattcgtcttccccaccagtttatctcctgaaagagtttgaaagtgagccttgtctatctat

SEQ ID NO: 74387 - DNA, 262 bp, Homo sapiens
ttaaatccattgagtcacttaaatgtggaattaatgttggtcttttcctcacactcagaaaattgtattctggatttagtagtctgaaaacccaagcacagcatgggtttttaagctaacctttctccatttttagccaagtcctttctctctagttagtgaaattttctaagaatagagattcctgcattgtccttttacttcttggcagttttagtccataaatagatatagttaggtttttattttatttttattattt

SEQ ID NO: 74388 - DNA, 458 bp, Homo sapiens
caggactcttaacatcagtttcagccaacttgctacagcaaatgtaatcttcctatgaagtctcttaagttctccatttctatttagccaaggtggaagagcaccttcctatgaccagccagactatggtcaacaagattcatatgaccagcagtcaggctatgatcaacatcaaggctcatatgatgagcagtcaaattatgatcagcagcatgattcctatagtcaaaaccagcagtcctatcattcacaaagggaaaactacagccaccacacacaaggtaagatttactgacctctattattatttttccccctctcagaattatttgtatgaatttctgattaaaagaaccacagaggatttcacctgtttgtaaaaatttagggtaaccttgaagatatgttccctctcatggtaatcaaaactagtttatcagatttctacttctgaactt

SEQ ID NO: 74389 - DNA, 842 bp, Homo sapiens
cctgaggagactcggtgctccccacagaactccccagcgatcccagatgggagaagctgagctgcgcgggcgctgccctcactccgggggtgaaacgtggctgtgatttccacaggtgacagaaaccaggcagtgattcaactcgtatttgactttcacattctccagcaatgttcttcaatctgggaagggtagaaaattaaagaaaggtaaggagagttaaaaaatgagatcatttcaaagtagatgcagtcttgaagcccaaatgaattacgagatccagtttgaaagctgctgcagaagtgatttcagaatcgcgcggtggctccggaatggggaactgctgctgaaagaggtcggaaagggtggggactgaatttcgggtaagaggacgccagtggttctggagcacgcggccttcagccatgcctgcgttcacaagtacattatttcagactcactccaagtttacatctctaagcccatccaagccatggcagcgcgaacctctccctcccccagctcaaggcctctgggcccccaggacagaggacagaagagccagcccctcctggctcagggttgccgggaccccgtgatggctgctgtgcctctcctgaggtgccaggtgagagctgagacttctgctcccgctgcaccagctccgtttgtctccaggcgcagtgtcagtctcgttctttaagcgcttctgaggtcccatcagcacaggtctcgtcttacctggaaaggcttgttgccttgtgcctgggactttttattctgtgcttttcttctggatattaaatttcatatccacgcttgcttgtcactcagaccttatt

SEQ ID NO: 74390 - DNA, 7135 bp, Homo sapiens
  misc_feature (13)..(13): n is a, c, g, or t
  misc_feature (15)..(15): n is a, c, g, or t
gccgccccgcggncnaaagtcgagccctcccgcccgtgggcgagcgcgccagccgccccttccagaacagccgccgccacaaagaagaacggggggtgccgaggtccccatgacctcctaaagtggtgcggtccctgctgagtgcgctgcccgggccgtgacccgcgcccctgtgcgtccccgcgcgcctccgagcgcccctgtgcgccccggcccgcgccccgccggcatggacgtccatacccgctggaaagcgcgcagcgcgctccgcccgggcgccccgctgctgcccccgctgctgctgctgctgctgtgggcgccgcctccgagccgcgcagctcagccagcagatctcctgaaggttctagattttcacaacttgcctgatggaataacaaagacaacaggcttttgcgccacgcggcgatcttccaaaggcccggatgtcgcttacagagtcaccaaagacgcgcagctcagcgcacccaccaagcagctgtaccctgcgtctgcatttcccgaggacttctccatcctaacaactgtgaaagccaagaaaggcagccaggccttcctggtctccatctacaacgagcagggtatccagcagattgggctggagctgggccgctctcccgtcttcctctacgaggaccacacggggaagcctggcccggaagactaccccctcttccggggcatcaacctgtcagatggcaagtggcacagaattgctctcagcgtccacaagaaaaatgtcaccttgatcctcgactgtaaaaagaagaccaccaaattcctcgaccgcagcgaccaccccatgatcgacatcaatggcatcatcgtgtttggcacccggatcctggatgaggaggtgtttgagggtgacatccagcagctgctctttgtctcggaccaccgggcagcttatgattactgtgagcactacagccctgactgtgacaccgcagtacctgacaccccacagtcgcaggaccccaatccagatgaatattacacggaaggagacggcgagggtgagacctattactacgaatacccctactacgaagaccccgaagacctagggaaggagcccacccccagcaagaagcccgtggaagctgccaaagaaaccacagaggtccccgaggagctgaccccgacccccacggaagctgctcccatgcctgaaaccagtgaaggggctgggaaggaagaggacgtcggcatcggggactatgactacgtgcccagtgaggactactacacgccctcaccgtatgatgacctcacctatggcgagggggaggagaaccccgaccagcccacagacccaggcgctggggccgaaattcccaccagcaccgccgacacctccaactcctccaatccagctccgcctccaggggaaggtgcggatgacttggagggggagttcactgaggaaacgatccggaaccttgacgagaactactacgacccctactacgaccccaccagctccccgtcggagatcgggccgggaatgccggcgaaccaggataccatctatgaagggattggaggacctcggggcgagaaaggccaaaagggagaaccagcgattatcgagccgggcatgctcatcgagggcccgcctggcccagaaggccccgcgggtcttcccggacctccaggaaccatgggtcccactggccaagtcggggaccctggagaaaggggcccccctggacgcccaggccttcctggggccgatggcctgcccggtcctccaggaaccatgctcatgctgcccttccggtttggaggtggcggcgatgcgggctccaaaggccccatggtctcagcccaggagtcccaggcgcaagccattctccagcaggccaggttggcactgaggggaccagctggcccgatgggtctcacagggagacctggccctgtgggtccccctgggagcggaggtttgaagggcgagccgggagacgtggggcctcagggtcctcgaggtgtgcaaggcccgcctggtccggccgggaagcccggaagacggggtcgggctgggagtgatggagccagaggaatgcctggacaaactggccccaagggtgaccggggtttcgacggcctggctgggttgccaggcgagaagggccacaggggtgaccctggtccttccggcccaccaggacctccgggagacgatggagaaaggggtgacgacggagaagttgggcccagggggctgcctgggaagcccgggccacgtggtctgcttgggccgaaagggcccccaggtcctcccggacctcccggtgtcacgggtatggacggccagccggggccaaaaggaaatgtgggtccccagggagagcctggccccccaggacagcagggtaatccaggcgcccagggtcttccaggcccccagggtgcaattggtcctccaggagaaaagggtcccttggggaaaccaggccttccaggaatgcccggtgctgacggacccccgggacaccctggcaaagaaggccctccaggagagaaaggaggtcagggtccacctggcccccagggtccgattggctacccaggtcctcgaggagtcaagggggccgatggcatccgtggtctgaagggcacaaagggcgagaagggtgaagacggctttcctgggtttaaaggagacatgggcatcaagggtgatcggggggagatcggcccacccggtcccaggggagaagatggccctgaaggcccaaagggtcgcggaggtcccaatggtgaccccggtcctctgggaccccctggggagaagggaaaactcggagtcccagggttaccagggtatccaggaagacaaggaccaaagggctctattggattccctggatttcctggcgccaatggagagaagggcggcagggggacccctggaaagccaggaccgcgggggcagcgaggcccaacgggtccgaggggtgaaagaggcccccggggcatcactgggaagcctggccccaagggcaactccggaggtgacggcccagctggccctcctggtgaacggggacccaatggaccccaaggacccacaggatttcctggaccaaagggcccccctggccctccaggcaaggatggactcccaggacaccctggacagagaggcgagactggtttccaaggcaagaccggccctccaggcccccccggcgtggtcggccctcagggtcccacgggagaaacgggcccaatgggtgagcgtggccaccctgggccccctggaccccccggtgaacaggggcttccgggccttgctggaaaagaagggacgaagggtgacccaggccctgcaggcctccctgggaaagatggccctccaggattacgtggtttccctggggaccgagggcttcctggtccagtgggagctcttggactgaaaggcaatgaagggccccctggcccaccaggccctgcgggatctccaggggagagaggtccagctggagccgctgggcccatcggaattccagggagacctgggccccagggacccccagggccggcaggagagaaaggggctcctggcgagaaaggcccacaaggcccagctggccgagacggtctccaggggcctgtggggctcccgggtccagctggccctgtgggtccccctggagaagacggagataagggagagatcggggagccggggcagaaaggaagcaagggggacaaaggagaacagggtcctcctgggcctacaggtcctcaaggccccatcggacagccaggcccctctggagctgacggcgagccggggcctcggggccagcagggccttttcgggcagaaaggtgatgaaggtcccagaggctttcctggaccccctgggccagtggggctgcagggtttgccaggacctccaggcgagaagggtgagacaggagacgtgggccagatgggccccccgggtccccctggcccccgaggaccctccggagctccaggtgctgatggcccacaaggtcccccaggtggaataggaaaccctggtgcagtgggagagaagggcgagcctggcgaagcaggtgagcctggccttccgggagaaggcggccccccgggacccaaaggagaaaggggagagaagggcgagtcaggcccttcaggtgctgccggaccccctggacccaaaggccctcccggagatgatggtcccaaaggcagccctggcccagtgggttttcctggagatcctggcccccccggagagcctggccccgcgggtcaagatggtccccctggtgacaaaggagatgatggtgaacccgggcagacgggatcccccggccctactggtgaaccaggtccatcggggcctccaggaaaaaggggtcccccaggccccgcaggccccgaaggcagacagggagagaaaggggccaagggagaagccggcttggaaggccctcctgggaagactggccccatcggcccccagggggcccctgggaagcccggaccggatggccttcgagggatccctggccctgtgggagaacaaggtctcccaggatccccaggcccggacggtccccccggccccatgggtcccccaggacttcccggcctcaaaggagattctggtcccaaaggtgaaaagggtcatccaggcctgatcgggctcatcggtcctccgggtgaacagggtgagaagggcgaccgtggtctccctggcccccagggctcctccggtcctaagggagaacagggtatcactggtccttctggcccgattgggcctcctgggccccctggcctgccgggtccgcctggtccaaaaggtgctaagggctcctcgggtccaactggcccgaagggtgaggcaggccacccaggacccccaggccccccgggccccccgggagaggtcatccagcccctgccaatccaggcatccaggacgcggcggaacatcgacgccagccagctgctggacgacgggaatggcgagaactacgtggactacgcggacggcatggaagagatcttcggctctctcaactctctgaagctggagattgagcagatgaaacggcccctgggcacgcagcagaaccccgcccgcacctgcaaggacctgcagctctgccaccccgacttcccagatggtgaatactgggtcgatcctaaccaaggatgctccagggattccttcaaggtttactgcaacttcacagccggggggtcgacatgcgtcttccctgacaagaagtccgaaggggccagaatcacttcttggcccaaagaaaacccgggctcctggttcagtgaattcaagcgtgggaaactgctctcctatgtggacgccgagggcaaccctgtgggtgtggtacagatgaccttcctgcggctgctgagcgcctctgcccaccagaacgtcacctaccactgctaccagtcagtggcctggcaggacgcagccacgggcagctacgacaaggccctccgcttcctgggctccaacgacgaggagatgtcctatgacaacaacccctacatccgcgccctggtggacggctgtgctaccaagaaaggctaccagaagacggttctggagatcgacacccccaaagtggagcaggtgcccatcgtggacatcatgttcaatgacttcggtgaagcgtcacagaaatttggatttgaagtggggccggcttgcttcatgggctaggagccgccgagcccgggctcccgagagcaacctcgtgacctcagcatgccattcgttcgtgagtgtcccgtgcacgtcctgatcctggacagtgaaggcttctccctcccctcccacctgacttcatctacgcctcggcaccacggggtgtgggaccccagcccggagagaacagagggaaggagccgcgcccccacctggagctgaatcacatgacctagctgcaccccagcgcctgggcccgccccacgctctgtccacacccacgcgccccgggagcggggccatgcctccagccccccagctcgcccgacccatcctgttcgtgaataggtctcaggggttgggggagggactgccagatttggacactatatttttttctaaattcaacttgaagatgtgtatttcccctgaccttcaaaaaatgttccaaggtaagcctcgtaaaggtcatcccaccatcaccaaagcctccgtttttaacaacctccaacacgatccatttagaggccaaatgtcattctgcaggtgccttcccgatggattaaaggtgcttatgtttttgtgagttttaagtaaatatggaatttaagatgaagacagtaatataatattttggtacaaaaacagctgcaggaagaggtggaggggggcctgtcattatgtttcccccccaccccccaacgaaaggaaaactaagactcccaacataaacagggccttgaagggggggattacaggcacttgggcatggagtcttcggctgcaggaagcactccgcttattcttcaggaatgggaaaggcgtgacccaacgagagcatctgtctcagagctccactcagggtcacccctctccagaggccggtatggggtggcttcagacttccactgcacgacctggagcaccaagaccacacaccacaataccaaattcacccaagaagaggtctaattgtagtgttcaaggagatgatggagttgcagagagacctggtgccaaatcgaaggatacaggcagacaccaagaccaggaagacggctatagctgagatggccagtgcaatgcgcagccctatagcacctctgtgggagtcctcgatgcagctgctgtagatccagaagagcaaaagcaggaggcagtagagggccaagaggccagaggccccagctacaaagtagcacagggatggtgctgagggacgggataaggccagggaggagccattcagggtggccacaccatacaggggacatctaccactgaaggagccctgggtccgagtcatcgccgcggccgccacggccccgcacaggaaggcggcagcaaagagcgcaagctcgacgcgctgcagccaggacagcgccatggcgccctgaccaccag

SEQ ID NO: 74391 - DNA, 502 bp, Homo sapiens
  misc_feature (16)..(16): n is a, c, g, or t
gaattcaagcttctancgatgtagtcatgtgattctgttttcatttctcatcccatccaatttgtccttttctcctgtcattttcttcctctgtggtcccttcaaagttgttataatttgtactgaacttcaaaatgtgtcccgttctccccagaccactctagccacagtatattgcaataaaattacttcttatatttgcagaaaaatcttttggtgtaattttattttttcctctcaatatatataattggacaaacgctggcaaaaagaaaaaaatggtaagcaaaaaacccaagataaagtttcgaggacatcaggccttttgaaatacaatgtcaaatgacacattgtacgttttcaaaaaatccgctagacatgtcataagttttaactgtaatgcccaggaaaggatatcttaaaatattctaaacttgtgtaacaaaggaataattaactgtaatagtttttcaataaatcgagttgggtgtttccaccgtaa

SEQ ID NO: 74392 - DNA, 327 bp, Homo sapiens
  misc_feature (16)..(16): n is a, c, g, or t
gaattcaagcttctancgatgtaggccatgcctccagccccccagctcgcccgacccatcctgttcgtgaataggtctcaggggttgggggagggactgccagatttggacactatatttttttctaaattcaacttgaagatgtgtatttcccctgaccttcaaaaaatgttccaaggtaagcctcgtaaaggtcatcccaccatcaccaaagcctccgtttttaacaacctccaacacgatccatttagaggccaaatgtcattctgcaggtgccttcccgatggattaaaggtgcttatgtttttgtgagttttaagtaaatat

SEQ ID NO: 74393 - DNA, 7989 bp, Homo sapiens
  misc_feature (13)..(13): n is a, c, g, or t
  misc_feature (15)..(15): n is a, c, g, or t
gccgccccgcggncnaaagtcgagccctcccgcccgtgggcgagcgcgccagccgccccttccagaacagccgccgccacaaagaagaacggggggtgccgaggtccccatgacctcctaaagtggtgcggtccctgctgagtgcgctgcccgggccgtgacccgcgcccctgtgcgtccccgcgcgcctccgagcgcccctgtgcgccccggcccgcgccccgccggcatggacgtccatacccgctggaaagcgcgcagcgcgctccgcccgggcgccccgctgctgcccccgctgctgctgctgctgctgtgggcgccgcctccgagccgcgcagctcagccagcagatctcctgaaggttctagattttcacaacttgcctgatggaataacaaagacaacaggcttttgcgccacgcggcgatcttccaaaggcccggatgtcgcttacagagtcaccaaagacgcgcagctcagcgcacccaccaagcagctgtaccctgcgtctgcatttcccgaggacttctccatcctaacaactgtgaaagccaagaaaggcagccaggccttcctggtctccatctacaacgagcagggtatccagcagattgggctggagctgggccgctctcccgtcttcctctacgaggaccacacggggaagcctggcccggaagactaccccctcttccggggcatcaacctgtcagatggcaagtggcacagaattgctctcagcgtccacaagaaaaatgtcaccttgatcctcgactgtaaaaagaagaccaccaaattcctcgaccgcagcgaccaccccatgatcgacatcaatggcatcatcgtgtttggcacccggatcctggatgaggaggtgtttgagggtgacatccagcagctgctctttgtctcggaccaccgggcagcttatgattactgtgagcactacagccctgactgtgacaccgcagtacctgacaccccacagtcgcaggaccccaatccagatgaatattacacggaaggagacggcgagggtgagacctattactacgaatacccctactacgaagaccccgaagacctagggaaggagcccacccccagcaagaagcccgtggaagctgccaaagaaaccacagaggtccccgaggagctgaccccgacccccacggaagctgctcccatgcctgaaaccagtgaaggggctgggaaggaagaggacgtcggcatcggggactatgactacgtgcccagtgaggactactacacgccctcaccgtatgatgacctcacctatggcgagggggaggagaaccccgaccagcccacagacccaggcgctggggccgaaattcccaccagcaccgccgacacctccaactcctccaatccagctccgcctccaggggaaggtgcggatgacttggagggggagttcactgaggaaacgatccggaaccttgacgagaactactacgacccctactacgaccccaccagctccccgtcggagatcgggccgggaatgccggcgaaccaggataccatctatgaagggattggaggacctcggggcgagaaaggccaaaagggagaaccagcgattatcgagccgggcatgctcatcgagggcccgcctggcccagaaggccccgcgggtcttcccggacctccaggaaccatgggtcccactggccaagtcggggaccctggagaaaggggcccccctggacgcccaggccttcctggggccgatggcctgcccggtcctccaggaaccatgctcatgctgcccttccggtttggaggtggcggcgatgcgggctccaaaggccccatggtctcagcccaggagtcccaggcgcaagccattctccagcaggccaggttggcactgaggggaccagctggcccgatgggtctcacagggagacctggccctgtgggtccccctgggagcggaggtttgaagggcgagccgggagacgtggggcctcagggtcctcgaggtgtgcaaggcccgcctggtccggccgggaagcccggaagacggggtcgggctgggagtgatggagccagaggaatgcctggacaaactggccccaagggtgaccggggtttcgacggcctggctgggttgccaggcgagaagggccacaggggtgaccctggtccttccggcccaccaggacctccgggagacgatggagaaaggggtgacgacggagaagttgggcccagggggctgcctgggaagcccgggccacgtggtctgcttgggccgaaagggcccccaggtcctcccggacctcccggtgtcacgggtatggacggccagccggggccaaaaggaaatgtgggtccccagggagagcctggccccccaggacagcagggtaatccaggcgcccagggtcttccaggcccccagggtgcaattggtcctccaggagaaaagggtcccttggggaaaccaggccttccaggaatgcccggtgctgacggacccccgggacaccctggcaaagaaggccctccaggagagaaaggaggtcagggtccacctggcccccagggtccgattggctacccaggtcctcgaggagtcaagggggccgatggcatccgtggtctgaagggcacaaagggcgagaagggtgaagacggctttcctgggtttaaaggagacatgggcatcaagggtgatcggggggagatcggcccacccggtcccaggggagaagatggccctgaaggcccaaagggtcgcggaggtcccaatggtgaccccggtcctctgggaccccctggggagaagggaaaactcggagtcccagggttaccagggtatccaggaagacaaggaccaaagggctctattggattccctggatttcctggcgccaatggagagaagggcggcagggggacccctggaaagccaggaccgcgggggcagcgaggcccaacgggtccgaggggtgaaagaggcccccggggcatcactgggaagcctggccccaagggcaactccggaggtgacggcccagctggccctcctggtgaacggggacccaatggaccccaaggacccacaggatttcctggaccaaagggcccccctggccctccaggcaaggatggactcccaggacaccctggacagagaggcgagactggtttccaaggcaagaccggccctccaggcccccccggcgtggtcggccctcagggtcccacgggagaaacgggcccaatgggtgagcgtggccaccctgggccccctggaccccccggtgaacaggggcttccgggccttgctggaaaagaagggacgaagggtgacccaggccctgcaggcctccctgggaaagatggccctccaggattacgtggtttccctggggaccgagggcttcctggtccagtgggagctcttggactgaaaggcaatgaagggccccctggcccaccaggccctgcgggatctccaggggagagaggtccagctggagccgctgggcccatcggaattccagggagacctgggccccagggacccccagggccggcaggagagaaaggggctcctggcgagaaaggcccacaaggcccagctggccgagacggtctccaggggcctgtggggctcccgggtccagctggccctgtgggtccccctggagaagacggagataagggagagatcggggagccggggcagaaaggaagcaagggggacaaaggagaacagggtcctcctgggcctacaggtcctcaaggccccatcggacagccaggcccctctggagctgacggcgagccggggcctcggggccagcagggccttttcgggcagaaaggtgatgaaggtcccagaggctttcctggaccccctgggccagtggggctgcagggtttgccaggacctccaggcgagaagggtgagacaggagacgtgggccagatgggccccccgggtccccctggcccccgaggaccctccggagctccaggtgctgatggcccacaaggtcccccaggtggaataggaaaccctggtgcagtgggagagaagggcgagcctggcgaagcaggtgagcctggccttccgggagaaggcggccccccgggacccaaaggagaaaggggagagaagggcgagtcaggcccttcaggtgctgccggaccccctggacccaaaggccctcccggagatgatggtcccaaaggcagccctggcccagtgggttttcctggagatcctggcccccccggagagcctggccccgcgggtcaagatggtccccctggtgacaaaggagatgatggtgaacccgggcagacgggatcccccggccctactggtgaaccaggtccatcggggcctccaggaaaaaggggtcccccaggccccgcaggccccgaaggcagacagggagagaaaggggccaagggagaagccggcttggaaggccctcctgggaagactggccccatcggcccccagggggcccctgggaagcccggaccggatggccttcgagggatccctggccctgtgggagaacaaggtctcccaggatccccaggcccggacggtccccccggccccatgggtcccccaggacttcccggcctcaaaggagattctggtcccaaaggtgaaaagggtcatccaggcctgatcgggctcatcggtcctccgggtgaacagggtgagaagggcgaccgtggtctccctggcccccagggctcctccggtcctaagggagaacagggtatcactggtccttctggcccgattgggcctcctgggccccctggcctgccgggtccgcctggtccaaaaggtgctaagggctcctcgggtccaactggcccgaagggtgaggcaggccacccaggacccccaggccccccgggccccccgggagaggtcatccagcccctgccaatccaggcatccaggacgcggcggaacatcgacgccagccagctgctggacgacgggaatggcgagaactacgtggactacgcggacggcatggaagagatcttcggctctctcaactctctgaagctggagattgagcagatgaaacggcccctgggcacgcagcagaaccccgcccgcacctgcaaggacctgcagctctgccaccccgacttcccagatggtgaatactgggtcgatcctaaccaaggatgctccagggattccttcaaggtttactgcaacttcacagccggggggtcgacatgcgtcttccctgacaagaagtccgaaggggccagaatcacttcttggcccaaagaaaacccgggctcctggttcagtgaattcaagcgtgggaaactgctctcctatgtggacgccgagggcaaccctgtgggtgtggtacagatgaccttcctgcggctgctgagcgcctctgcccaccagaacgtcacctaccactgctaccagtcagtggcctggcaggacgcagccacgggcagctacgacaaggccctccgcttcctgggctccaacgacgaggagatgtcctatgacaacaacccctacatccgcgccctggtggacggctgtgctaccaagaaaggctaccagaagacggttctggagatcgacacccccaaagtggagcaggtgcccatcgtggacatcatgttcaatgacttcggtgaagcgtcacagaaatttggatttgaagtggggccggcttgcttcatgggctaggagccgccgagcccgggctcccgagagcaacctcgtgacctcagcatgccattcgttcgtgagtgtcccgtgcacgtcctgatcctggacagtgaaggcttctccctcccctcccacctgacttcatctacgcctcggcaccacggggtgtgggaccccagcccggagagaacagagggaaggagccgcgcccccacctggagctgaatcacatgacctagctgcaccccagcgcctgggcccgccccacgctctgtccacacccacgcgccccgggagcggggccatgcctccagccccccagctcgcccgacccatcctgttcgtgaataggtctcaggggttgggggagggactgccagatttggacactatatttttttctaaattcaacttgaagatgtgtatttcccctgaccttcaaaaaatgttccaaggtaagcctcgtaaaggtcatcccaccatcaccaaagcctccgtttttaacaacctccaacacgatccatttagaggccaaatgtcattctgcaggtgccttcccgatggattaaaggtgcttatgtttttgtgagttttaagtaaatatttgtattgtattgttataaatgttaagtgtgcctggctttcaatcatgcacggaaacccagtctcagtcccacggacagaatgggcgaggcatggattctgggttgcagtaccgttctgattagaaataggaagtctccccacccccgccctggccaagaacgtgcaataaattggaagtttgccccggggcagcaagaatttatgctgccattgaaaagcaggtaccagtgccccttttcagacagtttttgattcgctctagactttttttttttttaatagggagggaaaaaatttgataattttcttttttctacatgcacttaagactaaaacacaggtttggattaattttatttgcttcctttttccgcttttcttcccgcagagcctgatgggagaatgtccagggcagggaaaccacattttttgtaggtgataactcaatgaaaattggtgcttattttttacacttctctcttgtggctctcttgtggtgctatctgttttaaggtctccttgaaggcgcactggggtccctggccatgcctcgttctccctgctttctttatcctgttattgcctccacagtctgttgccaaggactctaagatcaatgcacgtcactttcctttccactgggcaggatagccaagcacactccctcctgcgctctcccgccccggtgcgtccactcccgagggctgttatgaggactgggttgtgcctacttgatttgaaaacacacacaagcaataaaaagcctcttcctgcattgtctgtggtgtgaccatagcagattatatttggttcctgaatgtttgtggtgctaatttctgtgtttgttccaagccgttcagtcatgccatgcgctgcctcggtagatggagtaatgtacaatgaactccatgagtctctccagggctgcctgcagcacgtcttttccaagtagcctatttggattcccatctcaaatgtcctggatgcgagcgtcagcggctccagagctcggggcgggtgaggtcccctttggggaaccctttcctggccatcgaggtcggggggctgccgtctgtgggcaggaggacccgaggggcagccaggaaaggcgatctcttcactgtgaaaagttgcccgggtgcagcgccttttccttctaccatgggaaatgcaggctgggcccttggggtgagcctgcggggctctggtgctgtccccgacccccaccaccaccagaatgcagttccagcttaggaagccacaaacaagccacccaggaggaacaaaacaccgccagcgtggattttccaaatttccctggaaagtaagtctcgctcttgccaaagaaaagtctggcttggagagtctctggagcccaggatgccagcatgtgccaatgactgtcaccttcatctcttcaaaagaaaagccatagccgaggactgtcccgcgacccccgtggactgcgtctaggtcatgtgattctgttttcatttctcatcccatccaatttgtccttttctcctgtcattttcttcctctgtggtcccttcaaagttgttataatttgtactgaacttcaaaatgtgtcccgttctccccagaccactctagccacagtatattgcaataaaattacttcttatatttgcaga

SEQ ID NO: 74394 - DNA, 8286 bp, Homo sapiens
  misc_feature (13)..(13): n is a, c, g, or t
  misc_feature (15)..(15): n is a, c, g, or t
gccgccccgcggncnaaagtcgagccctcccgcccgtgggcgagcgcgccagccgccccttccagaacagccgccgccacaaagaagaacggggggtgccgaggtccccatgacctcctaaagtggtgcggtccctgctgagtgcgctgcccgggccgtgacccgcgcccctgtgcgtccccgcgcgcctccgagcgcccctgtgcgccccggcccgcgccccgccggcatggacgtccatacccgctggaaagcgcgcagcgcgctccgcccgggcgccccgctgctgcccccgctgctgctgctgctgctgtgggcgccgcctccgagccgcgcagctcagccagcagatctcctgaaggttctagattttcacaacttgcctgatggaataacaaagacaacaggcttttgcgccacgcggcgatcttccaaaggcccggatgtcgcttacagagtcaccaaagacgcgcagctcagcgcacccaccaagcagctgtaccctgcgtctgcatttcccgaggacttctccatcctaacaactgtgaaagccaagaaaggcagccaggccttcctggtctccatctacaacgagcagggtatccagcagattgggctggagctgggccgctctcccgtcttcctctacgaggaccacacggggaagcctggcccggaagactaccccctcttccggggcatcaacctgtcagatggcaagtggcacagaattgctctcagcgtccacaagaaaaatgtcaccttgatcctcgactgtaaaaagaagaccaccaaattcctcgaccgcagcgaccaccccatgatcgacatcaatggcatcatcgtgtttggcacccggatcctggatgaggaggtgtttgagggtgacatccagcagctgctctttgtctcggaccaccgggcagcttatgattactgtgagcactacagccctgactgtgacaccgcagtacctgacaccccacagtcgcaggaccccaatccagatgaatattacacggaaggagacggcgagggtgagacctattactacgaatacccctactacgaagaccccgaagacctagggaaggagcccacccccagcaagaagcccgtggaagctgccaaagaaaccacagaggtccccgaggagctgaccccgacccccacggaagctgctcccatgcctgaaaccagtgaaggggctgggaaggaagaggacgtcggcatcggggactatgactacgtgcccagtgaggactactacacgccctcaccgtatgatgacctcacctatggcgagggggaggagaaccccgaccagcccacagacccaggcgctggggccgaaattcccaccagcaccgccgacacctccaactcctccaatccagctccgcctccaggggaaggtgcggatgacttggagggggagttcactgaggaaacgatccggaaccttgacgagaactactacgacccctactacgaccccaccagctccccgtcggagatcgggccgggaatgccggcgaaccaggataccatctatgaagggattggaggacctcggggcgagaaaggccaaaagggagaaccagcgattatcgagccgggcatgctcatcgagggcccgcctggcccagaaggccccgcgggtcttcccggacctccaggaaccatgggtcccactggccaagtcggggaccctggagaaaggggcccccctggacgcccaggccttcctggggccgatggcctgcccggtcctccaggaaccatgctcatgctgcccttccggtttggaggtggcggcgatgcgggctccaaaggccccatggtctcagcccaggagtcccaggcgcaagccattctccagcaggccaggttggcactgaggggaccagctggcccgatgggtctcacagggagacctggccctgtgggtccccctgggagcggaggtttgaagggcgagccgggagacgtggggcctcagggtcctcgaggtgtgcaaggcccgcctggtccggccgggaagcccggaagacggggtcgggctgggagtgatggagccagaggaatgcctggacaaactggccccaagggtgaccggggtttcgacggcctggctgggttgccaggcgagaagggccacaggggtgaccctggtccttccggcccaccaggacctccgggagacgatggagaaaggggtgacgacggagaagttgggcccagggggctgcctgggaagcccgggccacgtggtctgcttgggccgaaagggcccccaggtcctcccggacctcccggtgtcacgggtatggacggccagccggggccaaaaggaaatgtgggtccccagggagagcctggccccccaggacagcagggtaatccaggcgcccagggtcttccaggcccccagggtgcaattggtcctccaggagaaaagggtcccttggggaaaccaggccttccaggaatgcccggtgctgacggacccccgggacaccctggcaaagaaggccctccaggagagaaaggaggtcagggtccacctggcccccagggtccgattggctacccaggtcctcgaggagtcaagggggccgatggcatccgtggtctgaagggcacaaagggcgagaagggtgaagacggctttcctgggtttaaaggagacatgggcatcaagggtgatcggggggagatcggcccacccggtcccaggggagaagatggccctgaaggcccaaagggtcgcggaggtcccaatggtgaccccggtcctctgggaccccctggggagaagggaaaactcggagtcccagggttaccagggtatccaggaagacaaggaccaaagggctctattggattccctggatttcctggcgccaatggagagaagggcggcagggggacccctggaaagccaggaccgcgggggcagcgaggcccaacgggtccgaggggtgaaagaggcccccggggcatcactgggaagcctggccccaagggcaactccggaggtgacggcccagctggccctcctggtgaacggggacccaatggaccccaaggacccacaggatttcctggaccaaagggcccccctggccctccaggcaaggatggactcccaggacaccctggacagagaggcgagactggtttccaaggcaagaccggccctccaggcccccccggcgtggtcggccctcagggtcccacgggagaaacgggcccaatgggtgagcgtggccaccctgggccccctggaccccccggtgaacaggggcttccgggccttgctggaaaagaagggacgaagggtgacccaggccctgcaggcctccctgggaaagatggccctccaggattacgtggtttccctggggaccgagggcttcctggtccagtgggagctcttggactgaaaggcaatgaagggccccctggcccaccaggccctgcgggatctccaggggagagaggtccagctggagccgctgggcccatcggaattccagggagacctgggccccagggacccccagggccggcaggagagaaaggggctcctggcgagaaaggcccacaaggcccagctggccgagacggtctccaggggcctgtggggctcccgggtccagctggccctgtgggtccccctggagaagacggagataagggagagatcggggagccggggcagaaaggaagcaagggggacaaaggagaacagggtcctcctgggcctacaggtcctcaaggccccatcggacagccaggcccctctggagctgacggcgagccggggcctcggggccagcagggccttttcgggcagaaaggtgatgaaggtcccagaggctttcctggaccccctgggccagtggggctgcagggtttgccaggacctccaggcgagaagggtgagacaggagacgtgggccagatgggccccccgggtccccctggcccccgaggaccctccggagctccaggtgctgatggcccacaaggtcccccaggtggaataggaaaccctggtgcagtgggagagaagggcgagcctggcgaagcaggtgagcctggccttccgggagaaggcggccccccgggacccaaaggagaaaggggagagaagggcgagtcaggcccttcaggtgctgccggaccccctggacccaaaggccctcccggagatgatggtcccaaaggcagccctggcccagtgggttttcctggagatcctggcccccccggagagcctggccccgcgggtcaagatggtccccctggtgacaaaggagatgatggtgaacccgggcagacgggatcccccggccctactggtgaaccaggtccatcggggcctccaggaaaaaggggtcccccaggccccgcaggccccgaaggcagacagggagagaaaggggccaagggagaagccggcttggaaggccctcctgggaagactggccccatcggcccccagggggcccctgggaagcccggaccggatggccttcgagggatccctggccctgtgggagaacaaggtctcccaggatccccaggcccggacggtccccccggccccatgggtcccccaggacttcccggcctcaaaggagattctggtcccaaaggtgaaaagggtcatccaggcctgatcgggctcatcggtcctccgggtgaacagggtgagaagggcgaccgtggtctccctggcccccagggctcctccggtcctaagggagaacagggtatcactggtccttctggcccgattgggcctcctgggccccctggcctgccgggtccgcctggtccaaaaggtgctaagggctcctcgggtccaactggcccgaagggtgaggcaggccacccaggacccccaggccccccgggccccccgggagaggtcatccagcccctgccaatccaggcatccaggacgcggcggaacatcgacgccagccagctgctggacgacgggaatggcgagaactacgtggactacgcggacggcatggaagagatcttcggctctctcaactctctgaagctggagattgagcagatgaaacggcccctgggcacgcagcagaaccccgcccgcacctgcaaggacctgcagctctgccaccccgacttcccagatggtgaatactgggtcgatcctaaccaaggatgctccagggattccttcaaggtttactgcaacttcacagccggggggtcgacatgcgtcttccctgacaagaagtccgaaggggccagaatcacttcttggcccaaagaaaacccgggctcctggttcagtgaattcaagcgtgggaaactgctctcctatgtggacgccgagggcaaccctgtgggtgtggtacagatgaccttcctgcggctgctgagcgcctctgcccaccagaacgtcacctaccactgctaccagtcagtggcctggcaggacgcagccacgggcagctacgacaaggccctccgcttcctgggctccaacgacgaggagatgtcctatgacaacaacccctacatccgcgccctggtggacggctgtgctaccaagaaaggctaccagaagacggttctggagatcgacacccccaaagtggagcaggtgcccatcgtggacatcatgttcaatgacttcggtgaagcgtcacagaaatttggatttgaagtggggccggcttgcttcatgggctaggagccgccgagcccgggctcccgagagcaacctcgtgacctcagcatgccattcgttcgtgagtgtcccgtgcacgtcctgatcctggacagtgaaggcttctccctcccctcccacctgacttcatctacgcctcggcaccacggggtgtgggaccccagcccggagagaacagagggaaggagccgcgcccccacctggagctgaatcacatgacctagctgcaccccagcgcctgggcccgccccacgctctgtccacacccacgcgccccgggagcggggccatgcctccagccccccagctcgcccgacccatcctgttcgtgaataggtctcaggggttgggggagggactgccagatttggacactatatttttttctaaattcaacttgaagatgtgtatttcccctgaccttcaaaaaatgttccaaggtaagcctcgtaaaggtcatcccaccatcaccaaagcctccgtttttaacaacctccaacacgatccatttagaggccaaatgtcattctgcaggtgccttcccgatggattaaaggtgcttatgtttttgtgagttttaagtaaatatttgtattgtattgttataaatgttaagtgtgcctggctttcaatcatgcacggaaacccagtctcagtcccacggacagaatgggcgaggcatggattctgggttgcagtaccgttctgattagaaataggaagtctccccacccccgccctggccaagaacgtgcaataaattggaagtttgccccggggcagcaagaatttatgctgccattgaaaagcaggtaccagtgccccttttcagacagtttttgattcgctctagactttttttttttttaatagggagggaaaaaatttgataattttcttttttctacatgcacttaagactaaaacacaggtttggattaattttatttgcttcctttttccgcttttcttcccgcagagcctgatgggagaatgtccagggcagggaaaccacattttttgtaggtgataactcaatgaaaattggtgcttattttttacacttctctcttgtggctctcttgtggtgctatctgttttaaggtctccttgaaggcgcactggggtccctggccatgcctcgttctccctgctttctttatcctgttattgcctccacagtctgttgccaaggactctaagatcaatgcacgtcactttcctttccactgggcaggatagccaagcacactccctcctgcgctctcccgccccggtgcgtccactcccgagggctgttatgaggactgggttgtgcctacttgatttgaaaacacacacaagcaataaaaagcctcttcctgcattgtctgtggtgtgaccatagcagattatatttggttcctgaatgtttgtggtgctaatttctgtgtttgttccaagccgttcagtcatgccatgcgctgcctcggtagatggagtaatgtacaatgaactccatgagtctctccagggctgcctgcagcacgtcttttccaagtagcctatttggattcccatctcaaatgtcctggatgcgagcgtcagcggctccagagctcggggcgggtgaggtcccctttggggaaccctttcctggccatcgaggtcggggggctgccgtctgtgggcaggaggacccgaggggcagccaggaaaggcgatctcttcactgtgaaaagttgcccgggtgcagcgccttttccttctaccatgggaaatgcaggctgggcccttggggtgagcctgcggggctctggtgctgtccccgacccccaccaccaccagaatgcagttccagcttaggaagccacaaacaagccacccaggaggaacaaaacaccgccagcgtggattttccaaatttccctggaaagtaagtctcgctcttgccaaagaaaagtctggcttggagagtctctggagcccaggatgccagcatgtgccaatgactgtcaccttcatctcttcaaaagaaaagccatagccgaggactgtcccgcgacccccgtggactgcgtctaggtcatgtgattctgttttcatttctcatcccatccaatttgtccttttctcctgtcattttcttcctctgtggtcccttcaaagttgttataatttgtactgaacttcaaaatgtgtcccgttctccccagaccactctagccacagtatattgcaataaaattacttcttatatttgcagaaaaatcttttggtgtaattttattttttcctctcaatatatataattggacaaacgctggcaaaaagaaaaaaatggtaagcaaaaaacccaagataaagtttcgaggacatcaggccttttgaaatacaatgtcaaatgacacattgtacgttttcaaaaaatccgctagacatgtcataagttttaactgtaatgcccaggaaaggatatcttaaaatattctaaacttgtgtaacaaaggaataattaactgtaatagtttttcaataaatcgagttgggtgtttccaccgtaa

SEQ ID NO: 74395 - DNA, 7114 bp, Homo sapiens
  misc_feature (13)..(13): n is a, c, g, or t
  misc_feature (15)..(15): n is a, c, g, or t
gccgccccgcggncnaaagtcgagccctcccgcccgtgggcgagcgcgccagccgccccttccagaacagccgccgccacaaagaagaacggggggtgccgaggtccccatgacctcctaaagtggtgcggtccctgctgagtgcgctgcccgggccgtgacccgcgcccctgtgcgtccccgcgcgcctccgagcgcccctgtgcgccccggcccgcgccccgccggcatggacgtccatacccgctggaaagcgcgcagcgcgctccgcccgggcgccccgctgctgcccccgctgctgctgctgctgctgtgggcgccgcctccgagccgcgcagctcagccagcagatctcctgaaggttctagattttcacaacttgcctgatggaataacaaagacaacaggcttttgcgccacgcggcgatcttccaaaggcccggatgtcgcttacagagtcaccaaagacgcgcagctcagcgcacccaccaagcagctgtaccctgcgtctgcatttcccgaggacttctccatcctaacaactgtgaaagccaagaaaggcagccaggccttcctggtctccatctacaacgagcagggtatccagcagattgggctggagctgggccgctctcccgtcttcctctacgaggaccacacggggaagcctggcccggaagactaccccctcttccggggcatcaacctgtcagatggcaagtggcacagaattgctctcagcgtccacaagaaaaatgtcaccttgatcctcgactgtaaaaagaagaccaccaaattcctcgaccgcagcgaccaccccatgatcgacatcaatggcatcatcgtgtttggcacccggatcctggatgaggaggtgtttgagggtgacatccagcagctgctctttgtctcggaccaccgggcagcttatgattactgtgagcactacagccctgactgtgacaccgcagtacctgacaccccacagtcgcaggaccccaatccagatgaatattacacggaaggagacggcgagggtgagacctattactacgaatacccctactacgaagaccccgaagacctagggaaggagcccacccccagcaagaagcccgtggaagctgccaaagaaaccacagaggtccccgaggagctgaccccgacccccacggaagctgctcccatgcctgaaaccagtgaaggggctgggaaggaagaggacgtcggcatcggggactatgactacgtgcccagtgaggactactacacgccctcaccgtatgatgacctcacctatggcgagggggaggagaaccccgaccagcccacagacccaggcgctggggccgaaattcccaccagcaccgccgacacctccaactcctccaatccagctccgcctccaggggaaggtgcggatgacttggagggggagttcactgaggaaacgatccggaaccttgacgagaactactacgacccctactacgaccccaccagctccccgtcggagatcgggccgggaatgccggcgaaccaggataccatctatgaagggattggaggacctcggggcgagaaaggccaaaagggagaaccagcgattatcgagccgggcatgctcatcgagggcccgcctggcccagaaggccccgcgggtcttcccggacctccaggaaccatgggtcccactggccaagtcggggaccctggagaaaggggcccccctggacgcccaggccttcctggggccgatggcctgcccggtcctccaggaaccatgctcatgctgcccttccggtttggaggtggcggcgatgcgggctccaaaggccccatggtctcagcccaggagtcccaggcgcaagccattctccagcaggccaggttggcactgaggggaccagctggcccgatgggtctcacagggagacctggccctgtgggtccccctgggagcggaggtttgaagggcgagccgggagacgtggggcctcagggtcctcgaggtgtgcaaggcccgcctggtccggccgggaagcccggaagacggggtcgggctgggagtgatggagccagaggaatgcctggacaaactggccccaagggtgaccggggtttcgacggcctggctgggttgccaggcgagaagggccacaggggtgaccctggtccttccggcccaccaggacctccgggagacgatggagaaaggggtgacgacggagaagttgggcccagggggctgcctgggaagcccgggccacgtggtctgcttgggccgaaagggcccccaggtcctcccggacctcccggtgtcacgggtatggacggccagccggggccaaaaggaaatgtgggtccccagggagagcctggccccccaggacagcagggtaatccaggcgcccagggtcttccaggcccccagggtgcaattggtcctccaggagaaaagggtcccttggggaaaccaggccttccaggaatgcccggtgctgacggacccccgggacaccctggcaaagaaggccctccaggagagaaaggaggtcagggtccacctggcccccagggtccgattggctacccaggtcctcgaggagtcaagggggccgatggcatccgtggtctgaagggcacaaagggcgagaagggtgaagacggctttcctgggtttaaaggagacatgggcatcaagggtgatcggggggagatcggcccacccggtcccaggggagaagatggccctgaaggcccaaagggtcgcggaggtcccaatggtgaccccggtcctctgggaccccctggggagaagggaaaactcggagtcccagggttaccagggtatccaggaagacaaggaccaaagggctctattggattccctggatttcctggcgccaatggagagaagggcggcagggggacccctggaaagccaggaccgcgggggcagcgaggcccaacgggtccgaggggtgaaagaggcccccggggcatcactgggaagcctggccccaagggcaactccggaggtgacggcccagctggccctcctggtgaacggggacccaatggaccccaaggacccacaggatttcctggaccaaagggcccccctggccctccaggcaaggatggactcccaggacaccctggacagagaggcgagactggtttccaaggcaagaccggccctccaggcccccccggcgtggtcggccctcagggtcccacgggagaaacgggcccaatgggtgagcgtggccaccctgggccccctggaccccccggtgaacaggggcttccgggccttgctggaaaagaagggacgaagggtgacccaggccctgcaggcctccctgggaaagatggccctccaggattacgtggtttccctggggaccgagggcttcctggtccagtgggagctcttggactgaaaggcaatgaagggccccctggcccaccaggccctgcgggatctccaggggagagaggtccagctggagccgctgggcccatcggaattccagggagacctgggccccagggacccccagggccggcaggagagaaaggggctcctggcgagaaaggcccacaaggcccagctggccgagacggtctccaggggcctgtggggctcccgggtccagctggccctgtgggtccccctggagaagacggagataagggagagatcggggagccggggcagaaaggaagcaagggggacaaaggagaacagggtcctcctgggcctacaggtcctcaaggccccatcggacagccaggcccctctggagctgacggcgagccggggcctcggggccagcagggccttttcgggcagaaaggtgatgaaggtcccagaggctttcctggaccccctgggccagtggggctgcagggtttgccaggacctccaggcgagaagggtgagacaggagacgtgggccagatgggccccccgggtccccctggcccccgaggaccctccggagctccaggtgctgatggcccacaaggtcccccaggtggaataggaaaccctggtgcagtgggagagaagggcgagcctggcgaagcaggtgagcctggccttccgggagaaggcggccccccgggacccaaaggagaaaggggagagaagggcgagtcaggcccttcaggtgctgccggaccccctggacccaaaggccctcccggagatgatggtcccaaaggcagccctggcccagtgggttttcctggagatcctggcccccccggagagcctggccccgcgggtcaagatggtccccctggtgacaaaggagatgatggtgaacccgggcagacgggatcccccggccctactggtgaaccaggtccatcggggcctccaggaaaaaggggtcccccaggccccgcaggccccgaaggcagacagggagagaaaggggccaagggagaagccggcttggaaggccctcctgggaagactggccccatcggcccccagggggcccctgggaagcccggaccggatggccttcgagggatccctggccctgtgggagaacaaggtctcccaggatccccaggcccggacggtccccccggccccatgggtcccccaggacttcccggcctcaaaggagattctggtcccaaaggtgaaaagggtcatccaggcctgatcgggctcatcggtcctccgggtgaacagggtgagaagggcgaccgtggtctccctggcccccagggctcctccggtcctaagggagaacagggtatcactggtccttctggcccgattgggcctcctgggccccctggcctgccgggtccgcctggtccaaaaggtgctaagggctcctcgggtccaactggcccgaagggtgaggcaggccacccaggacccccaggccccccgggccccccgggagaggtcatccagcccctgccaatccaggcatccaggacgcggcggaacatcgacgccagccagctgctggacgacgggaatggcgagaactacgtggactacgcggacggcatggaagagatcttcggctctctcaactctctgaagctggagattgagcagatgaaacggcccctgggcacgcagcagaaccccgcccgcacctgcaaggacctgcagctctgccaccccgacttcccagatggtgaatactgggtcgatcctaaccaaggatgctccagggattccttcaaggtttactgcaacttcacagccggggggtcgacatgcgtcttccctgacaagaagtccgaaggggccagaatcacttcttggcccaaagaaaacccgggctcctggttcagtgaattcaagcgtgggaaactgctctcctatgtggacgccgagggcaaccctgtgggtgtggtacagatgaccttcctgcggctgctgagcgcctctgcccaccagaacgtcacctaccactgctaccagtcagtggcctggcaggacgcagccacgggcagctacgacaaggccctccgcttcctgggctccaacgacgaggagatgtcctatgacaacaacccctacatccgcgccctggtggacggctgtgctaccaagaaaggctaccagaagacggttctggagatcgacacccccaaagtggagcaggtgcccatcgtggacatcatgttcaatgacttcggtgaagcgtcacagaaatttggatttgaagtggggccggcttgcttcatgggctaggagccgccgagcccgggctcccgagagcaacctcgtgacctcagcatgccattcgttcgtgagtgtcccgtgcacgtcctgatcctggacagtgaaggcttctccctcccctcccacctgacttcatctacgcctcggcaccacggggtgtgggaccccagcccggagagaacagagggaaggagccgcgcccccacctggagctgaatcacatgacctagctgcaccccagcgcctgggcccgccccacgctctgtccacacccacgcgccccgggagcggggccatgcctccagccccccagctcgcccgacccatcctgttcgtgaataggtctcaggggttgggggagggactgccagatttggacactatatttttttctaaattcaacttgaagatgtgtatttcccctgaccttcaaaaaatgttccaaggtaagcctcgtaaaggtcatcccaccatcaccaaagcctccgtttttaacaacctccaacacgatccatttagaggccaaatgtcattctgcaggtgccttcccgatggattaaaggtgcttatgtttttgtgagttttaagtaaatatttgtattgtattgttataaatgttaagtgtgcctggctttcaatcatgcacggaaacccagtctcagtcccacggacagaatgggcgaggcatggattctgggttgcagtaccgttctgattagaaataggaagtctccccacccccgccctggccaagaacgtgcaataaattggaagtttgccccggggcagcaagaatttatgctgccattgaaaagcaggtaccagtgccccttttcagacagtttttgattcgctctagactttttttttttttaatagggagggaaaaaatttgataattttcttttttctacatgcacttaagactaaaacacaggtttggattaattttatttgcttcctttttccgcttttcttcccgcagagcctgatgggagaatgtccagggcagggaaaccacattttttgtaggtgataactcaatgaaaattggtgcttattttttacacttctctcttgtggctctcttgtggtgctatctgttttaaggtctccttgaaggcgcactggggtccctggccatgcctcgttctccctgctttctttatcctgttattgcctccacagtctgttgccaaggactctaagatcaatgcacgtcactttcctttccactgggcaggatagccaagcacactccctcctgcgctctcccgccccggtgcgtccactcccgagggctgttatgaggactgggttgtgcctacttgatttgaaaacacacacaagcaataaaaagcctcttcctgcattgtc

SEQ ID NO: 74396 - DNA, 7592 bp, Homo sapiens
  misc_feature (13)..(13): n is a, c, g, or t
  misc_feature (15)..(15): n is a, c, g, or t
gccgccccgcggncnaaagtcgagccctcccgcccgtgggcgagcgcgccagccgccccttccagaacagccgccgccacaaagaagaacggggggtgccgaggtccccatgacctcctaaagtggtgcggtccctgctgagtgcgctgcccgggccgtgacccgcgcccctgtgcgtccccgcgcgcctccgagcgcccctgtgcgccccggcccgcgccccgccggcatggacgtccatacccgctggaaagcgcgcagcgcgctccgcccgggcgccccgctgctgcccccgctgctgctgctgctgctgtgggcgccgcctccgagccgcgcagctcagccagcagatctcctgaaggttctagattttcacaacttgcctgatggaataacaaagacaacaggcttttgcgccacgcggcgatcttccaaaggcccggatgtcgcttacagagtcaccaaagacgcgcagctcagcgcacccaccaagcagctgtaccctgcgtctgcatttcccgaggacttctccatcctaacaactgtgaaagccaagaaaggcagccaggccttcctggtctccatctacaacgagcagggtatccagcagattgggctggagctgggccgctctcccgtcttcctctacgaggaccacacggggaagcctggcccggaagactaccccctcttccggggcatcaacctgtcagatggcaagtggcacagaattgctctcagcgtccacaagaaaaatgtcaccttgatcctcgactgtaaaaagaagaccaccaaattcctcgaccgcagcgaccaccccatgatcgacatcaatggcatcatcgtgtttggcacccggatcctggatgaggaggtgtttgagggtgacatccagcagctgctctttgtctcggaccaccgggcagcttatgattactgtgagcactacagccctgactgtgacaccgcagtacctgacaccccacagtcgcaggaccccaatccagatgaatattacacggaaggagacggcgagggtgagacctattactacgaatacccctactacgaagaccccgaagacctagggaaggagcccacccccagcaagaagcccgtggaagctgccaaagaaaccacagaggtccccgaggagctgaccccgacccccacggaagctgctcccatgcctgaaaccagtgaaggggctgggaaggaagaggacgtcggcatcggggactatgactacgtgcccagtgaggactactacacgccctcaccgtatgatgacctcacctatggcgagggggaggagaaccccgaccagcccacagacccaggcgctggggccgaaattcccaccagcaccgccgacacctccaactcctccaatccagctccgcctccaggggaaggtgcggatgacttggagggggagttcactgaggaaacgatccggaaccttgacgagaactactacgacccctactacgaccccaccagctccccgtcggagatcgggccgggaatgccggcgaaccaggataccatctatgaagggattggaggacctcggggcgagaaaggccaaaagggagaaccagcgattatcgagccgggcatgctcatcgagggcccgcctggcccagaaggccccgcgggtcttcccggacctccaggaaccatgggtcccactggccaagtcggggaccctggagaaaggggcccccctggacgcccaggccttcctggggccgatggcctgcccggtcctccaggaaccatgctcatgctgcccttccggtttggaggtggcggcgatgcgggctccaaaggccccatggtctcagcccaggagtcccaggcgcaagccattctccagcaggccaggttggcactgaggggaccagctggcccgatgggtctcacagggagacctggccctgtgggtccccctgggagcggaggtttgaagggcgagccgggagacgtggggcctcagggtcctcgaggtgtgcaaggcccgcctggtccggccgggaagcccggaagacggggtcgggctgggagtgatggagccagaggaatgcctggacaaactggccccaagggtgaccggggtttcgacggcctggctgggttgccaggcgagaagggccacaggggtgaccctggtccttccggcccaccaggacctccgggagacgatggagaaaggggtgacgacggagaagttgggcccagggggctgcctgggaagcccgggccacgtggtctgcttgggccgaaagggcccccaggtcctcccggacctcccggtgtcacgggtatggacggccagccggggccaaaaggaaatgtgggtccccagggagagcctggccccccaggacagcagggtaatccaggcgcccagggtcttccaggcccccagggtgcaattggtcctccaggagaaaagggtcccttggggaaaccaggccttccaggaatgcccggtgctgacggacccccgggacaccctggcaaagaaggccctccaggagagaaaggaggtcagggtccacctggcccccagggtccgattggctacccaggtcctcgaggagtcaagggggccgatggcatccgtggtctgaagggcacaaagggcgagaagggtgaagacggctttcctgggtttaaaggagacatgggcatcaagggtgatcggggggagatcggcccacccggtcccaggggagaagatggccctgaaggcccaaagggtcgcggaggtcccaatggtgaccccggtcctctgggaccccctggggagaagggaaaactcggagtcccagggttaccagggtatccaggaagacaaggaccaaagggctctattggattccctggatttcctggcgccaatggagagaagggcggcagggggacccctggaaagccaggaccgcgggggcagcgaggcccaacgggtccgaggggtgaaagaggcccccggggcatcactgggaagcctggccccaagggcaactccggaggtgacggcccagctggccctcctggtgaacggggacccaatggaccccaaggacccacaggatttcctggaccaaagggcccccctggccctccaggcaaggatggactcccaggacaccctggacagagaggcgagactggtttccaaggcaagaccggccctccaggcccccccggcgtggtcggccctcagggtcccacgggagaaacgggcccaatgggtgagcgtggccaccctgggccccctggaccccccggtgaacaggggcttccgggccttgctggaaaagaagggacgaagggtgacccaggccctgcaggcctccctgggaaagatggccctccaggattacgtggtttccctggggaccgagggcttcctggtccagtgggagctcttggactgaaaggcaatgaagggccccctggcccaccaggccctgcgggatctccaggggagagaggtccagctggagccgctgggcccatcggaattccagggagacctgggccccagggacccccagggccggcaggagagaaaggggctcctggcgagaaaggcccacaaggcccagctggccgagacggtctccaggggcctgtggggctcccgggtccagctggccctgtgggtccccctggagaagacggagataagggagagatcggggagccggggcagaaaggaagcaagggggacaaaggagaacagggtcctcctgggcctacaggtcctcaaggccccatcggacagccaggcccctctggagctgacggcgagccggggcctcggggccagcagggccttttcgggcagaaaggtgatgaaggtcccagaggctttcctggaccccctgggccagtggggctgcagggtttgccaggacctccaggcgagaagggtgagacaggagacgtgggccagatgggccccccgggtccccctggcccccgaggaccctccggagctccaggtgctgatggcccacaaggtcccccaggtggaataggaaaccctggtgcagtgggagagaagggcgagcctggcgaagcaggtgagcctggccttccgggagaaggcggccccccgggacccaaaggagaaaggggagagaagggcgagtcaggcccttcaggtgctgccggaccccctggacccaaaggccctcccggagatgatggtcccaaaggcagccctggcccagtgggttttcctggagatcctggcccccccggagagcctggccccgcgggtcaagatggtccccctggtgacaaaggagatgatggtgaacccgggcagacgggatcccccggccctactggtgaaccaggtccatcggggcctccaggaaaaaggggtcccccaggccccgcaggccccgaaggcagacagggagagaaaggggccaagggagaagccggcttggaaggccctcctgggaagactggccccatcggcccccagggggcccctgggaagcccggaccggatggccttcgagggatccctggccctgtgggagaacaaggtctcccaggatccccaggcccggacggtccccccggccccatgggtcccccaggacttcccggcctcaaaggagattctggtcccaaaggtgaaaagggtcatccaggcctgatcgggctcatcggtcctccgggtgaacagggtgagaagggcgaccgtggtctccctggcccccagggctcctccggtcctaagggagaacagggtatcactggtccttctggcccgattgggcctcctgggccccctggcctgccgggtccgcctggtccaaaaggtgctaagggctcctcgggtccaactggcccgaagggtgaggcaggccacccaggacccccaggccccccgggccccccgggagaggtcatccagcccctgccaatccaggcatccaggacgcggcggaacatcgacgccagccagctgctggacgacgggaatggcgagaactacgtggactacgcggacggcatggaagagatcttcggctctctcaactctctgaagctggagattgagcagatgaaacggcccctgggcacgcagcagaaccccgcccgcacctgcaaggacctgcagctctgccaccccgacttcccagatggtgaatactgggtcgatcctaaccaaggatgctccagggattccttcaaggtttactgcaacttcacagccggggggtcgacatgcgtcttccctgacaagaagtccgaaggggccagaatcacttcttggcccaaagaaaacccgggctcctggttcagtgaattcaagcgtgggaaactgctctcctatgtggacgccgagggcaaccctgtgggtgtggtacagatgaccttcctgcggctgctgagcgcctctgcccaccagaacgtcacctaccactgctaccagtcagtggcctggcaggacgcagccacgggcagctacgacaaggccctccgcttcctgggctccaacgacgaggagatgtcctatgacaacaacccctacatccgcgccctggtggacggctgtgctaccaagaaaggctaccagaagacggttctggagatcgacacccccaaagtggagcaggtgcccatcgtggacatcatgttcaatgacttcggtgaagcgtcacagaaatttggatttgaagtggggccggcttgcttcatgggctaggagccgccgagcccgggctcccgagagcaacctcgtgacctcagcatgccattcgttcgtgagtgtcccgtgcacgtcctgatcctggacagtgaaggcttctccctcccctcccacctgacttcatctacgcctcggcaccacggggtgtgggaccccagcccggagagaacagagggaaggagccgcgcccccacctggagctgaatcacatgacctagctgcaccccagcgcctgggcccgccccacgctctgtccacacccacgcgccccgggagcggggccatgcctccagccccccagctcgcccgacccatcctgttcgtgaataggtctcaggggttgggggagggactgccagatttggacactatatttttttctaaattcaacttgaagatgtgtatttcccctgaccttcaaaaaatgttccaaggtaagcctcgtaaaggtcatcccaccatcaccaaagcctccgtttttaacaacctccaacacgatccatttagaggccaaatgtcattctgcaggtgccttcccgatggattaaaggtgcttatgtttttgtgagttttaagtaaatatttgtattgtattgttataaatgttaagtgtgcctggctttcaatcatgcacggaaacccagtctcagtcccacggacagaatgggcgaggcatggattctgggttgcagtaccgttctgattagaaataggaagtctccccacccccgccctggccaagaacgtgcaataaattggaagtttgccccggggcagcaagaatttatgctgccattgaaaagcaggtaccagtgccccttttcagacagtttttgattcgctctagactttttttttttttaatagggagggaaaaaatttgataattttcttttttctacatgcacttaagactaaaacacaggtttggattaattttatttgcttcctttttccgcttttcttcccgcagagcctgatgggagaatgtccagggcagggaaaccacattttttgtaggtgataactcaatgaaaattggtgcttattttttacacttctctcttgtggctctcttgtggtgctatctgttttaaggtctccttgaaggcgcactggggtccctggccatgcctcgttctccctgctttctttatcctgttattgcctccacagtctgttgccaaggactctaagatcaatgcacgtcactttcctttccactgggcaggatagccaagcacactccctcctgcgctctcccgccccggtgcgtccactcccgagggctgttatgaggactgggttgtgcctacttgatttgaaaacacacacaagcaataaaaagcctcttcctgcattgtctgtggtgtgaccatagcagattatatttggttcctgaatgtttgtggtgctaatttctgtgtttgttccaagccgttcagtcatgccatgcgctgcctcggtagatggagtaatgtacaatgaactccatgagtctctccagggctgcctgcagcacgtcttttccaagtagcctatttggattcccatctcaaatgtcctggatgccagcatgtgccaatgactgtcaccttcatctcttcaaaagaaaagccatagccgaggactgtcccgcgacccccgtggactgcgtctaggtcatgtgattctgttttcatttctcatcccatccaatttgtccttttctcctgtcattttcttcctctgtggtcccttcaaagttgttataatttgtactgaacttcaaaatgtgtcccgttctccccagaccactctagccacagtatattgcaataaaattacttcttatatttgcaga

SEQ ID NO: 74397 - DNA, 6332 bp, Homo sapiens
  misc_feature (13)..(13): n is a, c, g, or t
  misc_feature (15)..(15): n is a, c, g, or t
gccgccccgcggncnaaagtcgagccctcccgcccgtgggcgagcgcgccagccgccccttccagaacagccgccgccacaaagaagaacggggggtgccgaggtccccatgacctcctaaagtggtgcggtccctgctgagtgcgctgcccgggccgtgacccgcgcccctgtgcgtccccgcgcgcctccgagcgcccctgtgcgccccggcccgcgccccgccggcatggacgtccatacccgctggaaagcgcgcagcgcgctccgcccgggcgccccgctgctgcccccgctgctgctgctgctgctgtgggcgccgcctccgagccgcgcagctcagccagcagatctcctgaaggttctagattttcacaacttgcctgatggaataacaaagacaacaggcttttgcgccacgcggcgatcttccaaaggcccggatgtcgcttacagagtcaccaaagacgcgcagctcagcgcacccaccaagcagctgtaccctgcgtctgcatttcccgaggacttctccatcctaacaactgtgaaagccaagaaaggcagccaggccttcctggtctccatctacaacgagcagggtatccagcagattgggctggagctgggccgctctcccgtcttcctctacgaggaccacacggggaagcctggcccggaagactaccccctcttccggggcatcaacctgtcagatggcaagtggcacagaattgctctcagcgtccacaagaaaaatgtcaccttgatcctcgactgtaaaaagaagaccaccaaattcctcgaccgcagcgaccaccccatgatcgacatcaatggcatcatcgtgtttggcacccggatcctggatgaggaggtgtttgagggtgacatccagcagctgctctttgtctcggaccaccgggcagcttatgattactgtgagcactacagccctgactgtgacaccgcagtacctgacaccccacagtcgcaggaccccaatccagatgaatattacacggaaggagacggcgagggtgagacctattactacgaatacccctactacgaagaccccgaagacctagggaaggagcccacccccagcaagaagcccgtggaagctgccaaagaaaccacagaggtccccgaggagctgaccccgacccccacggaagctgctcccatgcctgaaaccagtgaaggggctgggaaggaagaggacgtcggcatcggggactatgactacgtgcccagtgaggactactacacgccctcaccgtatgatgacctcacctatggcgagggggaggagaaccccgaccagcccacagacccaggcgctggggccgaaattcccaccagcaccgccgacacctccaactcctccaatccagctccgcctccaggggaaggtgcggatgacttggagggggagttcactgaggaaacgatccggaaccttgacgagaactactacgacccctactacgaccccaccagctccccgtcggagatcgggccgggaatgccggcgaaccaggataccatctatgaagggattggaggacctcggggcgagaaaggccaaaagggagaaccagcgattatcgagccgggcatgctcatcgagggcccgcctggcccagaaggccccgcgggtcttcccggacctccaggaaccatgggtcccactggccaagtcggggaccctggagaaaggggcccccctggacgcccaggccttcctggggccgatggcctgcccggtcctccaggaaccatgctcatgctgcccttccggtttggaggtggcggcgatgcgggctccaaaggccccatggtctcagcccaggagtcccaggcgcaagccattctccagcaggccaggttggcactgaggggaccagctggcccgatgggtctcacagggagacctggccctgtgggtccccctgggagcggaggtttgaagggcgagccgggagacgtggggcctcagggtcctcgaggtgtgcaaggcccgcctggtccggccgggaagcccggaagacggggtcgggctgggagtgatggagccagaggaatgcctggacaaactggccccaagggtgaccggggtttcgacggcctggctgggttgccaggcgagaagggccacaggggtgaccctggtccttccggcccaccaggacctccgggagacgatggagaaaggggtgacgacggagaagttgggcccagggggctgcctgggaagcccgggccacgtggtctgcttgggccgaaagggcccccaggtcctcccggacctcccggtgtcacgggtatggacggccagccggggccaaaaggaaatgtgggtccccagggagagcctggccccccaggacagcagggtaatccaggcgcccagggtcttccaggcccccagggtgcaattggtcctccaggagaaaagggtcccttggggaaaccaggccttccaggaatgcccggtgctgacggacccccgggacaccctggcaaagaaggccctccaggagagaaaggaggtcagggtccacctggcccccagggtccgattggctacccaggtcctcgaggagtcaagggggccgatggcatccgtggtctgaagggcacaaagggcgagaagggtgaagacggctttcctgggtttaaaggagacatgggcatcaagggtgatcggggggagatcggcccacccggtcccaggggagaagatggccctgaaggcccaaagggtcgcggaggtcccaatggtgaccccggtcctctgggaccccctggggagaagggaaaactcggagtcccagggttaccagggtatccaggaagacaaggaccaaagggctctattggattccctggatttcctggcgccaatggagagaagggcggcagggggacccctggaaagccaggaccgcgggggcagcgaggcccaacgggtccgaggggtgaaagaggcccccggggcatcactgggaagcctggccccaagggcaactccggaggtgacggcccagctggccctcctggtgaacggggacccaatggaccccaaggacccacaggatttcctggaccaaagggcccccctggccctccaggcaaggatggactcccaggacaccctggacagagaggcgagactggtttccaaggcaagaccggccctccaggcccccccggcgtggtcggccctcagggtcccacgggagaaacgggcccaatgggtgagcgtggccaccctgggccccctggaccccccggtgaacaggggcttccgggccttgctggaaaagaagggacgaagggtgacccaggccctgcaggcctccctgggaaagatggccctccaggattacgtggtttccctggggaccgagggcttcctggtccagtgggagctcttggactgaaaggcaatgaagggccccctggcccaccaggccctgcgggatctccaggggagagaggtccagctggagccgctgggcccatcggaattccagggagacctgggccccagggacccccagggccggcaggagagaaaggggctcctggcgagaaaggcccacaaggcccagctggccgagacggtctccaggggcctgtggggctcccgggtccagctggccctgtgggtccccctggagaagacggagataagggagagatcggggagccggggcagaaaggaagcaagggggacaaaggagaacagggtcctcctgggcctacaggtcctcaaggccccatcggacagccaggcccctctggagctgacggcgagccggggcctcggggccagcagggccttttcgggcagaaaggtgatgaaggtcccagaggctttcctggaccccctgggccagtggggctgcagggtttgccaggacctccaggcgagaagggtgagacaggagacgtgggccagatgggccccccgggtccccctggcccccgaggaccctccggagctccaggtgctgatggcccacaaggtcccccaggtggaataggaaaccctggtgcagtgggagagaagggcgagcctggcgaagcaggtgagcctggccttccgggagaaggcggccccccgggacccaaaggagaaaggggagagaagggcgagtcaggcccttcaggtgctgccggaccccctggacccaaaggccctcccggagatgatggtcccaaaggcagccctggcccagtgggttttcctggagatcctggcccccccggagagcctggccccgcgggtcaagatggtccccctggtgacaaaggagatgatggtgaacccgggcagacgggatcccccggccctactggtgaaccaggtccatcggggcctccaggaaaaaggggtcccccaggccccgcaggccccgaaggcagacagggagagaaaggggccaagggagaagccggcttggaaggccctcctgggaagactggccccatcggcccccagggggcccctgggaagcccggaccggatggccttcgagggatccctggccctgtgggagaacaaggtctcccaggatccccaggcccggacggtccccccggccccatgggtcccccaggacttcccggcctcaaaggagattctggtcccaaaggtgaaaagggtcatccaggcctgatcgggctcatcggtcctccgggtgaacagggtgagaagggcgaccgtggtctccctggcccccagggctcctccggtcctaagggagaacagggtatcactggtccttctggcccgattgggcctcctgggccccctggcctgccgggtccgcctggtccaaaaggtgctaagggctcctcgggtccaactggcccgaagggtgaggcaggccacccaggacccccaggccccccgggccccccgggagaggtcatccagcccctgccaatccaggcatccaggacgcggcggaacatcgacgccagccagctgctggacgacgggaatggcgagaactacgtggactacgcggacggcatggaagagatcttcggctctctcaactctctgaagctggagattgagcagatgaaacggcccctgggcacgcagcagaaccccgcccgcacctgcaaggacctgcagctctgccaccccgacttcccagatggtgaatactgggtcgatcctaaccaaggatgctccagggattccttcaaggtttactgcaacttcacagccggggggtcgacatgcgtcttccctgacaagaagtccgaaggggccagaatcacttcttggcccaaagaaaacccgggctcctggttcagtgaattcaagcgtgggaaactgctctcctatgtggacgccgagggcaaccctgtgggtgtggtacagatgaccttcctgcggctgctgagcgcctctgcccaccagaacgtcacctaccactgctaccagtcagtggcctggcaggacgcagccacgggcagctacgacaaggccctccgcttcctgggctccaacgacgaggagatgtcctatgacaacaacccctacatccgcgccctggtggacggctgtgctaccaagaaaggctaccagaagacggttctggagatcgacacccccaaagtggagcaggtgcccatcgtggacatcatgttcaatgacttcggtgaagcgtcacagaaatttggatttgaagtggggccggcttgcttcatgggctaggagccgccgagcccgggctcccgagagcaacctcgtgacctcagcatgccattcgttcgtgagtgtcccgtgcacgtcctgatcctggacagtgaaggcttctccctcccctcccacctgacttcatctacgcctcggcaccacggggtgtgggaccccagcccggagagaacagagggaaggagccgcgcccccacctggagctgaatcacatgacctagctgcaccccagcgcctgggcccgccccacgctctgtccacacccacgcgccccgggagcggggccatgcctccagccccccagctcgcccgacccatcctgttcgtgaataggtctcaggggttgggggagggactgccagatttggacactatatttttttctaaattcaacttgaagatgtgtatttcccctgaccttcaaaaaatgttccaaggtaagcctcgtaaaggtcatcccaccatcaccaaagcctccgtttttaacaacctccaacacgatccatttagaggccaaatgtcattctgcaggtgccttcccgatggattaaaggtgcttatgtttttgtgagttttaagtaaatat

SEQ ID NO: 74398 - DNA, 6583 bp, Homo sapiens
  misc_feature (13)..(13): n is a, c, g, or t
  misc_feature (15)..(15): n is a, c, g, or t
gccgccccgcggncnaaagtcgagccctcccgcccgtgggcgagcgcgccagccgccccttccagaacagccgccgccacaaagaagaacggggggtgccgaggtccccatgacctcctaaagtggtgcggtccctgctgagtgcgctgcccgggccgtgacccgcgcccctgtgcgtccccgcgcgcctccgagcgcccctgtgcgccccggcccgcgccccgccggcatggacgtccatacccgctggaaagcgcgcagcgcgctccgcccgggcgccccgctgctgcccccgctgctgctgctgctgctgtgggcgccgcctccgagccgcgcagctcagccagcagatctcctgaaggttctagattttcacaacttgcctgatggaataacaaagacaacaggcttttgcgccacgcggcgatcttccaaaggcccggatgtcgcttacagagtcaccaaagacgcgcagctcagcgcacccaccaagcagctgtaccctgcgtctgcatttcccgaggacttctccatcctaacaactgtgaaagccaagaaaggcagccaggccttcctggtctccatctacaacgagcagggtatccagcagattgggctggagctgggccgctctcccgtcttcctctacgaggaccacacggggaagcctggcccggaagactaccccctcttccggggcatcaacctgtcagatggcaagtggcacagaattgctctcagcgtccacaagaaaaatgtcaccttgatcctcgactgtaaaaagaagaccaccaaattcctcgaccgcagcgaccaccccatgatcgacatcaatggcatcatcgtgtttggcacccggatcctggatgaggaggtgtttgagggtgacatccagcagctgctctttgtctcggaccaccgggcagcttatgattactgtgagcactacagccctgactgtgacaccgcagtacctgacaccccacagtcgcaggaccccaatccagatgaatattacacggaaggagacggcgagggtgagacctattactacgaatacccctactacgaagaccccgaagacctagggaaggagcccacccccagcaagaagcccgtggaagctgccaaagaaaccacagaggtccccgaggagctgaccccgacccccacggaagctgctcccatgcctgaaaccagtgaaggggctgggaaggaagaggacgtcggcatcggggactatgactacgtgcccagtgaggactactacacgccctcaccgtatgatgacctcacctatggcgagggggaggagaaccccgaccagcccacagacccaggcgctggggccgaaattcccaccagcaccgccgacacctccaactcctccaatccagctccgcctccaggggaaggtgcggatgacttggagggggagttcactgaggaaacgatccggaaccttgacgagaactactacgacccctactacgaccccaccagctccccgtcggagatcgggccgggaatgccggcgaaccaggataccatctatgaagggattggaggacctcggggcgagaaaggccaaaagggagaaccagcgattatcgagccgggcatgctcatcgagggcccgcctggcccagaaggccccgcgggtcttcccggacctccaggaaccatgggtcccactggccaagtcggggaccctggagaaaggggcccccctggacgcccaggccttcctggggccgatggcctgcccggtcctccaggaaccatgctcatgctgcccttccggtttggaggtggcggcgatgcgggctccaaaggccccatggtctcagcccaggagtcccaggcgcaagccattctccagcaggccaggttggcactgaggggaccagctggcccgatgggtctcacagggagacctggccctgtgggtccccctgggagcggaggtttgaagggcgagccgggagacgtggggcctcagggtcctcgaggtgtgcaaggcccgcctggtccggccgggaagcccggaagacggggtcgggctgggagtgatggagccagaggaatgcctggacaaactggccccaagggtgaccggggtttcgacggcctggctgggttgccaggcgagaagggccacaggggtgaccctggtccttccggcccaccaggacctccgggagacgatggagaaaggggtgacgacggagaagttgggcccagggggctgcctgggaagcccgggccacgtggtctgcttgggccgaaagggcccccaggtcctcccggacctcccggtgtcacgggtatggacggccagccggggccaaaaggaaatgtgggtccccagggagagcctggccccccaggacagcagggtaatccaggcgcccagggtcttccaggcccccagggtgcaattggtcctccaggagaaaagggtcccttggggaaaccaggccttccaggaatgcccggtgctgacggacccccgggacaccctggcaaagaaggccctccaggagagaaaggaggtcagggtccacctggcccccagggtccgattggctacccaggtcctcgaggagtcaagggggccgatggcatccgtggtctgaagggcacaaagggcgagaagggtgaagacggctttcctgggtttaaaggagacatgggcatcaagggtgatcggggggagatcggcccacccggtcccaggggagaagatggccctgaaggcccaaagggtcgcggaggtcccaatggtgaccccggtcctctgggaccccctggggagaagggaaaactcggagtcccagggttaccagggtatccaggaagacaaggaccaaagggctctattggattccctggatttcctggcgccaatggagagaagggcggcagggggacccctggaaagccaggaccgcgggggcagcgaggcccaacgggtccgaggggtgaaagaggcccccggggcatcactgggaagcctggccccaagggcaactccggaggtgacggcccagctggccctcctggtgaacggggacccaatggaccccaaggacccacaggatttcctggaccaaagggcccccctggccctccaggcaaggatggactcccaggacaccctggacagagaggcgagactggtttccaaggcaagaccggccctccaggcccccccggcgtggtcggccctcagggtcccacgggagaaacgggcccaatgggtgagcgtggccaccctgggccccctggaccccccggtgaacaggggcttccgggccttgctggaaaagaagggacgaagggtgacccaggccctgcaggcctccctgggaaagatggccctccaggattacgtggtttccctggggaccgagggcttcctggtccagtgggagctcttggactgaaaggcaatgaagggccccctggcccaccaggccctgcgggatctccaggggagagaggtccagctggagccgctgggcccatcggaattccagggagacctgggccccagggacccccagggccggcaggagagaaaggggctcctggcgagaaaggcccacaaggcccagctggccgagacggtctccaggggcctgtggggctcccgggtccagctggccctgtgggtccccctggagaagacggagataagggagagatcggggagccggggcagaaaggaagcaagggggacaaaggagaacagggtcctcctgggcctacaggtcctcaaggccccatcggacagccaggcccctctggagctgacggcgagccggggcctcggggccagcagggccttttcgggcagaaaggtgatgaaggtcccagaggctttcctggaccccctgggccagtggggctgcagggtttgccaggacctccaggcgagaagggtgagacaggagacgtgggccagatgggccccccgggtccccctggcccccgaggaccctccggagctccaggtgctgatggcccacaaggtcccccaggtggaataggaaaccctggtgcagtgggagagaagggcgagcctggcgaagcaggtgagcctggccttccgggagaaggcggccccccgggacccaaaggagaaaggggagagaagggcgagtcaggcccttcaggtgctgccggaccccctggacccaaaggccctcccggagatgatggtcccaaaggcagccctggcccagtgggttttcctggagatcctggcccccccggagagcctggccccgcgggtcaagatggtccccctggtgacaaaggagatgatggtgaacccgggcagacgggatcccccggccctactggtgaaccaggtccatcggggcctccaggaaaaaggggtcccccaggccccgcaggccccgaaggcagacagggagagaaaggggccaagggagaagccggcttggaaggccctcctgggaagactggccccatcggcccccagggggcccctgggaagcccggaccggatggccttcgagggatccctggccctgtgggagaacaaggtctcccaggatccccaggcccggacggtccccccggccccatgggtcccccaggacttcccggcctcaaaggagattctggtcccaaaggtgaaaagggtcatccaggcctgatcgggctcatcggtcctccgggtgaacagggtgagaagggcgaccgtggtctccctggcccccagggctcctccggtcctaagggagaacagggtatcactggtccttctggcccgattgggcctcctgggccccctggcctgccgggtccgcctggtccaaaaggtgctaagggctcctcgggtccaactggcccgaagggtgaggcaggccacccaggacccccaggccccccgggccccccgggagaggtcatccagcccctgccaatccaggcatccaggacgcggcggaacatcgacgccagccagctgctggacgacgggaatggcgagaactacgtggactacgcggacggcatggaagagatcttcggctctctcaactctctgaagctggagattgagcagatgaaacggcccctgggcacgcagcagaaccccgcccgcacctgcaaggacctgcagctctgccaccccgacttcccagatggtgaatactgggtcgatcctaaccaaggatgctccagggattccttcaaggtttactgcaacttcacagccggggggtcgacatgcgtcttccctgacaagaagtccgaaggggccagaatcacttcttggcccaaagaaaacccgggctcctggttcagtgaattcaagcgtgggaaactgctctcctatgtggacgccgagggcaaccctgtgggtgtggtacagatgaccttcctgcggctgctgagcgcctctgcccaccagaacgtcacctaccactgctaccagtcagtggcctggcaggacgcagccacgggcagctacgacaaggccctccgcttcctgggctccaacgacgaggagatgtcctatgacaacaacccctacatccgcgccctggtggacggctgtgctaccaagaaaggctaccagaagacggttctggagatcgacacccccaaagtggagcaggtgcccatcgtggacatcatgttcaatgacttcggtgaagcgtcacagaaatttggatttgaagtggggccggcttgcttcatgggctaggagccgccgagcccgggctcccgagagcaacctcgtgacctcagcatgccattcgttcgtgagtgtcccgtgcacgtcctgatcctggacagtgaaggcttctccctcccctcccacctgacttcatctacgcctcggcaccacggggtgtgggaccccagcccggagagaacagagggaaggagccgcgcccccacctggagctgaatcacatgacctagctgcaccccagcgcctgggcccgccccacgctctgtccacacccacgcgccccgggagcggggccatgcctccagccccccagctcgcccgacccatcctgttcgtgaataggtctcaggggttgggggagggactgccagatttggacactatatttttttctaaattcaacttgaagatgtgtatttcccctgaccttcaaaaaatgttccaaggtaagcctcgtaaaggtcatcccaccatcaccaaagcctccgtttttaacaacctccaacacgatccatttaagtctcgctcttgccaaagaaaagtctggcttggagagtctctggagcccaggatgccagcatgtgccaatgactgtcaccttcatctcttcaaaagaaaagccatagccgaggactgtcccgcgacccccgtggactgcgtctaggtcatgtgattctgttttcatttctcatcccatccaatttgtccttttctcctgtcattttcttcctctgtggtcccttcaaagttgttataatttgtactgaacttcaaaatgtgtcccgttctccccagaccactctagccacagtatattgcaataaaattacttcttatatttgcaga

SEQ ID NO: 74399 - DNA, 6377 bp, Homo sapiens
  misc_feature (13)..(13): n is a, c, g, or t
  misc_feature (15)..(15): n is a, c, g, or t
  misc_feature (6339)..(6339): n is a, c, g, or t
gccgccccgcggncnaaagtcgagccctcccgcccgtgggcgagcgcgccagccgccccttccagaacagccgccgccacaaagaagaacggggggtgccgaggtccccatgacctcctaaagtggtgcggtccctgctgagtgcgctgcccgggccgtgacccgcgcccctgtgcgtccccgcgcgcctccgagcgcccctgtgcgccccggcccgcgccccgccggcatggacgtccatacccgctggaaagcgcgcagcgcgctccgcccgggcgccccgctgctgcccccgctgctgctgctgctgctgtgggcgccgcctccgagccgcgcagctcagccagcagatctcctgaaggttctagattttcacaacttgcctgatggaataacaaagacaacaggcttttgcgccacgcggcgatcttccaaaggcccggatgtcgcttacagagtcaccaaagacgcgcagctcagcgcacccaccaagcagctgtaccctgcgtctgcatttcccgaggacttctccatcctaacaactgtgaaagccaagaaaggcagccaggccttcctggtctccatctacaacgagcagggtatccagcagattgggctggagctgggccgctctcccgtcttcctctacgaggaccacacggggaagcctggcccggaagactaccccctcttccggggcatcaacctgtcagatggcaagtggcacagaattgctctcagcgtccacaagaaaaatgtcaccttgatcctcgactgtaaaaagaagaccaccaaattcctcgaccgcagcgaccaccccatgatcgacatcaatggcatcatcgtgtttggcacccggatcctggatgaggaggtgtttgagggtgacatccagcagctgctctttgtctcggaccaccgggcagcttatgattactgtgagcactacagccctgactgtgacaccgcagtacctgacaccccacagtcgcaggaccccaatccagatgaatattacacggaaggagacggcgagggtgagacctattactacgaatacccctactacgaagaccccgaagacctagggaaggagcccacccccagcaagaagcccgtggaagctgccaaagaaaccacagaggtccccgaggagctgaccccgacccccacggaagctgctcccatgcctgaaaccagtgaaggggctgggaaggaagaggacgtcggcatcggggactatgactacgtgcccagtgaggactactacacgccctcaccgtatgatgacctcacctatggcgagggggaggagaaccccgaccagcccacagacccaggcgctggggccgaaattcccaccagcaccgccgacacctccaactcctccaatccagctccgcctccaggggaaggtgcggatgacttggagggggagttcactgaggaaacgatccggaaccttgacgagaactactacgacccctactacgaccccaccagctccccgtcggagatcgggccgggaatgccggcgaaccaggataccatctatgaagggattggaggacctcggggcgagaaaggccaaaagggagaaccagcgattatcgagccgggcatgctcatcgagggcccgcctggcccagaaggccccgcgggtcttcccggacctccaggaaccatgggtcccactggccaagtcggggaccctggagaaaggggcccccctggacgcccaggccttcctggggccgatggcctgcccggtcctccaggaaccatgctcatgctgcccttccggtttggaggtggcggcgatgcgggctccaaaggccccatggtctcagcccaggagtcccaggcgcaagccattctccagcaggccaggttggcactgaggggaccagctggcccgatgggtctcacagggagacctggccctgtgggtccccctgggagcggaggtttgaagggcgagccgggagacgtggggcctcagggtcctcgaggtgtgcaaggcccgcctggtccggccgggaagcccggaagacggggtcgggctgggagtgatggagccagaggaatgcctggacaaactggccccaagggtgaccggggtttcgacggcctggctgggttgccaggcgagaagggccacaggggtgaccctggtccttccggcccaccaggacctccgggagacgatggagaaaggggtgacgacggagaagttgggcccagggggctgcctgggaagcccgggccacgtggtctgcttgggccgaaagggcccccaggtcctcccggacctcccggtgtcacgggtatggacggccagccggggccaaaaggaaatgtgggtccccagggagagcctggccccccaggacagcagggtaatccaggcgcccagggtcttccaggcccccagggtgcaattggtcctccaggagaaaagggtcccttggggaaaccaggccttccaggaatgcccggtgctgacggacccccgggacaccctggcaaagaaggccctccaggagagaaaggaggtcagggtccacctggcccccagggtccgattggctacccaggtcctcgaggagtcaagggggccgatggcatccgtggtctgaagggcacaaagggcgagaagggtgaagacggctttcctgggtttaaaggagacatgggcatcaagggtgatcggggggagatcggcccacccggtcccaggggagaagatggccctgaaggcccaaagggtcgcggaggtcccaatggtgaccccggtcctctgggaccccctggggagaagggaaaactcggagtcccagggttaccagggtatccaggaagacaaggaccaaagggctctattggattccctggatttcctggcgccaatggagagaagggcggcagggggacccctggaaagccaggaccgcgggggcagcgaggcccaacgggtccgaggggtgaaagaggcccccggggcatcactgggaagcctggccccaagggcaactccggaggtgacggcccagctggccctcctggtgaacggggacccaatggaccccaaggacccacaggatttcctggaccaaagggcccccctggccctccaggcaaggatggactcccaggacaccctggacagagaggcgagactggtttccaaggcaagaccggccctccaggcccccccggcgtggtcggccctcagggtcccacgggagaaacgggcccaatgggtgagcgtggccaccctgggccccctggaccccccggtgaacaggggcttccgggccttgctggaaaagaagggacgaagggtgacccaggccctgcaggcctccctgggaaagatggccctccaggattacgtggtttccctggggaccgagggcttcctggtccagtgggagctcttggactgaaaggcaatgaagggccccctggcccaccaggccctgcgggatctccaggggagagaggtccagctggagccgctgggcccatcggaattccagggagacctgggccccagggacccccagggccggcaggagagaaaggggctcctggcgagaaaggcccacaaggcccagctggccgagacggtctccaggggcctgtggggctcccgggtccagctggccctgtgggtccccctggagaagacggagataagggagagatcggggagccggggcagaaaggaagcaagggggacaaaggagaacagggtcctcctgggcctacaggtcctcaaggccccatcggacagccaggcccctctggagctgacggcgagccggggcctcggggccagcagggccttttcgggcagaaaggtgatgaaggtcccagaggctttcctggaccccctgggccagtggggctgcagggtttgccaggacctccaggcgagaagggtgagacaggagacgtgggccagatgggccccccgggtccccctggcccccgaggaccctccggagctccaggtgctgatggcccacaaggtcccccaggtggaataggaaaccctggtgcagtgggagagaagggcgagcctggcgaagcaggtgagcctggccttccgggagaaggcggccccccgggacccaaaggagaaaggggagagaagggcgagtcaggcccttcaggtgctgccggaccccctggacccaaaggccctcccggagatgatggtcccaaaggcagccctggcccagtgggttttcctggagatcctggcccccccggagagcctggccccgcgggtcaagatggtccccctggtgacaaaggagatgatggtgaacccgggcagacgggatcccccggccctactggtgaaccaggtccatcggggcctccaggaaaaaggggtcccccaggccccgcaggccccgaaggcagacagggagagaaaggggccaagggagaagccggcttggaaggccctcctgggaagactggccccatcggcccccagggggcccctgggaagcccggaccggatggccttcgagggatccctggccctgtgggagaacaaggtctcccaggatccccaggcccggacggtccccccggccccatgggtcccccaggacttcccggcctcaaaggagattctggtcccaaaggtgaaaagggtcatccaggcctgatcgggctcatcggtcctccgggtgaacagggtgagaagggcgaccgtggtctccctggcccccagggctcctccggtcctaagggagaacagggtatcactggtccttctggcccgattgggcctcctgggccccctggcctgccgggtccgcctggtccaaaaggtgctaagggctcctcgggtccaactggcccgaagggtgaggcaggccacccaggacccccaggccccccgggccccccgggagaggtcatccagcccctgccaatccaggcatccaggacgcggcggaacatcgacgccagccagctgctggacgacgggaatggcgagaactacgtggactacgcggacggcatggaagagatcttcggctctctcaactctctgaagctggagattgagcagatgaaacggcccctgggcacgcagcagaaccccgcccgcacctgcaaggacctgcagctctgccaccccgacttcccagatggtgaatactgggtcgatcctaaccaaggatgctccagggattccttcaaggtttactgcaacttcacagccggggggtcgacatgcgtcttccctgacaagaagtccgaaggggccagaatcacttcttggcccaaagaaaacccgggctcctggttcagtgaattcaagcgtgggaaactgctctcctatgtggacgccgagggcaaccctgtgggtgtggtacagatgaccttcctgcggctgctgagcgcctctgcccaccagaacgtcacctaccactgctaccagtcagtggcctggcaggacgcagccacgggcagctacgacaaggccctccgcttcctgggctccaacgacgaggagatgtcctatgacaacaacccctacatccgcgccctggtggacggctgtgctaccaagaaaggctaccagaagacggttctggagatcgacacccccaaagtggagcaggtgcccatcgtggacatcatgttcaatgacttcggtgaagcgtcacagaaatttggatttgaagtggggccggcttgcttcatgggctaggagccgccgagcccgggctcccgagagcaacctcgtgacctcagcatgccattcgttcgtgagtgtcccgtgcacgtcctgatcctggacagtgaaggcttctccctcccctcccacctgacttcatctacgcctcggcaccacggggtgtgggaccccagcccggagagaacagagggaaggagccgcgcccccacctggagctgaatcacatgacctagctgcaccccagcgcctgggcccgccccacgctctgtccacacccacgcgccccgggagcggggccatgcctccagccccccagctcgcccgacccatcctgttcgtgaataggtctcaggggttgggggagggactgccagatttggacactatatttttttctaaattcaacttgaagatgtgtatttcccctgaccttcaaaaaatgttccaaggtaagcctcgtaaaggtcatcccaccatcaccaaagcctccgtttttaacaacctccaacacgatccatttagaggccaaatgtcattctgcaggtgccttcccgatggattaaaggtgcttatgtttttgtgagttttaagtaaatataagatanaagcttatgaaccgtgacctgaggggggccggacccat

SEQ ID NO: 74400 - DNA, 3807 bp, Homo sapiens
gcttgccctgggttcctagaagacaaacatagacagcgagtgtcatggattcttctttttttagaaaaacaacccatgattgtaatatctataatactctgcatctttctttccgtgtcagtccacaaactttgttttagttccgtataggagcaggcgttcggatttgccataggaaattggagagcgtatacgaagagaaagacagagataaacattaccactcaggaaaacccctttatcactttggtctgtctcagtgtctgtggctccctgtctgtttttagacgtgactgtggccagcgaagggccacctcggacctgccgtttcgtcacctggcccctctgttgagcctgttccccttccaggggaggctgaccatgatgtaaagcttcctgtgccatggctgtgctgcgtgctaactggcccaccgtggccgagcatgagacgtggctccctcaaatgccccttcctgtcttcattttcccacagggtcatccaggcctgatcgggctcatcggtcctccgggtgaacagggtgagaagggcgaccgtggtctccctggcccccagggctcctccggtcctaagggagaacagggtatcactggtccttctggcccgattgggcctcctgggccccctggcctgccgggtccgcctggtccaaaaggtgctaagggctcctcgggtccaactggcccgaagggtgaggcaggccacccaggacccccaggccccccgggccccccgggagaggtcatccagcccctgccaatccaggcatccaggacgcggcggaacatcgacgccagccagctgctggacgacgggaatggcgagaactacgtggactacgcggacggcatggaagagatcttcggctctctcaactctctgaagctggagattgagcagatgaaacggcccctgggcacgcagcagaaccccgcccgcacctgcaaggacctgcagctctgccaccccgacttcccagatggtgaatactgggtcgatcctaaccaaggatgctccagggattccttcaaggtttactgcaacttcacagccggggggtcgacatgcgtcttccctgacaagaagtccgaaggggccagaatcacttcttggcccaaagaaaacccgggctcctggttcagtgaattcaagcgtgggaaactgctctcctatgtggacgccgagggcaaccctgtgggtgtggtacagatgaccttcctgcggctgctgagcgcctctgcccaccagaacgtcacctaccactgctaccagtcagtggcctggcaggacgcagccacgggcagctacgacaaggccctccgcttcctgggctccaacgacgaggagatgtcctatgacaacaacccctacatccgcgccctggtggacggctgtgctaccaagaaaggctaccagaagacggttctggagatcgacacccccaaagtggagcaggtgcccatcgtggacatcatgttcaatgacttcggtgaagcgtcacagaaatttggatttgaagtggggccggcttgcttcatgggctaggagccgccgagcccgggctcccgagagcaacctcgtgacctcagcatgccattcgttcgtgagtgtcccgtgcacgtcctgatcctggacagtgaaggcttctccctcccctcccacctgacttcatctacgcctcggcaccacggggtgtgggaccccagcccggagagaacagagggaaggagccgcgcccccacctggagctgaatcacatgacctagctgcaccccagcgcctgggcccgccccacgctctgtccacacccacgcgccccgggagcggggccatgcctccagccccccagctcgcccgacccatcctgttcgtgaataggtctcaggggttgggggagggactgccagatttggacactatatttttttctaaattcaacttgaagatgtgtatttcccctgaccttcaaaaaatgttccaaggtaagcctcgtaaaggtcatcccaccatcaccaaagcctccgtttttaacaacctccaacacgatccatttagaggccaaatgtcattctgcaggtgccttcccgatggattaaaggtgcttatgtttttgtgagttttaagtaaatatttgtattgtattgttataaatgttaagtgtgcctggctttcaatcatgcacggaaacccagtctcagtcccacggacagaatgggcgaggcatggattctgggttgcagtaccgttctgattagaaataggaagtctccccacccccgccctggccaagaacgtgcaataaattggaagtttgccccggggcagcaagaatttatgctgccattgaaaagcaggtaccagtgccccttttcagacagtttttgattcgctctagactttttttttttttaatagggagggaaaaaatttgataattttcttttttctacatgcacttaagactaaaacacaggtttggattaattttatttgcttcctttttccgcttttcttcccgcagagcctgatgggagaatgtccagggcagggaaaccacattttttgtaggtgataactcaatgaaaattggtgcttattttttacacttctctcttgtggctctcttgtggtgctatctgttttaaggtctccttgaaggcgcactggggtccctggccatgcctcgttctccctgctttctttatcctgttattgcctccacagtctgttgccaaggactctaagatcaatgcacgtcactttcctttccactgggcaggatagccaagcacactccctcctgcgctctcccgccccggtgcgtccactcccgagggctgttatgaggactgggttgtgcctacttgatttgaaaacacacacaagcaataaaaagcctcttcctgcattgtctgtggtgtgaccatagcagattatatttggttcctgaatgtttgtggtgctaatttctgtgtttgttccaagccgttcagtcatgccatgcgctgcctcggtagatggagtaatgtacaatgaactccatgagtctctccagggctgcctgcagcacgtcttttccaagtagcctatttggattcccatctcaaatgtcctggatgcgagcgtcagcggctccagagctcggggcgggtgaggtcccctttggggaaccctttcctggccatcgaggtcggggggctgccgtctgtgggcaggaggacccgaggggcagccaggaaaggcgatctcttcactgtgaaaagttgcccgggtgcagcgccttttccttctaccatgggaaatgcaggctgggcccttggggtgagcctgcggggctctggtgctgtccccgacccccaccaccaccagaatgcagttccagcttaggaagccacaaacaagccacccaggaggaacaaaacaccgccagcgtggattttccaaatttccctggaaagtaagtctcgctcttgccaaagaaaagtctggcttggagagtctctggagcccaggatgccagcatgtgccaatgactgtcaccttcatctcttcaaaagaaaagccatagccgaggactgtcccgcgacccccgtggactgcgtctaggtcatgtgattctgttttcatttctcatcccatccaatttgtccttttctcctgtcattttcttcctctgtggtcccttcaaagttgttataatttgtactgaacttcaaaatgtgtcccgttctccccagaccactctagccacagtatattgcaataaaattacttcttatatttgcaga

SEQ ID NO: 74401 - DNA, 1669 bp, Homo sapiens
  misc_feature (15)..(15): n is a, c, g, or t
tcagctggtacgccntggggtttggatatgtcgaccacgcgcttctggctttcaatcatgcacggaaacccagtctcagtcccacggacagaatgggcgaggcatggattctgggttgcagtaccgttctgattagaaataggaagtctccccacccccgccctggccaagaacgtgcaataaattggaagtttgccccggggcagcaagaatttatgctgccattgaaaagcaggtaccagtgccccttttcagacagtttttgattcgctctagactttttttttttttaatagggagggaaaaaatttgataattttcttttttctacatgcacttaagactaaaacacaggtttggattaattttatttgcttcctttttccgcttttcttcccgcagagcctgatgggagaatgtccagggcagggaaaccacattttttgtaggtgataactcaatgaaaattggtgcttattttttacacttctctcttgtggctctcttgtggtgctatctgttttaaggtctccttgaaggcgcactggggtccctggccatgcctcgttctccctgctttctttatcctgttattgcctccacagtctgttgccaaggactctaagatcaatgcacgtcactttcctttccactgggcaggatagccaagcacactccctcctgcgctctcccgccccggtgcgtccactcccgagggctgttatgaggactgggttgtgcctacttgatttgaaaacacacacaagcaataaaaagcctcttcctgcattgtctgtggtgtgaccatagcagattatatttggttcctgaatgtttgtggtgctaatttctgtgtttgttccaagccgttcagtcatgccatgcgctgcctcggtagatggagtaatgtacaatgaactccatgagtctctccagggctgcctgcagcacgtcttttccaagtagcctatttggattcccatctcaaatgtcctggatgcgagcgtcagcggctccagagctcggggcgggtgaggtcccctttggggaaccctttcctggccatcgaggtcggggggctgccgtctgtgggcaggaggacccgaggggcagccaggaaaggcgatctcttcactgtgaaaagttgcccgggtgcagcgccttttccttctaccatgggaaatgcaggctgggcccttggggtgagcctgcggggctctggtgctgtccccgacccccaccaccaccagaatgcagttccagcttaggaagccacaaacaagccacccaggaggaacaaaacaccgccagcgtggattttccaaatttccctggaaagtaagtctcgctcttgccaaagaaaagtctggcttggagagtctctggagcccaggatgccagcatgtgccaatgactgtcaccttcatctcttcaaaagaaaagccatagccgaggactgtcccgcgacccccgtggactgcgtctaggtcatgtgattctgttttcatttctcatcccatccaatttgtccttttctcctgtcattttcttcctctgtggtcccttcaaagttgttataatttgtactgaacttcaaaatgtgtcccgttctccccagaccactctagccacagtatattgcaataaaattacttcttatatttgcaga

SEQ ID NO: 74402 - DNA, 1682 bp, Homo sapiens
ctactaaattcgcggccgcgtcgacttgtattgtattgttataaatgttaagtgtgcctggctttcaatcatgcacggaaacccagtctcagtcccacggacagaatgggcgaggcatggattctgggttgcagtaccgttctgattagaaataggaagtctccccacccccgccctggccaagaacgtgcaataaattggaagtttgccccggggcagcaagaatttatgctgccattgaaaagcaggtaccagtgccccttttcagacagtttttgattcgctctagactttttttttttttaatagggagggaaaaaatttgataattttcttttttctacatgcacttaagactaaaacacaggtttggattaattttatttgcttcctttttccgcttttcttcccgcagagcctgatgggagaatgtccagggcagggaaaccacattttttgtaggtgataactcaatgaaaattggtgcttattttttacacttctctcttgtggctctcttgtggtgctatctgttttaaggtctccttgaaggcgcactggggtccctggccatgcctcgttctccctgctttctttatcctgttattgcctccacagtctgttgccaaggactctaagatcaatgcacgtcactttcctttccactgggcaggatagccaagcacactccctcctgcgctctcccgccccggtgcgtccactcccgagggctgttatgaggactgggttgtgcctacttgatttgaaaacacacacaagcaataaaaagcctcttcctgcattgtctgtggtgtgaccatagcagattatatttggttcctgaatgtttgtggtgctaatttctgtgtttgttccaagccgttcagtcatgccatgcgctgcctcggtagatggagtaatgtacaatgaactccatgagtctctccagggctgcctgcagcacgtcttttccaagtagcctatttggattcccatctcaaatgtcctggatgcgagcgtcagcggctccagagctcggggcgggtgaggtcccctttggggaaccctttcctggccatcgaggtcggggggctgccgtctgtgggcaggaggacccgaggggcagccaggaaaggcgatctcttcactgtgaaaagttgcccgggtgcagcgccttttccttctaccatgggaaatgcaggctgggcccttggggtgagcctgcggggctctggtgctgtccccgacccccaccaccaccagaatgcagttccagcttaggaagccacaaacaagccacccaggaggaacaaaacaccgccagcgtggattttccaaatttccctggaaagtaagtctcgctcttgccaaagaaaagtctggcttggagagtctctggagcccaggatgccagcatgtgccaatgactgtcaccttcatctcttcaaaagaaaagccatagccgaggactgtcccgcgacccccgtggactgcgtctaggtcatgtgattctgttttcatttctcatcccatccaatttgtccttttctcctgtcattttcttcctctgtggtcccttcaaagttgttataatttgtactgaacttcaaaatgtgtcccgttctccccagaccactctagccacagtatattgcaataaaattacttcttatatttgcaga

SEQ ID NO: 74403 - DNA, 1259 bp, Homo sapiens
aagggagttcgtactggtgctaagggagttcgtgctggtgctaagggaattcgtgctggtgctaagggaattcgtgctggtgctaagggaattcgtgctggtgctatctgttttaaggtctccttgaaggcgcactggggtccctggccatgcctcgttctccctgctttctttatcctgttattgcctccacagtctgttgccaaggactctaagatcaatgcacgtcactttcctttccactgggcaggatagccaagcacactccctcctgcgctctcccgccccggtgcgtccactcccgagggctgttatgaggactgggttgtgcctacttgatttgaaaacacacacaagcaataaaaagcctcttcctgcattgtctgtggtgtgaccatagcagattatatttggttcctgaatgtttgtggtgctaatttctgtgtttgttccaagccgttcagtcatgccatgcgctgcctcggtagatggagtaatgtacaatgaactccatgagtctctccagggctgcctgcagcacgtcttttccaagtagcctatttggattcccatctcaaatgtcctggatgcgagcgtcagcggctccagagctcggggcgggtgaggtcccctttggggaaccctttcctggccatcgaggtcggggggctgccgtctgtgggcaggaggacccgaggggcagccaggaaaggcgatctcttcactgtgaaaagttgcccgggtgcagcgccttttccttctaccatgggaaatgcaggctgggcccttggggtgagcctgcggggctctggtgctgtccccgacccccaccaccaccagaatgcagttccagcttaggaagccacaaacaagccacccaggaggaacaaaacaccgccagcgtggattttccaaatttccctggaaagtaagtctcgctcttgccaaagaaaagtctggcttggagagtctctggagcccaggatgccagcatgtgccaatgactgtcaccttcatctcttcaaaagaaaagccatagccgaggactgtcccgcgacccccgtggactgcgtctaggtcatgtgattctgttttcatttctcatcccatccaatttgtccttttctcctgtcattttcttcctctgtggtcccttcaaagttgttataatttgtactgaacttcaaaatgtgtcccgttctccccagaccactctagccacagtatattgcaataaaattacttcttatatttgcaga

SEQ ID NO: 74404 - DNA, 4540 bp, Homo sapiens
  misc_feature (13)..(13): n is a, c, g, or t
  misc_feature (15)..(15): n is a, c, g, or t
gccgccccgcggncnaaagtcgagccctcccgcccgtgggcgagcgcgccagccgccccttccagaacagccgccgccacaaagaagaacggggggtgccgaggtccccatgacctcctaaagtggtgcggtccctgctgagtgcgctgcccgggccgtgacccgcgcccctgtgcgtccccgcgcgcctccgagcgcccctgtgcgccccggcccgcgccccgccggcatggacgtccatacccgctggaaagcgcgcagcgcgctccgcccgggcgccccgctgctgcccccgctgctgctgctgctgctgtgggcgccgcctccgagccgcgcagctcagccagcagatctcctgaaggttctagattttcacaacttgcctgatggaataacaaagacaacaggcttttgcgccacgcggcgatcttccaaaggcccggatgtcgcttacagagtcaccaaagacgcgcagctcagcgcacccaccaagcagctgtaccctgcgtctgcatttcccgaggacttctccatcctaacaactgtgaaagccaagaaaggcagccaggccttcctggtctccatctacaacgagcagggtatccagcagattgggctggagctgggccgctctcccgtcttcctctacgaggaccacacggggaagcctggcccggaagactaccccctcttccggggcatcaacctgtcagatggcaagtggcacagaattgctctcagcgtccacaagaaaaatgtcaccttgatcctcgactgtaaaaagaagaccaccaaattcctcgaccgcagcgaccaccccatgatcgacatcaatggcatcatcgtgtttggcacccggatcctggatgaggaggtgtttgagggtgacatccagcagctgctctttgtctcggaccaccgggcagcttatgattactgtgagcactacagccctgactgtgacaccgcagtacctgacaccccacagtcgcaggaccccaatccagatgaatattacacggaaggagacggcgagggtgagacctattactacgaatacccctactacgaagaccccgaagacctagggaaggagcccacccccagcaagaagcccgtggaagctgccaaagaaaccacagaggtccccgaggagctgaccccgacccccacggaagctgctcccatgcctgaaaccagtgaaggggctgggaaggaagaggacgtcggcatcggggactatgactacgtgcccagtgaggactactacacgccctcaccgtatgatgacctcacctatggcgagggggaggagaaccccgaccagcccacagacccaggcgctggggccgaaattcccaccagcaccgccgacacctccaactcctccaatccagctccgcctccaggggaaggtgcggatgacttggagggggagttcactgaggaaacgatccggaaccttgacgagaactactacgacccctactacgaccccaccagctccccgtcggagatcgggccgggaatgccggcgaaccaggataccatctatgaagggattggaggacctcggggcgagaaaggccaaaagggagaaccagcgattatcgagccgggcatgctcatcgagggcccgcctggcccagaaggccccgcgggtcttcccggacctccaggaaccatgggtcccactggccaagtcggggaccctggagaaaggggcccccctggacgcccaggccttcctggggccgatggcctgcccggtcctccaggaaccatgctcatgctgcccttccggtttggaggtggcggcgatgcgggctccaaaggccccatggtctcagcccaggagtcccaggcgcaagccattctccagcaggccaggttggcactgaggggaccagctggcccgatgggtctcacagggagacctggccctgtgggtccccctgggagcggaggtttgaagggcgagccgggagacgtggggcctcagggtcctcgaggtgtgcaaggcccgcctggtccggccgggaagcccggaagacggggtcgggctgggagtgatggagccagaggaatgcctggacaaactggccccaagggtgaccggggtttcgacggcctggctgggttgccaggcgagaagggccacaggggtgaccctggtccttccggcccaccaggacctccgggagacgatggagaaaggggtgacgacggagaagttgggcccagggggctgcctgggaagcccgggccacgtggtctgcttgggccgaaagggcccccaggtcctcccggacctcccggtgtcacgggtatggacggccagccggggccaaaaggaaatgtgggtccccagggagagcctggccccccaggacagcagggtaatccaggcgcccagggtcttccaggcccccagggtgcaattggtcctccaggagaaaagggtcccttggggaaaccaggccttccaggaatgcccggtgctgacggacccccgggacaccctggcaaagaaggccctccaggagagaaaggaggtcagggtccacctggcccccagggtccgattggctacccaggtcctcgaggagtcaagggggccgatggcatccgtggtctgaagggcacaaagggcgagaagggtgaagacggctttcctgggtttaaaggagacatgggcatcaagggtgatcggggggagatcggcccacccggtcccaggggagaagatggccctgaaggcccaaagggtcgcggaggtcccaatggtgaccccggtcctctgggaccccctggggagaagggaaaactcggagtcccagggttaccagggtatccaggaagacaaggaccaaagggctctattggattccctggatttcctggcgccaatggagagaagggcggcagggggacccctggaaagccaggaccgcgggggcagcgaggcccaacgggtccgaggggtgaaagaggcccccggggcatcactgggaagcctggccccaagggcaactccggaggtgacggcccagctggccctcctggtgaacggggacccaatggaccccaaggacccacaggatttcctggaccaaagggcccccctggccctccaggcaaggatggactcccaggacaccctggacagagaggcgagactggtttccaaggcaagaccggccctccaggcccccccggcgtggtcggccctcagggtcccacgggagaaacgggcccaatgggtgagcgtggccaccctgggccccctggaccccccggtgaacaggggcttccgggccttgctggaaaagaagggacgaagggtgacccaggccctgcaggcctccctgggaaagatggccctccaggattacgtggtttccctggggaccgagggcttcctggtccagtgggagctcttggactgaaaggcaatgaagggccccctggcccaccaggccctgcgggatctccaggggagagaggtccagctggagccgctgggcccatcggaattccagggagacctgggccccagggacccccagggccggcaggagagaaaggggctcctggcgagaaaggcccacaaggcccagctggccgagacggtctccaggggcctgtggggctcccgggtccagctggccctgtgggtccccctggagaagacggagataagggagagatcggggagccggggcagaaaggaagcaagggggacaaaggagaacagggtcctcctgggcctacaggtcctcaaggccccatcggacagccaggcccctctggagctgacggcgagccggggcctcggggccagcagggccttttcgggcagaaaggtgatgaaggtcccagaggctttcctggaccccctgggccagtggggctgcagggtttgccaggacctccaggcgagaagggtgagacaggagacgtgggccagatgggccccccgggtccccctggcccccgaggaccctccggagctccaggtgctgatggcccacaaggtcccccaggtggaataggaaaccctggtgcagtgggagagaagggcgagcctggcgaagcaggtgagcctggccttccgggagaaggcggccccccgcccttcaaagttgttataatttgtactgaacttcaaaatgtgtcccgttctccccagaccactctagccacagtatattgcaataaaattacttcttatatttgcagaaaaatcttttggtgtaattttattttttcctctcaatatatataattggacaaacgctggcaaaaagaaaaaaatggtaagcaaaaaacccaagataaagtttcgaggacatcaggccttttgaaatacaatgtcaaatgacacattgtacgttttcaaaaaatccgctagacatgtcataagttttaactgtaatgcccaggaaaggatatcttaaaatattctaaacttgtgtaacaaaggaataattaactgtaatagtttttcaataaatcgagttgggtgtttccaccgtaa

SEQ ID NO: 74405 - DNA, 810 bp, Homo sapiens
  misc_feature (13)..(13): n is a, c, g, or t
  misc_feature (15)..(15): n is a, c, g, or t
gccgccccgcggncnaaagtcgagccctcccgcccgtgggcgagcgcgccagccgccccttccagaacagccgccgccacaaagaagaacggggggtgccgaggtccccatgacctcctaaagtggtgcggtccctgctgagtgcgctgcccgggccgtgacccgcgcccctgtgcgtccccgcgcgcctccgagcgcccctgtgcgccccggcccgcgccccgccggcatggacgtccatacccgctggaaagcgcgcagcgcgctccgcccgggcgccccgctgctgcccccgctgctgctgctgctgctgtgggcgccgcctccgagccgcgcagctcagccagcagatctcctgaaggttctagattttcacaacttgcctgatggaataacaaagacaacaggcttttgcgccacgcggcgatcttccaaaggcccggatgtcgcttacagagtcaccaaagacgcgcagctcagcgcacccaccaagcagctgtaccctgggccatgcctccagccccccagctcgcccgacccatcctgttcgtgaataggtctcaggggttgggggagggactgccagatttggacactatatttttttctaaattcaacttgaagatgtgtatttcccctgaccttcaaaaaatgttccaaggtaagcctcgtaaaggtcatcccaccatcaccaaagcctccgtttttaacaacctccaacacgatccatttagaggccaaatgtcattctgcaggtgccttcccgatggattaaaggtgcttatgtttttgtgagttttaagtaaatat

SEQ ID NO: 74406 - DNA, 641 bp, Homo sapiens
cggcagcctcacttgggtcccaggttcaccagtaacccaggggtgcgcgggccgctgacttcccccgccacccccggcaacacccctacccttcagaaagcactgcctgttactgcagtgccggcaagagcaggcgttagggattctttgcaggggcattttcatccagctccccgtcctcaattgtcaccccctttacccgtcacttcagtgcttcagtgctgatgggacgccacagagtgcactgagaaatgataccgggagctcaggggcctgggcttgctgaggcctcgccatgcagaacattcagattcaaactgggcctgcccaagaagcagggacgcagctctctccagcttcagaacgttacagctgggaacgcagagctcatgggaaagccattctcgagggatgggccccaagcccaccccgtccgggccatgtgctgccccccaagcgtgggggacctggtgctgagtgtggttgtttggagcggggaagggaccgccagggaggcgggtcctcttgcctagactagggcactctcttgtcccatattcagggtgaagacggctttcctgggtttaaaggagacatgggcatcaagggtgatcgggtgagcatctcaggtttgggatttg

SEQ ID NO: 74407 - DNA, 6005 bp, Homo sapiens
  misc_feature (13)..(13): n is a, c, g, or t
  misc_feature (15)..(15): n is a, c, g, or t
gccgccccgcggncnaaagtcgagccctcccgcccgtgggcgagcgcgccagccgccccttccagaacagccgccgccacaaagaagaacggggggtgccgaggtccccatgacctcctaaagtggtgcggtccctgctgagtgcgctgcccgggccgtgacccgcgcccctgtgcgtccccgcgcgcctccgagcgcccctgtgcgccccggcccgcgccccgccggcatggacgtccatacccgctggaaagcgcgcagcgcgctccgcccgggcgccccgctgctgcccccgctgctgctgctgctgctgtgggcgccgcctccgagccgcgcagctcagccagcagatctcctgaaggttctagattttcacaacttgcctgatggaataacaaagacaacaggcttttgcgccacgcggcgatcttccaaaggcccggatgtcgcttacagagtcaccaaagacgcgcagctcagcgcacccaccaagcagctgtaccctgcgtctgcatttcccgaggacttctccatcctaacaactgtgaaagccaagaaaggcagccaggccttcctggtctccatctacaacgagcagggtatccagcagattgggctggagctgggccgctctcccgtcttcctctacgaggaccacacggggaagcctggcccggaagactaccccctcttccggggcatcaacctgtcagatggcaagtggcacagaattgctctcagcgtccacaagaaaaatgtcaccttgatcctcgactgtaaaaagaagaccaccaaattcctcgaccgcagcgaccaccccatgatcgacatcaatggcatcatcgtgtttggcacccggatcctggatgaggaggtgtttgagggtgacatccagcagctgctctttgtctcggaccaccgggcagcttatgattactgtgagcactacagccctgactgtgacaccgcagtacctgacaccccacagtcgcaggaccccaatccagatgaatattacacggaaggagacggcgagggtgagacctattactacgaatacccctactacgaagaccccgaagacctagggaaggagcccacccccagcaagaagcccgtggaagctgccaaagaaaccacagaggtccccgaggagctgaccccgacccccacggaagctgctcccatgcctgaaaccagtgaaggggctgggaaggaagaggacgtcggcatcggggactatgactacgtgcccagtgaggactactacacgccctcaccgtatgatgacctcacctatggcgagggggaggagaaccccgaccagcccacagacccaggcgctggggccgaaattcccaccagcaccgccgacacctccaactcctccaatccagctccgcctccaggggaaggtgcggatgacttggagggggagttcactgaggaaacgatccggaaccttgacgagaactactacgacccctactacgaccccaccagctccccgtcggagatcgggccgggaatgccggcgaaccaggataccatctatgaagggattggaggacctcggggcgagaaaggccaaaagggagaaccagcgattatcgagccgggcatgctcatcgagggcccgcctggcccagaaggccccgcgggtcttcccggacctccaggaaccatgggtcccactggccaagtcggggaccctggagaaaggggcccccctggacgcccaggccttcctggggccgatggcctgcccggtcctccaggaaccatgctcatgctgcccttccggtttggaggtggcggcgatgcgggctccaaaggccccatggtctcagcccaggagtcccaggcgcaagccattctccagcaggccaggttggcactgaggggaccagctggcccgatgggtctcacagggagacctggccctgtgggtccccctgggagcggaggtttgaagggcgagccgggagacgtggggcctcagggtcctcgaggtgtgcaaggcccgcctggtccggccgggaagcccggaagacggggtcgggctgggagtgatggagccagaggaatgcctggacaaactggccccaagggtgaccggggtttcgacggcctggctgggttgccaggcgagaagggccacaggggtgaccctggtccttccggcccaccaggacctccgggagacgatggagaaaggggtgacgacggagaagttgggcccagggggctgcctgggaagcccgggccacgtggtctgcttgggccgaaagggcccccaggtcctcccggacctcccggtgtcacgggtatggacggccagccggggccaaaaggaaatgtgggtccccagggagagcctggccccccaggacagcagggtaatccaggcgcccagggtcttccaggcccccagggtgcaattggtcctccaggagaaaagggtcccttggggaaaccaggccttccaggaatgcccggtgctgacggacccccgggacaccctggcaaagaaggccctccaggagagaaaggaggtcagggtccacctggcccccagggtccgattggctacccaggtcctcgaggagtcaagggggccgatggcatccgtggtctgaagggcacaaagggcgagaagggtgaagacggctttcctgggtttaaaggagacatgggcatcaagggtgatcggggggagatcggcccacccggtcccaggggagaagatggccctgaaggcccaaagggtcgcggaggtcccaatggtgaccccggtcctctgggaccccctggggagaagggaaaactcggagtcccagggttaccagggtatccaggaagacaaggaccaaagggctctattggattccctggatttcctggcgccaatggagagaagggcggcagggggacccctggaaagccaggaccgcgggggcagcgaggcccaacgggtccgaggggtgaaagaggcccccggggcatcactgggaagcctggccccaagggcaactccggaggtgacggcccagctggccctcctggtgaacggggacccaatggaccccaaggacccacaggatttcctggaccaaagggcccccctggccctccaggcaaggatggactcccaggacaccctggacagagaggcgagactggtttccaaggcaagaccggccctccaggcccccccggcgtggtcggccctcagggtcccacgggagaaacgggcccaatgggtgagcgtggccaccctgggccccctggaccccccggtgaacaggggcttccgggccttgctggaaaagaagggacgaagggtgacccaggccctgcaggcctccctgggaaagatggccctccaggattacgtggtttccctggggaccgagggcttcctggtccagtgggagctcttggactgaaaggcaatgaagggccccctggcccaccaggccctgcgggatctccaggggagagaggtccagctggagccgctgggcccatcggaattccagggagacctgggccccagggacccccagggccggcaggagagaaaggggctcctggcgagaaaggcccacaaggcccagctggccgagacggtctccaggggcctgtggggctcccgggtccagctggccctgtgggtccccctggagaagacggagataagggagagatcggggagccggggcagaaaggaagcaagggggacaaaggagaacagggtcctcctgggcctacaggtcctcaaggccccatcggacagccaggcccctctggagctgacggcgagccggggcctcggggccagcagggccttttcgggcagaaaggtgatgaaggtcccagaggctttcctggaccccctgggccagtggggctgcagggtttgccaggacctccaggcgagaagggtgagacaggagacgtgggccagatgggccccccgggtccccctggcccccgaggaccctccggagctccaggtgctgatggcccacaaggtcccccaggtggaataggaaaccctggtgcagtgggagagaagggcgagcctggcgaagcaggtgagcctggccttccgggagaaggcggccccccgggacccaaaggagaaaggggagagaagggcgagtcaggcccttcaggtgctgccggaccccctggacccaaaggccctcccggagatgatggtcccaaaggcagccctggcccagtgggttttcctggagatcctggcccccccggagagcctggccccgcgggtcaagatggtccccctggtgacaaaggagatgatggtgaacccgggcagacgggatcccccggccctactggtgaaccaggtccatcggggcctccaggaaaaaggggtcccccaggccccgcaggccccgaaggcagacagggagagaaaggggccaagggagaagccggcttggaaggccctcctgggaagactggccccatcggcccccagggggcccctgggaagcccggaccggatggccttcgagggatccctggccctgtgggagaacaaggtctcccaggatccccaggcccggacggtccccccggccccatgggtcccccaggacttcccggcctcaaaggagattctggtcccaaaggtgaaaagggtcatccaggcctgatcgggctcatcggtcctccgggtgaacagggtgagaagggcgaccgtggtctccctggcccccagggctcctccggtcctaagggagaacagggtatcactggtccttctggcccgattgggcctcctgggccccctggcctgccgggtccgcctggtccaaaaggtgctaagggctcctcgggtccaactggcccgaagggtgaggcaggccacccaggacccccaggccccccgggccccccgggagaggtcatccagcccctgccaatccaggcatccaggacgcggcggaacatcgacgccagccagctgctggacgacgggaatggcgagaactacgtggactacgcggacggcatggaagagatcttcggctctctcaactctctgaagctggagattgagcagatgaaacggcccctgggcacgcagcagaaccccgcccgcacctgcaaggacctgcagctctgccaccccgacttcccagatggtgaatactgggtcgatcctaaccaaggatgctccagggattccttcaaggtttactgcaacttcacagccggggggtcgacatgcgtcttccctgacaagaagtccgaaggggccagaatcacttcttggcccaaagaaaacccgggctcctggttcagtgaattcaagcgtgggaaactgctctcctatgtggacgccgagggcaaccctgtgggtgtggtacagatgaccttcctgcggctgctgagcgcctctgcccaccagaacgtcacctaccactgctaccagtcagtggcctggcaggacgcagccacgggcagctacgacaaggccctccgcttcctgggctccaacgacgaggagatgtcctatgacaacaacccctacatccgcgccctggtggacggctgtgctaccaagaaaggctaccagaagacggttctggagatcgacacccccaaagtggagcaggtgcccatcgtggacatcatgttcaatgacttcggtgaagcgtcacagaaatttggatttgaagtggggccggcttgcttcatgggctaggagccgccgagcccgggctcccgagagcaacctcgtgacctcagcaagaagcccgtggaagctgccaaagaaaccacagaggtccccgaggagctgaccccgacccccacggaagctgctcccatgcctgaaaccagtgaaggggctgggaaggaagaggacgtcggcatcggggactatgactacgtgcccagtgaggactactacacgccctcaccgtatgatgacctcacctatggcgaggggatggagcacccat

SEQ ID NO: 74408 - DNA, 3146 bp, Homo sapiens
cgggcggatcatgaggtcaggagatcgagaccatcctggctaacacggtgaaaccccgtctctacttaaaatacaaaaaattagccgggcgtggtggcgggcacctgtagtcccagctgctccagaggctgaggcaggagaatggcatgaacccgggacgcagaacgcgccgggaatggcgagaactacgtggactacgcggacggcatggaagagatcttcggctctctcaactctctgaagctggagattgagcagatgaaacggcccctgggcacgcagcagaaccccgcccgcacctgcaaggacctgcagctctgccaccccgacttcccagatggtgaatactgggtcgatcctaaccaaggatgctccagggattccttcaaggtttactgcaacttcacagccggggggtcgacatgcgtcttccctgacaagaagtccgaaggggccagaatcacttcttggcccaaagaaaacccgggctcctggttcagtgaattcaagcgtgggaaactgctctcctatgtggacgccgagggcaaccctgtgggtgtggtacagatgaccttcctgcggctgctgagcgcctctgcccaccagaacgtcacctaccactgctaccagtcagtggcctggcaggacgcagccacgggcagctacgacaaggccctccgcttcctgggctccaacgacgaggagatgtcctatgacaacaacccctacatccgcgccctggtggacggctgtgctaccaagaaaggctaccagaagacggttctggagatcgacacccccaaagtggagcaggtgcccatcgtggacatcatgttcaatgacttcggtgaagcgtcacagaaatttggatttgaagtggggccggcttgcttcatgggctaggagccgccgagcccgggctcccgagagcaacctcgtgacctcagcatgccattcgttcgtgagtgtcccgtgcacgtcctgatcctggacagtgaaggcttctccctcccctcccacctgacttcatctacgcctcggcaccacggggtgtgggaccccagcccggagagaacagagggaaggagccgcgcccccacctggagctgaatcacatgacctagctgcaccccagcgcctgggcccgccccacgctctgtccacacccacgcgccccgggagcggggccatgcctccagccccccagctcgcccgacccatcctgttcgtgaataggtctcaggggttgggggagggactgccagatttggacactatatttttttctaaattcaacttgaagatgtgtatttcccctgaccttcaaaaaatgttccaaggtaagcctcgtaaaggtcatcccaccatcaccaaagcctccgtttttaacaacctccaacacgatccatttagaggccaaatgtcattctgcaggtgccttcccgatggattaaaggtgcttatgtttttgtgagttttaagtaaatatttgtattgtattgttataaatgttaagtgtgcctggctttcaatcatgcacggaaacccagtctcagtcccacggacagaatgggcgaggcatggattctgggttgcagtaccgttctgattagaaataggaagtctccccacccccgccctggccaagaacgtgcaataaattggaagtttgccccggggcagcaagaatttatgctgccattgaaaagcaggtaccagtgccccttttcagacagtttttgattcgctctagactttttttttttttaatagggagggaaaaaatttgataattttcttttttctacatgcacttaagactaaaacacaggtttggattaattttatttgcttcctttttccgcttttcttcccgcagagcctgatgggagaatgtccagggcagggaaaccacattttttgtaggtgataactcaatgaaaattggtgcttattttttacacttctctcttgtggctctcttgtggtgctatctgttttaaggtctccttgaaggcgcactggggtccctggccatgcctcgttctccctgctttctttatcctgttattgcctccacagtctgttgccaaggactctaagatcaatgcacgtcactttcctttccactgggcaggatagccaagcacactccctcctgcgctctcccgccccggtgcgtccactcccgagggctgttatgaggactgggttgtgcctacttgatttgaaaacacacacaagcaataaaaagcctcttcctgcattgtctgtggtgtgaccatagcagattatatttggttcctgaatgtttgtggtgctaatttctgtgtttgttccaagccgttcagtcatgccatgcgctgcctcggtagatggagtaatgtacaatgaactccatgagtctctccagggctgcctgcagcacgtcttttccaagtagcctatttggattcccatctcaaatgtcctggatgcgagcgtcagcggctccagagctcggggcgggtgaggtcccctttggggaaccctttcctggccatcgaggtcggggggctgccgtctgtgggcaggaggacccgaggggcagccaggaaaggcgatctcttcactgtgaaaagttgcccgggtgcagcgccttttccttctaccatgggaaatgcaggctgggcccttggggtgagcctgcggggctctggtgctgtccccgacccccaccaccaccagaatgcagttccagcttaggaagccacaaacaagccacccaggaggaacaaaacaccgccagcgtggattttccaaatttccctggaaagtaagtctcgctcttgccaaagaaaagtctggcttggagagtctctggagcccaggatgccagcatgtgccaatgactgtcaccttcatctcttcaaaagaaaagccatagccgaggactgtcccgcgacccccgtggactgcgtctaggtcatgtgattctgttttcatttctcatcccatccaatttgtccttttctcctgtcattttcttcctctgtggtcccttcaaagttgttataatttgtactgaacttcaaaatgtgtcccgttctccccagaccactctagccacagtatattgcaataaaattacttcttatatttgcaga

SEQ ID NO: 74409 - DNA, 996 bp, Homo sapiens
ctgattagaaataggaagtctccccggtgcgtccactcccgagggctgttatgaggactgggttgtgcctacttgatttgaaaacacacacaagcaataaaaagcctcttcctgcattgtctgtggtgtgaccatagcagattatatttggttcctgaatgtttgtggtgctaatttctgtgtttgttccaagccgttcagtcatgccatgcgctgcctcggtagatggagtaatgtacaatgaactccatgagtctctccagggctgcctgcagcacgtcttttccaagtagcctatttggattcccatctcaaatgtcctggatgcgagcgtcagcggctccagagctcggggcgggtgaggtcccctttggggaaccctttcctggccatcgaggtcggggggctgccgtctgtgggcaggaggacccgaggggcagccaggaaaggcgatctcttcactgtgaaaagttgcccgggtgcagcgccttttccttctaccatgggaaatgcaggctgggcccttggggtgagcctgcggggctctggtgctgtccccgacccccaccaccaccagaatgcagttccagcttaggaagccacaaacaagccacccaggaggaacaaaacaccgccagcgtggattttccaaatttccctggaaagtaagtctcgctcttgccaaagaaaagtctggcttggagagtctctggagcccaggatgccagcatgtgccaatgactgtcaccttcatctcttcaaaagaaaagccatagccgaggactgtcccgcgacccccgtggactgcgtctaggtcatgtgattctgttttcatttctcatcccatccaatttgtccttttctcctgtcattttcttcctctgtggtcccttcaaagttgttataatttgtactgaacttcaaaatgtgtcccgttctccccagaccactctagccacagtatattgcaataaaattacttcttatatttgcaga

SEQ ID NO: 74410 - DNA, 1327 bp, Homo sapiens
  misc_feature (13)..(13): n is a, c, g, or t
  misc_feature (15)..(15): n is a, c, g, or t
gccgccccgcggncnaaagtcgagccctcccgcccgtgggcgagcgcgccagccgccccttccagaacagccgccgccacaaagaagaacggggggtgccgaggtccccatgacctcctaaagtggtgcggtccctgctgagtgcgctgcccgggccgtgacccgcgcccctgtgcgtccccgcgcgcctccgagcgcccctgtgcgccccggcccgcgccccgccggcatggacgtccatacccgctggaaagcgcgcagcgcgctccgcccgggcgccccgctgctgcccccgctgctgctgctgctgctgtgggcgccgcctccgagccgcgcagctcagccagcagatctcctgaaggttctagattttcacaacttgcctgatggaataacaaagacaacaggcttttgcgccacgcggcgatcttccaaaggcccggatgtcgcttacagagtcaccaaagacgcgcagctcagcgcacccaccaagcagctgtaccctgcgtctgcatttcccgaggacttctccatcctaacaactgtgaaagccaagaaaggcagccaggccttcctggtctccatctacaacgagcagggtatccagcagattgggctggagctgggccgctctcccgtcttcctctacgaggaccacacggggaagcctggcccggaagactaccccctcttccggggcatcaacctgtcagatggcaagtggcacagaattgctctcagcgtccacaagaaaaatgtcaccttgatcctcgacttgtcaccttcatctcttcaaaagaaaagccatagccgaggactgtcccgcgacccccgtggactgcgtctaggtcatgtgattctgttttcatttctcatcccatccaatttgtccttttctcctgtcattttcttcctctgtggtcccttcaaagttgttataatttgtactgaacttcaaaatgtgtcccgttctccccagaccactctagccacagtatattgcaataaaattacttcttatatttgcagaaaaatcttttggtgtaattttattttttcctctcaatatatataattggacaaacgctggcaaaaagaaaaaaatggtaagcaaaaaacccaagataaagtttcgaggacatcaggccttttgaaatacaatgtcaaatgacacattgtacgttttcaaaaaatccgctagacatgtcataagttttaactgtaatgcccaggaaaggatatcttaaaatattctaaacttgtgtaacaaaggaataattaactgtaatagtttttcaataaatcgagttgggtgtttccaccgtaa

SEQ ID NO: 74411 - DNA, 209 bp, Homo sapiens
ctgtgtgtgtccccaccctgctgagccccaacacccctgtccccccagctctcctatgtggacgccgagggcaaccctgtgggtgtggtacagatgaccttcctgcggctgctgagcgcctctgcccaccagaacgtcacctaccactgctaccagtcagtggcctggcaggacgcagccacgggcagctacgacaaggccctccgctt

SEQ ID NO: 74412 - DNA, 947 bp, Homo sapiens
gctgagtcaaaccctttgcagtctagaagggtttggtgtgcaggctctgcccacatgggacttccatgccgtttccatttcttccaaaccataatgctctcccttgcagaggtgcagagtagttaggtaaaggaaaatcccccggagtctctccatatctgctacagtgggcttacgcgtttcttgcattttgggggcagatcccagagacaaggagggcggcacatgagcagacatggcaccaggcccctgcccccttgggtcaccctgttccctccccatcccacaacagccgctgaccagagcagctcttccctcacaagccagtttgctccctttgcccctgaggctccacgggctgcagcttcccaggtctggggggtcgcattttcatagcctttgcatgtgtgtgtgtctttaagacatgcccgacagaaacaagagtcttggagatgacacgtaattcacctgccccgtggatcatttcaaacagataacgtgggaaaggtataagaaggtataaagtcatgaaagttgttcttgggaaaaagctcagggaagagttagagcccttccagaatgagccaggtgctaatttagaacagtcacctgcctgccaatgatgatgacgtgctcagccaccaagctgcgggccgggagaggagccgtaataagcgattccaccaagccttccagccactcctttgaaacctctttaaaatgaaatcctgaaataggaccgcatttccacaggcatcaagctgtcagcttcaaaggagaacaggcttctgaggcctggccccttcagcgcgcagctgaggcccccctccccgaggagaggagcagatgtttgagggcagagggcctgtcctgacagcacctgcgtggaggtggcaggaggggattgtttctaggccaggcgagaggagcctggcagcccctggagc

SEQ ID NO: 74413 - DNA, 186 bp, Homo sapiens
accctgtggtctttgtgtctgtgacccaggcccaccctccctacctgagtgacttattcttacctggaacccaagcttctgaccacagaattagcgctctcttccactgtatcagttttctcactcattgtctcttatgtttcgaaagagttgcctcagttgaggaatagccctgaagcctgtcct

SEQ ID NO: 74414 - DNA, 274 bp, Homo sapiens
atgcagaatgactgggccaggattcagacacaaatacaaaccaggatggtgaagggagaggattcagaaggtgaggatgacagtgggactctgtacaggagcccctcacaccctctactcaaaactatcaggtgcatattctgagctaggcacttttgacaggttctctggcttacttggaaaagaatcacatctttaaaaagtgacaacattgtatttacttgtctactttgaaaaatgaaataaacaacccccttggaggaaacagttaact

SEQ ID NO: 74415 - DNA, 1357 bp, Homo sapiens
gggcgcgcaagggggactgggacgttcaggcggaagtggcgtcaggggcgctttagggactggacttgcagtgtaaacagagacgctgcaaattgcttgtggacggtgtaggccgctgcaggccaccatgaaccggcttccggatgactacgacccctacgcggttgaagagcctagcgacgaggagccggctttgagcagctctgaggatgaagtggatgtgcttttacatggaactcctgaccaaaaacgaaaactcatcagagaatgtcttaccggagaaagtgaatcatctagtgaagatgaatttgaaaaggagatggaagctgaattaaattctaccatgaaaacaatggaggacaagttatcctctctgggaactggatcttcctcaggaaatggaaaagttgcaacagctccgacaaggtactacgatgatatatattttgattctgattccgaggatgaagacagagcagtacaggtgaccaagaaaaaaaagaagaaacaacacaagattccaacaaatgacgaattactgtatgatcctgaaaaagataacagagatcaggcctgggttgatgcacagagaaggggttaccatggtttgggaccacagagatcacgtcaacaacagcctgttccaaatagtgatgctgtcttgaattgtcctgcctgcatgaccacactttgccttgattgccaaaggcatgaatcatacaaaactcaatatagagcaatgtttgtaatgaattgttctattaacaaagaggaggttctaagatataaagcctcagagaacaggaagaaaaggcgggtccataagaagatgaggtctaaccgggaagatgctgccgagaaggcagagacagatgtggaagaaatctatcacccagtcatgtgcactgaatgttccactgaagtggcagtctacgacaaggatgaagtctttcattttttcaatgttttagcaagccattcctaaacagcccaactggcatttaattacccaatactgtatataaggcaaatatggacagttactttcctcttgcctgttcatatccttcagtgacattgaggaagcagtgtttctctttttaaaggagaatagttgtcaaccttcattcatctcttacatctctcaccctctccttttttttttctttgattttcccccttattgatgggactgatattcattctgtttttgatgaacatttggaaactgtcgggctttttattaaagctctgtagaattaaaatgttctggaattataagcaatctttgtttctgagtgttatttttattttggatatagctttgatgtaattaaactggaaactctttcctgaa

SEQ ID NO: 74416 - DNA, 717 bp, Homo sapiens
gggcgcgcaagggggactgggacgttcaggcggaagtggcgtcaggggcgctttagggactggacttgcagtgtaaacagagacgctgcaaattgcttgtggacggtgtaggccgctgcaggccaccatgaaccggcttccggatgactacgacccctacgcggttgaagagcctagcgacgaggagccggctttgagcagctctgaggatgaagtggatgtgcttttacatggaactcctgaccaaaaacgaaaactcatcagagaatgtcttaccggagaaagtgaatcatctagtgaagatgaatttgaaaaggagatggaagctgaattaaattctaccatgaaaacaatggaggacaagttatcctctctgggaactggatcttcctcaggaaatggaaaagttgcaacagctccgacaaggtactacgatgatatatattttgattctgattccgaggatgaagacagagcagaaaaagataacagagatcaggcctgggttgatgcacagagaaggggttaccatggtttgggaccacagagatcacgtcaacaacagcctgttccaaatagtgatgctgtcttgaattgtcctgcctgcatgaccacactttgccttgattgccaaaggcagacagtggctgaatggatcaacaaacaagactcaactatatgctgcctagaagaaacttgcttcacttgtaaggacac

SEQ ID NO: 74417 - DNA, 737 bp, Homo sapiens
gggcgcgcaagggggactgggacgttcaggcggaagtggcgtcaggggcgctttagggactggacttgcagtgtaaacagagacgctgcaaattgcttgtggacggtgtaggccgctgcaggccaccatgaaccggcttccggatgactacgacccctacgcggttgaagagcctagcgacgaggagccggctttgagcagctctgaggatgaagtggatgtgcttttacatggaactcctgaccaaaaacgaaaactcatcagagaatgtcttaccggagaaagtgaatcatctagtgaagatgaatttgaaaaggagatggaagctgaattaaattctaccatgaaaacaatggaggacaagttatcctctctgggaactggatcttcctcaggaaatggaaaagttgcaacagctccgacaaggtactacgatgatatatattttgattctgattccgaggatgaagacagagcagttctggtgaccaagaaaaaaaggacgatccatccaaggattccaacatttgacgatttactgtttgctcctggcttgtgaccacagaaatccacgcaacaacagcctgttccaaatagcgacgcgttccctgattgttctgcctggttgccactcttttccttggtttgctaagcctgtatcctccacacctcatctcagccactcgttgtatgacttggtctttaacaaatacgtggtctaagaaataaacctcaaa

SEQ ID NO: 74418 - DNA, 382 bp, Homo sapiens
tgctaggattacaggtgtgagccactgcgcccgtcccttttttaactttttagggaaaatataaataaatgtgtagcttgggaaatgagactcttcatttaaagaagtgtgaacttgacacatgattcttagccatatcctaatattttcaaaattagtacaggtgaccaagaaaaaaaagaagaaacaacacaagattccaacaaatgacgaattactgtatgatcctgaaaaagataacagagatcaggcctgggttgatgcacagagaagggggtaagaacttaaagttaatatttagaatctttagaaaaaaagattgaaagatgatttttactacatttccggcacagtatctacattaccggggggatcctcggta

SEQ ID NO: 74419 - DNA, 253 bp, Homo sapiens
gaagtcgccggtcaccgttgggagtcttaccggagaaagtgaatcatctagtgaagatgaatttgaaaaggagatggaagctgaattaaattctaccatgaaaacaatggaggacaagttatcctctctgggaactggatcttcctcaggaaatggaaaagttgcaacagctccgacaaggtactacgatgatatatattttgattctgattccgaggatgaagacagagcagtaagtaacctatttaccagg

SEQ ID NO: 74420 - DNA, 250 bp, Homo sapiens
ctactactacggggtgggcggccgctcgacctcttaccggagaaagtgaatcatctagtgaagatgaatttgaaaaggagatggaagctgaattaaattctaccatgaaaacaatggaggacaagttatcctctctgggaactggatcttcctcaggaaatggaaaagttgcaacagctccgacaaggtactacgatgatatatattttgattcttcatcctcggaatcagaatcagtcgacgcggccgg

SEQ ID NO: 74421 - DNA, 1543 bp, Homo sapiens
gggcgcgcaagggggactgggacgttcaggcggaagtggcgtcaggggcgctttagggactggacttgcagtgtaaacagagacgctgcaaattgcttgtggacggtgtaggccgctgcaggccaccatgaaccggcttccggatgactacgacccctacgcggttgaagagcctagcgacgaggagccggctttgagcagctctgaggatgaagtggatgtgcttttacatggaactcctgaccaaaaacgaaaactcatcagagaatgtcttaccggagaaagtgaatcatctagtgaagatgaatttgaaaaggagatggaagctgaattaaattctaccatgaaaacaatggaggacaagttatcctctctgggaactggatcttcctcaggaaatggaaaagttgcaacagctccgacaaggtactacgatgatatatattttgattctgattccgaggatgaagacagagcagtacaggtgaccaagaaaaaaaagaagaaacaacacaagattccaacaaatgacgaattactgtatgatcctgaaaaagataacagagatcaggcctgggttgatgcacagagaaggggttaccatggtttgggaccacagagatcacgtcaacaacagcctgttccaaatagtgatgctgtcttgaattgtcctgcctgcatgaccacactttgccttgattgccaaaggcatgaatcatacaaaactcaatatagagcaatgtttgtaatgaattgttctattaacaaagaggaggttctaagatataaagcctcagagaacaggaagaaaaggcgggtccataagaagatgaggtctaaccgggaagatgctgccgagaaggcagagacagatgtggaagaaatctatcacccagtcatgtgcactgaatgttccactgaagtggcagtctacgacaaggatgaagtctttcattttttcaatgttttagcaagccattcctaaacagcccaactggcatttaattacccaatactgtatataaggcaaatatggacagttactttcctcttgcctgttcatatccttcagtgacattgaggaagcagtgtttctctttttaaaggagaatagttgtcaaccttcattcatctcttacatctctcaccctctccttttttttttctttgattttcccccttattgatgggactgatattcattctgtttttgatgaacatttggaaactgtcgggctttttattaaagctctgtagaattaaaatgttctggaattataagcaatctttgtttctgagtgttatttttattttggatatagctttgatgtaattaaactggaaactctttcctgaaaaaaaaaaaaacaaaaaaaaaaaaaaagaaacaaaaaaaacaacagaaaatagaaaaaacacagagaaaaaatatagaaaaaagaaaaataagaagcacaactaagaaagaaacaaagaagagaagaggagagaaaaaagagagaaaaaaataaaaatgaaagtgatgaaaaacaaagtgtcaaaa

SEQ ID NO: 74422 - DNA, 1656 bp, Homo sapiens
gggcgcgcaagggggactgggacgttcaggcggaagtggcgtcaggggcgctttagggactggacttgcagtgtaaacagagacgctgcaaattgcttgtggacggtgtaggccgctgcaggccaccatgaaccggcttccggatgactacgacccctacgcggttgaagagcctagcgacgaggagccggctttgagcaggtgggctcccgccccaccctggcccccgaggatttgggtcgaggcctggctttggtcgcctccattcgttgcgcctgccgagcctacgcagaccctagcggctcgggagcctgtcgtgcctgttacttgtgcgaagccaaagggctttcctgatggggtcgcgcagtcccggggggaggcggtgccgatgtcgcctgtaggaagagggatattccggaatcacgggggaccgcgtgtaaatcttcaaaagcaatgagatcgaaacctgtctctacaccttagtagcagagtgacggaagctctgaggatgaagtggatgtgcttttacatggaactcctgaccaaaaacgaaaactcatcagagaatgtcttaccggagaaagtgaatcatctagtgaagatgaatttgaaaaggagatggaagctgaattaaattctaccatgaaaacaatggaggacaagttatcctctctgggaactggatcttcctcaggaaatggaaaagttgcaacagctccgacaaggtactacgatgatatatattttgattctgattccgaggatgaagacagagcagtacaggtgaccaagaaaaaaaagaagaaacaacacaagattccaacaaatgacgaattactgtatgatcctgaaaaagataacagagatcaggcctgggttgatgcacagagaaggggttaccatggtttgggaccacagagatcacgtcaacaacagcctgttccaaatagtgatgctgtcttgaattgtcctgcctgcatgaccacactttgccttgattgccaaaggcatgaatcatacaaaactcaatatagagcaatgtttgtaatgaattgttctattaacaaagaggaggttctaagatataaagcctcagagaacaggaagaaaaggcgggtccataagaagatgaggtctaaccgggaagatgctgccgagaaggcagagacagatgtggaagaaatctatcacccagtcatgtgcactgaatgttccactgaagtggcagtctacgacaaggatgaagtctttcattttttcaatgttttagcaagccattcctaaacagcccaactggcatttaattacccaatactgtatataaggcaaatatggacagttactttcctcttgcctgttcatatccttcagtgacattgaggaagcagtgtttctctttttaaaggagaatagttgtcaaccttcattcatctcttacatctctcaccctctccttttttttttctttgattttcccccttattgatgggactgatattcattctgtttttgatgaacatttggaaactgtcgggctttttattaaagctctgtagaattaaaatgttctggaattataagcaatctttgtttctgagtgttatttttattttggatatagctttgatgtaattaaactggaaactctttcctgaa

SEQ ID NO: 74423 - DNA, 1334 bp, Homo sapiens
gaagattggaaatatgcagaactggcttattaagtgagaatagctatatgtaatgtataagtacatcaaatgtaaccatgtaatacttaaaattgttgttggacagtgagatgctgggagtttaaaattattttaatttttaaatattcatattctttttgatttaaatgtatgctagctctgaggatgaagtggatgtgcttttacatggaactcctgaccaaaaacgaaaactcatcagagaatgtcttaccggagaaagtgaatcatctagtgaagatgaatttgaaaaggagatggaagctgaattaaattctaccatgaaaacaatggaggacaagttatcctctctgggaactggatcttcctcaggaaatggaaaagttgcaacagctccgacaaggtactacgatgatatatattttgattctgattccgaggatgaagacagagcagtacaggtgaccaagaaaaaaaagaagaaacaacacaagattccaacaaatgacgaattactgtatgatcctgaaaaagataacagagatcaggcctgggttgatgcacagagaaggggttaccatggtttgggaccacagagatcacgtcaacaacagcctgttccaaatagtgatgctgtcttgaattgtcctgcctgcatgaccacactttgccttgattgccaaaggcatgaatcatacaaaactcaatatagagcaatgtttgtaatgaattgttctattaacaaagaggaggttctaagatataaagcctcagagaacaggaagaaaaggcgggtccataagaagatgaggtctaaccgggaagatgctgccgagaaggcagagacagatgtggaagaaatctatcacccagtcatgtgcactgaatgttccactgaagtggcagtctacgacaaggatgaagtctttcattttttcaatgttttagcaagccattcctaaacagcccaactggcatttaattacccaatactgtatataaggcaaatatggacagttactttcctcttgcctgttcatatccttcagtgacattgaggaagcagtgtttctctttttaaaggagaatagttgtcaaccttcattcatctcttacatctctcaccctctccttttttttttctttgattttcccccttattgatgggactgatattcattctgtttttgatgaacatttggaaactgtcgggctttttattaaagctctgtagaattaaaatgttctggaattataagcaatctttgtttctgagtgttatttttattttggatatagctttgatgtaattaaactggaaactctttcctgaa

SEQ ID NO: 74424 - DNA, 1027 bp, Homo sapiens
ctagagatccccacacaatgaaaaatggaggacagttatctctctgggaactggatcttcctcaggaaatggaaaagttgcaacagctccgacaaggtactacgatgatatatattttgattctgattccgaggatgaagacagagcagtacaggtgaccaagaaaaaaaagaagaaacaacacaagattccaacaaatgacgaattactgtatgatcctgaaaaagataacagagatcaggcctgggttgatgcacagagaaggggttaccatggtttgggaccacagagatcacgtcaacaacagcctgttccaaatagtgatgctgtcttgaattgtcctgcctgcatgaccacactttgccttgattgccaaaggcatgaatcatacaaaactcaatatagagcaatgtttgtaatgaattgttctattaacaaagaggaggttctaagatataaagcctcagagaacaggaagaaaaggcgggtccataagaagatgaggtctaaccgggaagatgctgccgagaaggcagagacagatgtggaagaaatctatcacccagtcatgtgcactgaatgttccactgaagtggcagtctacgacaaggatgaagtctttcattttttcaatgttttagcaagccattcctaaacagcccaactggcatttaattacccaatactgtatataaggcaaatatggacagttactttcctcttgcctgttcatatccttcagtgacattgaggaagcagtgtttctctttttaaaggagaatagttgtcaaccttcattcatctcttacatctctcaccctctccttttttttttctttgattttcccccttattgatgggactgatattcattctgtttttgatgaacatttggaaactgtcgggctttttattaaagctctgtagaattaaaatgttctggaattataagcaatctttgtttctgagtgttatttttattttggatatagctttgatgtaattaaactggaaactctttcctgaa

SEQ ID NO: 74425 - DNA, 1239 bp, Homo sapiens
gggcgcgcaagggggactgggacgttcaggcggaagtggcgtcaggggcgctttagggactggacttgcagtgtaaacagagacgctgcaaattgcttgtggacggtgtaggccgctgcaggccaccatgaaccggcttccggatgactacgacccctacgcggttgaagagcctagcgacgaggagccggctttgagcagctctgaggatgaagtggatgtgcttttacatggaactcctgaccaaaaacgaaaactcatcagagaatgtcttaccggagaaagtgaatcatctagtgaagatgaatttgaaaaggagatggaagctgaattaaattctaccatgaaaacaatggaggacaagttatcctctctgggaactggatcttcctcaggaaatggaaaagttgcaacagctccgacaaggtactacgatgatatatattttgattctgattccgaggatgaagacagagcagttaccatggtttgggaccacagagatcacgtcaacaacagcctgttccaaatagtgatgctgtcttgaattgtcctgcctgcatgaccacactttgccttgattgccaaaggcatgaatcatacaaaactcaatatagagcaatgtttgtaatgaattgttctattaacaaagaggaggttctaagatataaagcctcagagaacaggaagaaaaggcgggtccataagaagatgaggtctaaccgggaagatgctgccgagaaggcagagacagatgtggaagaaatctatcacccagtcatgtgcactgaatgttccactgaagtggcagtctacgacaaggatgaagtctttcattttttcaatgttttagcaagccattcctaaacagcccaactggcatttaattacccaatactgtatataaggcaaatatggacagttactttcctcttgcctgttcatatccttcagtgacattgaggaagcagtgtttctctttttaaaggagaatagttgtcaaccttcattcatctcttacatctctcaccctctccttttttttttctttgattttcccccttattgatgggactgatattcattctgtttttgatgaacatttggaaactgtcgggctttttattaaagctctgtagaattaaaatgttctggaattataagcaatctttgtttctgagtgttatttttattttggatatagctttgatgtaattaaactggaaactctttcctgaa

SEQ ID NO: 74426 - DNA, 1303 bp, Homo sapiens
gggcgcgcaagggggactgggacgttcaggcggaagtggcgtcaggggcgctttagggactggacttgcagtgtaaacagagacgctgcaaattgcttgtggacggtgtaggccgctgcaggccaccatgaaccggcttccggatgactacgacccctacgcggttgaagagcctagcgacgaggagccggctttgagcagctctgaggatgaagtggatgtgcttttacatggaactcctgaccaaaaacgaaaactcatcagagaatgtcttaccggagaaagtgaatcatctagtgaagatgaatttgaaaaggagatggaagctgaattaaattctaccatgaaaacaatggaggacaagttatcctctctgggaactggatcttcctcaggaaatggaaaagttgcaacagctccgacaaggtactacgatgatatatattttgattctgattccgaggatgaagacagagcagtacaggtgaccaagaaaaaaaagaagaaacaacacaagattccaacaaatgacgaattactgtatgatcctgaaaaagataacagagatcaggcctgggttgatgcacagagaaggggttaccatggtttgggaccacagagatcacgtcaacaacagcctgttccaaatagtgatgctgtcttgaattgtcctgcctgcatgaccacactttgccttgattgccaaaggcatgaatcatacaaaactcaatatagagcaatgtttgtaatgaattgttctattaacaaagaggaggttctaagatataaagcctcagagaacaggaaggcagagacagatgtggaagaaatctatcacccagtcatgtgcactgaatgttccactgaagtggcagtctacgacaaggatgaagtctttcattttttcaatgttttagcaagccattcctaaacagcccaactggcatttaattacccaatactgtatataaggcaaatatggacagttactttcctcttgcctgttcatatccttcagtgacattgaggaagcagtgtttctctttttaaaggagaatagttgtcaaccttcattcatctcttacatctctcaccctctccttttttttttctttgattttcccccttattgatgggactgatattcattctgtttttgatgaacatttggaaactgtcgggctttttattaaagctctgtagaattaaaatgttctggaattataagcaatctttgtttctgagtgttatttttattttggatatagctttgatgtaattaaactggaaactctttcctgaa

SEQ ID NO: 74427 - DNA, 1511 bp, Homo sapiens
gggcgcgcaagggggactgggacgttcaggcggaagtggcgtcaggggcgctttagggactggacttgcagtgtaaacagagacgctgcaaattgcttgtggacggtgtaggccgctgcaggccaccatgaaccggcttccggatgactacgacccctacgcggttgaagagcctagcgacgaggagccggctttgagcagctctgaggatgaagtggatgtgcttttacatggaactcctgaccaaaaacgaaaactcatcagagaatgtcttaccggagaaagtgaatcatctagtgaagatgaatttgaaaaggagatggaagctgaattaaattctaccatgaaaacaatggaggacaagttatcctctctgggaactggatcttcctcaggaaatggaaaagttgcaacagctccgacaaggtactacgatgatatatattttgattctgattccgaggatgaagacagagcagtacaggtgaccaagaaaaaaaagaagaaacaacacaagattccaacaaatgacgaattactgtatgatcctgaaaaagataacagagatcaggcctgggttgatgcacagagaaggggttaccatggtttgggaccacagagatcacgtcaacaacagcctgttccaaatagtgatgctgtcttgaattgtcctgcctgcatgaccacactttgccttgattgccaaaggcatgaatcatacaaaactcaatatagagcaatgtttgtaatgaattgttctattaacaaagaggaggttctaagatataaagcctcagagaacaggaagaaaaggcgggtccataagaagatgaggtctaaccgggaagatgctgccgagaaggcagagacagatgtggaagaaatctatcacccagtcatgtgcactgaatgttccactgaagtggcagtctacgacaaggatgaagtctttcattttttcaatgttttagcaagccattcctaaacagcccaactggcatttaattacccaatactgtatataaggcaaatatggacagttactttcctcttgcctgttcatatccttcagtgacattgaggaagcagtgtttctctttttaaaggagaatagttgtcaaccttcattcatctcttacatctctcaccctctccttttttttttctttgattttcccccttattgatgggactgatattcattctgtttttgatgaacatttggaattaaaatgttctggaattataagcaatctttgtttctgagtgttatttttattttggatatagctttgatgtaattaaactggaaactctttcctgaaaaaaaaaaaaacaaaaaaaaaaaaaaagaaacaaaaaaaacaacagaaaatagaaaaaacacagagaaaaaatatagaaaaaagaaaaataagaagcacaactaagaaagaaacaaagaagagaagaggagagaaaaaagagagaaaaaaataaaaatgaaagtgatgaaaaacaaagtgtcaaaa

SEQ ID NO: 74428 - DNA, 481 bp, Homo sapiens
atattttcgtttgttcagtgtcctagaaacaaccacatgctggagaatggaattccataaggtactctcttagataaaggaagtgccagccatcctgttgccatctgctaaaatcctcagcccacctgcatagtgaacagcattcattgttttccagaaatgtgcaagaaccacagtctcccccaagactgaagatctgcttcatcgacatggcagggaacgtggctgaacacagaggactcatttttgcagcttccctaccagagagagagagacaccctttttacccgagttctgagttgaaatatcctagaagagaactctgattggcctggcttgggtcacatgcctgtccttgagttgatcaactgtgattagttataagtgtactcattagtaacttcccctggaaccttagatttgatgtggggtaagacttccaaaaacaaacaaaaaaataaaacagaagaatgctaaaaat

SEQ ID NO: 74429 - DNA, 889 bp, Homo sapiens
ttagatggagtttgctcttgttgctcaggctggaatgcaatggcatgatctcagcttactgcgacctctgcctcccagattcaagtgatgctctgcctcagcctcctgagtagctgggattacaggcgtgcactgccatgcctggctaatttttgaattattagtagagatggggtttcaccatgttggtcacgctggtcttgaactccctacctcaggtgatgtacccacttcagccttccaaagttctgggattacaggcatgagccaccatgtctggcctagagtgtccactttctttacagaaatttctgagttcattgattcgacttatatttaaaatataaaaaaatctttattatatttataatagtcatttaaaacacttgcctgcaaatttcaatggttaggtcttctgtgtttctccttgtatttactatttctctttactatatttcatgtcttttttcttctgccatgtctcatatttaatgtatgctggattttgcaaaaatagcagtaaagactgatgttaaaccttctttctgttaagttttgttttgtttcccaaattagactgactctatttctactttcaagtgggttctgccctatccagattttcccatgttctgcagagggttgaatctcttagatctgtcagaagttcagctgagagggaaatagattacagttctgcctagttttgactcacttttgaattcaacttcaatagagccataggtacaaatatcacaagtgtatgcaagattgaacacttttcactttcgaaccctacttctactgttttcttataaacatccatgaagaagagaaaaatgcttaaaatgaaggttttatttctatatttgtgacttttctagattcc

SEQ ID NO: 74430 - DNA, 6797 bp, Homo sapiens
  misc_feature (4364)..(4364): n is a, c, g, or t
  misc_feature (4421)..(4421): n is a, c, g, or t
  misc_feature (4430)..(4430): n is a, c, g, or t
  misc_feature (4567)..(4567): n is a, c, g, or t
  misc_feature (4701)..(4701): n is a, c, g, or t
  misc_feature (4860)..(4860): n is a, c, g, or t
  misc_feature (5008)..(5008): n is a, c, g, or t
  misc_feature (5438)..(5438): n is a, c, g, or t
agttctctcttatttgatatcagagagcccaatggagccttctgaagtacctagtcagattagcaaagataattttttagaagttcctaatttatctgactctctttgtgaagatgaagaagttactttccaacctggtttctcccctcaaccaagtagacgaggttctgattcttctgaagacatatacctggataccccatcttcaggtactagaagagtttcatttgctgattcctttggattcaatcttgtgtctgttaaagaatttgattgctgggaattaccgagtgcttcaaccacttttgacttagggacggacattttccacacagaagaatatgttttagccccactgtttgacttgccttcttcaaaagaagatcttatgcaacaactccaaatacagaaagcaatactggagtcaactgagtctcttcttgggtctacaagtatcaagggtattattcgagttttgaatgtttcttttgagaagttagtatatgtaagaatgtctttagatgactggcagacacattatgacattttagcagaatatgttcctaattcatgtgatggtgaaactgaccagttctcctttaagattgtattggttcctccttatcaaaaagatggcagtaaagttgagttttgtatacgttatgaaacttctgttggtacattttggtcaaataataatggcacaaattatacattcatttgtcaaaagaaagaacaagagccggagcctgtaaaaccatggaaagaagttcctaacagacaaataaaaggctgcttaaaggtaaaatcaagtaaagaagaatcatcagtaacatcagaagaaaataactttgagaatccaaagaatacagatacctatatcccaacaatcatttgttctcatgaggacaaggaagatttggaagccagtaatcgaaatgtaaaagatgtaaacagggaacatgatgaacataatgaaaaagaattagagttgatgataaatcaacacttaataagaaccagaagtactgcttccagagatgaaaggaatacattttcaacagatccagtcaattttccaaataaagcagaggggttagagaagaagcaaatccatggtgaaatatgtactgacttgttccaaaggtctctgtctccaagttcatcagcagaaagctccgtaaagggagatttttactgcaatgaaaaatattcctcaggagatgactgtacacatcaaccttcagaggaaactacttcaaatatgggagaaatcaagccatcattgggagatactagtagtgatgaactagtgcaattacatactggcagcaaagaagtcctggatgataatgctaatccagcccatggcaatggcacaatgcaaataccttgcccctcttcagatcaactaatggcaggaaaccttaataaaaaacatgaaggaggagctaaaaaaattgaagtaaaagatttgggatgtttacgaagagatttccattcagatacgtcggcatgtctcaaagaatcaacagaagaaggatcttctaaggaagattattatggcaatggtaaggatgatgaagaacaaagaatatatttaggtgttaatgaaaaacaaagaaaaaatttccaaacaatcttacatgaccaagaaaggaagatgggtaaccctaaaataagtgtggcagggattggagctagtaacagagacctggctactctgctgagcgaacataccgcaatccccacccgggcaatcacagcagatgtgtctcattcaccaaggacaaatttaagttgggaagaagctgtgttaaccccagagcatcatcatttgactagtgaaggcagcgctttaggagggataactggtcaagtttgttcatcaagaactggaaatgttttgaggaatgattatcttttccaagttgaagaaaaatcaggtgggattaattctgaagatcaggataatagcccacagcataaacaaagttggaatgttctggaaagtcagggaaaatcaagagagaataagacaaacataacagagcatatcaaaggacaaacagattgtgaagacgtgtggggaaaaagagataatacgaggagtttgaaagctactacagaagaattgtttacctgccaagaaacagtgtgctgtgaactgtcttctctagctgatcatggcattactgagaaagcagaagctggtacagcctatataattaagacaacatcagaaagtactccagaaagcatgtctgctagagaaaaagcaataattgctaagctacctcaagagacagcacgaagtgacaggcccatcgaggtaaaggaaacagcgtttgatccacatgaagggagaaatgatgattcacattataccctttgtcaacgagatacagtaggtgtaatctatgacaatgattttgaaaaggaatcacgtttaggtatttgtaatgtacgtgtagatgaaatggagaaggaagaaaccatgtctatgtacaatcctaggaagacacatgacagggagaaatgtggcactggaaatataacatctgtggaagaatcctcatgggtcattacagaatatcaaaaagcaacttcaaaactggatttacagttgggaatgttaccaacagacaaaactgtattttcagaaaacagagatcataggcaggttcaagaattatcaaagaaaacagactcggatgccattgtgcattctgcttttaactcagacactaatagagctcctcagaatagctctcctttttccaaacatcatactgaaatttcagtgtcaactaatgagcaggcaattgctgtagagaatgcagttactaccatggctagccaacctatttctacgaaatcagaaaatatttgtaattcaacaagagaaatccagggtattgagaagcacccttatcctgagtctaaacctgaagaagtttccagaagttcaggaatagtgacatcaggtagtagaaaagaaagatgcataggccagattttccaaacagaagagtatagtgtggaaaaatctctagggccaatgattttaatcaacaaacctcttgagaatatggaagaagcaaggcatgaaaatgaaggattagtaagctctgggcaatcactatacacttcaggtgaaaaggaatctgacagctctgcttctactagtcttcctgttgaggaaagtcaagctcaaggcaacgaatctttgttttcaaaatataccaactctaaaataccttatttccttttgtttctgatatttcttataactgtctaccattatgacttaatgattggcttgacattctacgttttgtcattgtcctggctatcctgggaagagggtagacaaaaagagtctgtcaaaaagaagtaacctcagcactactattctctcttaaaagataagctatttaaccccaaacatttggattggtgaatgggactattcattgttcaaagatccagtgcagtttttctcttgaaggatcatttaaaaagggacgcgaataagtttgctccttcatataagtaattattctatataggaccattatgtttggatcattaaatacctatatgaatatgagatctgaagcacgtcaagttgaaattaggtacagctgttgctccttagcaggctatgaagttgcaatgcttcacatctcttcactacttaaagtgctatttcttgcattcatttctcttgcaataaagcttcatttttttttccccttgagagtatatattttcccctacggttttaaaaaacagataaaacatggacaatggcagaggacttttttggtcttttagtattgaacatgaaatttgtatttaacactgtatcatttatcaggattcattgatcaaatatttcaacctttcatatttttaagaaaacacccatatatattgaaatgcaaacttaaacatattctgttcacttgagtgtaatacttgatgcatgcacacacacacacacataccttctttatagctacaaagtcagggcgttcataggcaaaatctgacaagactgaaacaattgggagattatctttcaattctgaaaaattctgtgggtggcctgtctttaagcaatgcttttctcttgtgagggaagactgtaacacagctgaactatttcagtgtcaactattcagaattgaaaatgtaaattaaaatttccacaagcattgcttcagaatgaatttgtacctataaagcataaggcattaaatgacaataaaaattccaaatggactatttgttccacattgtatttttgtcttcaaatattttctaagagaatgaattatcccccaaaatgcatttanaaaacagtctttggtgatatttattatatgattatcaggttgttagatgataactcnaaattttcngtaggcaaataggtaatgtggaaatctgaagaagaaatgaatatccagtatagcagtgactttgactgctgttattacctatagctaagtgtgtatgataatgaaactcatcattttagtcaagtagaggcaatgcnaagattcacatagtttatttcaactatttattgaatgattactatatgcaaaactctgtgctctgttctgtggcatagaacttcctttgatatgctgcatagctagttctaggcataggtacgtagtgtgacanttctgacttcactgaaattatggaagaaagacacccagaggaggcctctttggttggttcttttttcataggaaattccttcataaaacatgtaacactgatcttcagatagaaaaagcaatctgtttatttacctgtaagggcaaagtcaatgagtanaacttgcatatgtcatcccatataactaagacatatgcatttatgggaagacaaaacaagaatgaaacacttatactgactttcatctggtagtagatgatttccttaatttttattaggtacgtaactatttccaaatcctctaatngcatactactctcaagtcccattgaaaatgaatgcttgacttcaactttttagttgaccaaatacaaacatcctaaagtagagcttagggcaaatatttgattgagagggcacaatttcattcagtacaagagaagtactgtaagcagtacctagaaataatctctaaaattgctatcctgataattttgttgacaggtctaaattacaatgaagttaaggttaggatttccttagttcttaatgtctcagtttttgaattctacctttaagggttttagtcaacatgccatatctcattattgcagagaacactacattactttatgaacacaggtgtctgagctagaattattctcttaaaagacaacataactttttatgtcttttatttactttttggtaatattaacttaccaaatcttctcctntgcatttttaatatgacaaaacaaattttaaaagatttgaaataattgtatttctctgaattcagtgaagaaataattcatgattcaactgcatctccaaacattactcatgaccttgaaataaaataggaacctatgaaactattgatatgtgaatagatgggttatttcaacctgttttggtcacatcactatgccgagcaagaaaagtggatctcagggaggactagcagcccctggttaagggagatctggctgtgagtcatcatggcaagggtaatctttacaagcatagctgcctgcactctgtctctccaagtactggttaaggcccaaatgaaggcatgtcaggagagttagaggtgcatcacacatccgcttcatatgttgggtaagaaacataacttagtctttattttgctgggcttctgacttttagaaacaaaattctaaaaatttgcaagtcaagtaagtgtgggtagcaaaaacaattatctttaaaaaaaaaatcacatcagtataggccatcaatatcacaatagatttctcaaggtaagagaaaataagctcatgagatgacattcacccttcaacataaaagaacattgggttaatgcagccttggtttcctgctgagctccagtattttgatagttaattatttcaactaatatatctatgtctatatcatctatcaatttattaagcaggtctatctttaatttgttatctcaaaccagtctgctggttaaatggaaacttaaaaatatccatggcaagctttgtatataaatgaacaaaaaagcaagcaaagcaaaacaataaactagcagaagaactagtaaaaatacaagcagattcctctactgatttctgtttttgtgatctctgactttcctttcaaatttttactgagaatatcgaaattggattatgcaataggatcttatttagttatttgaatctgtcttagccagttcctgtagaactgagaaataagattgactttgaatctgcaacaagatctgaaataaatgagaagccaagctcttcaagcacctctatctctgtactcctatatgaagagaacagtaaaaaaaattactggtatttatttggttaaattcatttgcttattttttctgtttttggaaataatttgtaataaaaatcatggcaacataattcactttccatcttttaaaaatatattttgccattaatccaatatgtttccatcactttgccaaaacctatttaaaacagtgaattaaattttcactaggtttgaatgatcatgttttataagaaatgtctttattttagtgtgttaaaaccttattaaacaaacaactgttt

SEQ ID NO: 74431 - DNA, 6276 bp, Homo sapiens
  misc_feature (3843)..(3843): n is a, c, g, or t
  misc_feature (3900)..(3900): n is a, c, g, or t
  misc_feature (3909)..(3909): n is a, c, g, or t
  misc_feature (4046)..(4046): n is a, c, g, or t
  misc_feature (4180)..(4180): n is a, c, g, or t
  misc_feature (4339)..(4339): n is a, c, g, or t
  misc_feature (4487)..(4487): n is a, c, g, or t
  misc_feature (4917)..(4917): n is a, c, g, or t
agttctctcttatttgatatcagagagcccaatggagccttctgaagtacctagtcagattagcaaagataattttttagaagttcctaatttatctgactctctttgtgaagatgaagaagttactttccaacctggtttctcccctcaaccaagtagacgaggttctgattcttctgaagacatatacctggataccccatcttcagaaagaacaagagccggagcctgtaaaaccatggaaagaagttcctaacagacaaataaaaggctgcttaaaggtaaaatcaagtaaagaagaatcatcagtaacatcagaagaaaataactttgagaatccaaagaatacagatacctatatcccaacaatcatttgttctcatgaggacaaggaagatttggaagccagtaatcgaaatgtaaaagatgtaaacagggaacatgatgaacataatgaaaaagaattagagttgatgataaatcaacacttaataagaaccagaagtactgcttccagagatgaaaggaatacattttcaacagatccagtcaattttccaaataaagcagaggggttagagaagaagcaaatccatggtgaaatatgtactgacttgttccaaaggtctctgtctccaagttcatcagcagaaagctccgtaaagggagatttttactgcaatgaaaaatattcctcaggagatgactgtacacatcaaccttcagaggaaactacttcaaatatgggagaaatcaagccatcattgggagatactagtagtgatgaactagtgcaattacatactggcagcaaagaagtcctggatgataatgctaatccagcccatggcaatggcacaatgcaaataccttgcccctcttcagatcaactaatggcaggaaaccttaataaaaaacatgaaggaggagctaaaaaaattgaagtaaaagatttgggatgtttacgaagagatttccattcagatacgtcggcatgtctcaaagaatcaacagaagaaggatcttctaaggaagattattatggcaatggtaaggatgatgaagaacaaagaatatatttaggtgttaatgaaaaacaaagaaaaaatttccaaacaatcttacatgaccaagaaaggaagatgggtaaccctaaaataagtgtggcagggattggagctagtaacagagacctggctactctgctgagcgaacataccgcaatccccacccgggcaatcacagcagatgtgtctcattcaccaaggacaaatttaagttgggaagaagctgtgttaaccccagagcatcatcatttgactagtgaaggcagcgctttaggagggataactggtcaagtttgttcatcaagaactggaaatgttttgaggaatgattatcttttccaagttgaagaaaaatcaggtgggattaattctgaagatcaggataatagcccacagcataaacaaagttggaatgttctggaaagtcagggaaaatcaagagagaataagacaaacataacagagcatatcaaaggacaaacagattgtgaagacgtgtggggaaaaagagataatacgaggagtttgaaagctactacagaagaattgtttacctgccaagaaacagtgtgctgtgaactgtcttctctagctgatcatggcattactgagaaagcagaagctggtacagcctatataattaagacaacatcagaaagtactccagaaagcatgtctgctagagaaaaagcaataattgctaagctacctcaagagacagcacgaagtgacaggcccatcgaggtaaaggaaacagcgtttgatccacatgaagggagaaatgatgattcacattataccctttgtcaacgagatacagtaggtgtaatctatgacaatgattttgaaaaggaatcacgtttaggtatttgtaatgtacgtgtagatgaaatggagaaggaagaaaccatgtctatgtacaatcctaggaagacacatgacagggagaaatgtggcactggaaatataacatctgtggaagaatcctcatgggtcattacagaatatcaaaaagcaacttcaaaactggatttacagttgggaatgttaccaacagacaaaactgtattttcagaaaacagagatcataggcaggttcaagaattatcaaagaaaacagactcggatgccattgtgcattctgcttttaactcagacactaatagagctcctcagaatagctctcctttttccaaacatcatactgaaatttcagtgtcaactaatgagcaggcaattgctgtagagaatgcagttactaccatggctagccaacctatttctacgaaatcagaaaatatttgtaattcaacaagagaaatccagggtattgagaagcacccttatcctgagtctaaacctgaagaagtttccagaagttcaggaatagtgacatcaggtagtagaaaagaaagatgcataggccagattttccaaacagaagagtatagtgtggaaaaatctctagggccaatgattttaatcaacaaacctcttgagaatatggaagaagcaaggcatgaaaatgaaggattagtaagctctgggcaatcactatacacttcaggtgaaaaggaatctgacagctctgcttctactagtcttcctgttgaggaaagtcaagctcaaggcaacgaatctttgttttcaaaatataccaactctaaaataccttatttccttttgtttctgatatttcttataactgtctaccattatgacttaatgattggcttgacattctacgttttgtcattgtcctggctatcctgggaagagggtagacaaaaagagtctgtcaaaaagaagtaacctcagcactactattctctcttaaaagataagctatttaaccccaaacatttggattggtgaatgggactattcattgttcaaagatccagtgcagtttttctcttgaaggatcatttaaaaagggacgcgaataagtttgctccttcatataagtaattattctatataggaccattatgtttggatcattaaatacctatatgaatatgagatctgaagcacgtcaagttgaaattaggtacagctgttgctccttagcaggctatgaagttgcaatgcttcacatctcttcactacttaaagtgctatttcttgcattcatttctcttgcaataaagcttcatttttttttccccttgagagtatatattttcccctacggttttaaaaaacagataaaacatggacaatggcagaggacttttttggtcttttagtattgaacatgaaatttgtatttaacactgtatcatttatcaggattcattgatcaaatatttcaacctttcatatttttaagaaaacacccatatatattgaaatgcaaacttaaacatattctgttcacttgagtgtaatacttgatgcatgcacacacacacacacataccttctttatagctacaaagtcagggcgttcataggcaaaatctgacaagactgaaacaattgggagattatctttcaattctgaaaaattctgtgggtggcctgtctttaagcaatgcttttctcttgtgagggaagactgtaacacagctgaactatttcagtgtcaactattcagaattgaaaatgtaaattaaaatttccacaagcattgcttcagaatgaatttgtacctataaagcataaggcattaaatgacaataaaaattccaaatggactatttgttccacattgtatttttgtcttcaaatattttctaagagaatgaattatcccccaaaatgcatttanaaaacagtctttggtgatatttattatatgattatcaggttgttagatgataactcnaaattttcngtaggcaaataggtaatgtggaaatctgaagaagaaatgaatatccagtatagcagtgactttgactgctgttattacctatagctaagtgtgtatgataatgaaactcatcattttagtcaagtagaggcaatgcnaagattcacatagtttatttcaactatttattgaatgattactatatgcaaaactctgtgctctgttctgtggcatagaacttcctttgatatgctgcatagctagttctaggcataggtacgtagtgtgacanttctgacttcactgaaattatggaagaaagacacccagaggaggcctctttggttggttcttttttcataggaaattccttcataaaacatgtaacactgatcttcagatagaaaaagcaatctgtttatttacctgtaagggcaaagtcaatgagtanaacttgcatatgtcatcccatataactaagacatatgcatttatgggaagacaaaacaagaatgaaacacttatactgactttcatctggtagtagatgatttccttaatttttattaggtacgtaactatttccaaatcctctaatngcatactactctcaagtcccattgaaaatgaatgcttgacttcaactttttagttgaccaaatacaaacatcctaaagtagagcttagggcaaatatttgattgagagggcacaatttcattcagtacaagagaagtactgtaagcagtacctagaaataatctctaaaattgctatcctgataattttgttgacaggtctaaattacaatgaagttaaggttaggatttccttagttcttaatgtctcagtttttgaattctacctttaagggttttagtcaacatgccatatctcattattgcagagaacactacattactttatgaacacaggtgtctgagctagaattattctcttaaaagacaacataactttttatgtcttttatttactttttggtaatattaacttaccaaatcttctcctntgcatttttaatatgacaaaacaaattttaaaagatttgaaataattgtatttctctgaattcagtgaagaaataattcatgattcaactgcatctccaaacattactcatgaccttgaaataaaataggaacctatgaaactattgatatgtgaatagatgggttatttcaacctgttttggtcacatcactatgccgagcaagaaaagtggatctcagggaggactagcagcccctggttaagggagatctggctgtgagtcatcatggcaagggtaatctttacaagcatagctgcctgcactctgtctctccaagtactggttaaggcccaaatgaaggcatgtcaggagagttagaggtgcatcacacatccgcttcatatgttgggtaagaaacataacttagtctttattttgctgggcttctgacttttagaaacaaaattctaaaaatttgcaagtcaagtaagtgtgggtagcaaaaacaattatctttaaaaaaaaaatcacatcagtataggccatcaatatcacaatagatttctcaaggtaagagaaaataagctcatgagatgacattcacccttcaacataaaagaacattgggttaatgcagccttggtttcctgctgagctccagtattttgatagttaattatttcaactaatatatctatgtctatatcatctatcaatttattaagcaggtctatctttaatttgttatctcaaaccagtctgctggttaaatggaaacttaaaaatatccatggcaagctttgtatataaatgaacaaaaaagcaagcaaagcaaaacaataaactagcagaagaactagtaaaaatacaagcagattcctctactgatttctgtttttgtgatctctgactttcctttcaaatttttactgagaatatcgaaattggattatgcaataggatcttatttagttatttgaatctgtcttagccagttcctgtagaactgagaaataagattgactttgaatctgcaacaagatctgaaataaatgagaagccaagctcttcaagcacctctatctctgtactcctatatgaagagaacagtaaaaaaaattactggtatttatttggttaaattcatttgcttattttttctgtttttggaaataatttgtaataaaaatcatggcaacataattcactttccatcttttaaaaatatattttgccattaatccaatatgtttccatcactttgccaaaacctatttaaaacagtgaattaaattttcactaggtttgaatgatcatgttttataagaaatgtctttattttagtgtgttaaaaccttattaaacaaacaactgttt

SEQ ID NO: 74432 - DNA, 5125 bp, Homo sapiens
  misc_feature (2692)..(2692): n is a, c, g, or t
  misc_feature (2749)..(2749): n is a, c, g, or t
  misc_feature (2758)..(2758): n is a, c, g, or t
  misc_feature (2895)..(2895): n is a, c, g, or t
  misc_feature (3029)..(3029): n is a, c, g, or t
  misc_feature (3188)..(3188): n is a, c, g, or t
  misc_feature (3336)..(3336): n is a, c, g, or t
  misc_feature (3766)..(3766): n is a, c, g, or t
agttctctcttatttgatatcagagagcccaatggagccttctgaagtacctagtcagattagcaaagataattttttagaagttcctaatttatctgactctctttgtgaagatgaagaagttactttccaacctggtttctcccctcaaccaagtagacgaggttctgattcttctgaagacatatacctggataccccatcttcagaaagaacaagagccggagcctgtaaaaccatggaaagaagttcctaacagacaaataaaaggctgcttaaaggtaaaatcaagtaaagaagaatcatcagtaacatcagaagaaaataactttgagaatccaaagaatacagatacctatatcccaacaatcatttgttctcatgaggacaaggaagatttggaagccagtaatcgaaatgtaaaagatgtaaacagggaacatgatgaacataatgaaaaagaattagagttgatgataaatcaacacttaataagaaccagaagtactgcttccagagatgaaaggaatacattttcaacagatccagtcaattttccaaataaagcagaggggttagagaagaagcaaatccatggtgaaatatgtactgacttgttccaaaggtctctgtctccaagttcatcagcagaaagctccgtaaagggagatttttactgcaatgaaaaatattcctcaggagatgactgtacacatcaaccttcagaggaaactacttcaaatatgggagaaatcaagccatcattgggagatactagtagtgatgaactagtgcaattacatactggcagcaaagaagtcctggatgataatgctaatccagcccatggcaatggcacaatgcaaataccttgcccctcttcagatcaactaatggcaggaaaccttaataaaaaacatgaaggaggagctaaaaaaattgaagtaaaagatttgggatgtttacgaagagatttccattcagatacgtcggcatgtctcaaagaatcaacagaagaaggatcttctaaggaagattattatggcaatggtaaggatgatgaagaacaaagaatatatttaggtgttaatgaaaaacaaagaaaaaatttccaaacaatcttacatgaccaagaaaggaagatgggtaaccctaaaataagtgtggcagggattggagctagtaacagagacctggctactctgctgagcgaacataccgcaatccccacccgggcaatcacagcagatgtgtctcattcaccaaggacaaatttaagttgggaagaagctgtgttaaccccagagcatcatcatttgactagtgaaggcagcgctttaggagggataactggtcaagtttgttcatcaagaactggaaatgttttgaggaatgattatcttttccaagttgaagaaaaatcaggtgggattaattctgaagatcaggataatagcccacagcataaacaaagttggaatgttctggaaagtcagggaaaatcaagagagaataagacaaacataacagagcatatcaaaggacaaacagattgtgaagacgtgtggggaaaaagagataatacgaggagtttgaaagctactacagaagaattgtttacctgccaagaaacagtgtgctgtgaactgtcttctctagctgatcatggcattactgagaaagcagaagctggtacagcctatataattaagacaacatcagaaagtactccagaaagcatgtctgctagagaaaaagcaataattgctaagctacctcaagagacagcacgaagtgacaggcccatcgaggtaaaggaaacagctttttctcttgaaggatcatttaaaaagggacgcgaataagtttgctccttcatataagtaattattctatataggaccattatgtttggatcattaaatacctatatgaatatgagatctgaagcacgtcaagttgaaattaggtacagctgttgctccttagcaggctatgaagttgcaatgcttcacatctcttcactacttaaagtgctatttcttgcattcatttctcttgcaataaagcttcatttttttttccccttgagagtatatattttcccctacggttttaaaaaacagataaaacatggacaatggcagaggacttttttggtcttttagtattgaacatgaaatttgtatttaacactgtatcatttatcaggattcattgatcaaatatttcaacctttcatatttttaagaaaacacccatatatattgaaatgcaaacttaaacatattctgttcacttgagtgtaatacttgatgcatgcacacacacacacacataccttctttatagctacaaagtcagggcgttcataggcaaaatctgacaagactgaaacaattgggagattatctttcaattctgaaaaattctgtgggtggcctgtctttaagcaatgcttttctcttgtgagggaagactgtaacacagctgaactatttcagtgtcaactattcagaattgaaaatgtaaattaaaatttccacaagcattgcttcagaatgaatttgtacctataaagcataaggcattaaatgacaataaaaattccaaatggactatttgttccacattgtatttttgtcttcaaatattttctaagagaatgaattatcccccaaaatgcatttanaaaacagtctttggtgatatttattatatgattatcaggttgttagatgataactcnaaattttcngtaggcaaataggtaatgtggaaatctgaagaagaaatgaatatccagtatagcagtgactttgactgctgttattacctatagctaagtgtgtatgataatgaaactcatcattttagtcaagtagaggcaatgcnaagattcacatagtttatttcaactatttattgaatgattactatatgcaaaactctgtgctctgttctgtggcatagaacttcctttgatatgctgcatagctagttctaggcataggtacgtagtgtgacanttctgacttcactgaaattatggaagaaagacacccagaggaggcctctttggttggttcttttttcataggaaattccttcataaaacatgtaacactgatcttcagatagaaaaagcaatctgtttatttacctgtaagggcaaagtcaatgagtanaacttgcatatgtcatcccatataactaagacatatgcatttatgggaagacaaaacaagaatgaaacacttatactgactttcatctggtagtagatgatttccttaatttttattaggtacgtaactatttccaaatcctctaatngcatactactctcaagtcccattgaaaatgaatgcttgacttcaactttttagttgaccaaatacaaacatcctaaagtagagcttagggcaaatatttgattgagagggcacaatttcattcagtacaagagaagtactgtaagcagtacctagaaataatctctaaaattgctatcctgataattttgttgacaggtctaaattacaatgaagttaaggttaggatttccttagttcttaatgtctcagtttttgaattctacctttaagggttttagtcaacatgccatatctcattattgcagagaacactacattactttatgaacacaggtgtctgagctagaattattctcttaaaagacaacataactttttatgtcttttatttactttttggtaatattaacttaccaaatcttctcctntgcatttttaatatgacaaaacaaattttaaaagatttgaaataattgtatttctctgaattcagtgaagaaataattcatgattcaactgcatctccaaacattactcatgaccttgaaataaaataggaacctatgaaactattgatatgtgaatagatgggttatttcaacctgttttggtcacatcactatgccgagcaagaaaagtggatctcagggaggactagcagcccctggttaagggagatctggctgtgagtcatcatggcaagggtaatctttacaagcatagctgcctgcactctgtctctccaagtactggttaaggcccaaatgaaggcatgtcaggagagttagaggtgcatcacacatccgcttcatatgttgggtaagaaacataacttagtctttattttgctgggcttctgacttttagaaacaaaattctaaaaatttgcaagtcaagtaagtgtgggtagcaaaaacaattatctttaaaaaaaaaatcacatcagtataggccatcaatatcacaatagatttctcaaggtaagagaaaataagctcatgagatgacattcacccttcaacataaaagaacattgggttaatgcagccttggtttcctgctgagctccagtattttgatagttaattatttcaactaatatatctatgtctatatcatctatcaatttattaagcaggtctatctttaatttgttatctcaaaccagtctgctggttaaatggaaacttaaaaatatccatggcaagctttgtatataaatgaacaaaaaagcaagcaaagcaaaacaataaactagcagaagaactagtaaaaatacaagcagattcctctactgatttctgtttttgtgatctctgactttcctttcaaatttttactgagaatatcgaaattggattatgcaataggatcttatttagttatttgaatctgtcttagccagttcctgtagaactgagaaataagattgactttgaatctgcaacaagatctgaaataaatgagaagccaagctcttcaagcacctctatctctgtactcctatatgaagagaacagtaaaaaaaattactggtatttatttggttaaattcatttgcttattttttctgtttttggaaataatttgtaataaaaatcatggcaacataattcactttccatcttttaaaaatatattttgccattaatccaatatgtttccatcactttgccaaaacctatttaaaacagtgaattaaattttcactaggtttgaatgatcatgttttataagaaatgtctttattttagtgtgttaaaaccttattaaacaaacaactgttt

SEQ ID NO: 74433 - DNA, 6765 bp, Homo sapiens
  misc_feature (4332)..(4332): n is a, c, g, or t
  misc_feature (4389)..(4389): n is a, c, g, or t
  misc_feature (4398)..(4398): n is a, c, g, or t
  misc_feature (4535)..(4535): n is a, c, g, or t
  misc_feature (4669)..(4669): n is a, c, g, or t
  misc_feature (4828)..(4828): n is a, c, g, or t
  misc_feature (4976)..(4976): n is a, c, g, or t
  misc_feature (5406)..(5406): n is a, c, g, or t
agcagtggcaacttgctggggtccccttccacggtgtggaagctttgttctctcgctctttacaataaatcttgctactgctcactctttgggtccacactgcctttatgagctgtaacactcaccctgaaggtctgcagcttcactcctgaagccagcaagaccatgagcccaccgagaagaacgaacaactccagacgcgccgcctaaagagctgtaacgctcactgcgaaggtctgcagcttcactcctgagccagggagaccacgaacccaccagaaggaagaaactccgaacacatctgaacatcagaaggaacaaactccggacacgcagcctttaagaactgtaacactcaccgcgagggtccgcggcttcattcttgacgtcagtgagaccaagaacccaccaattccaggcacaatagttccaggctctgttattgtggctaataatataaggcctaggtgacagtatggcacttctgagtttaagttatgaaagatggtggctttcatttaggtctctggatctctctctctatcactttatctgccaagctgctgtgttttaagcagccctctagagagacttttatggtaaggaagtatagtattatactatctggccaatagccagagaagaattgagatctcccaacaaccatgtgactgaacttggaagcagacccttctttcccagctgaatcttcttgagatgtctggagccctggctaacagcttaataacctcaagagagaatctgggcaagaacgactcagtaaagaagaatcatcagtaacatcagaagaaaataactttgagaatccaaagaatacagatacctatatcccaacaatcatttgttctcatgaggacaaggaagatttggaagccagtaatcgaaatgtaaaagatgtaaacagggaacatgatgaacataatgaaaaagaattagagttgatgataaatcaacacttaataagaaccagaagtactgcttccagagatgaaaggaatacattttcaacagatccagtcaattttccaaataaagcagaggggttagagaagaagcaaatccatggtgaaatatgtactgacttgttccaaaggtctctgtctccaagttcatcagcagaaagctccgtaaagggagatttttactgcaatgaaaaatattcctcaggagatgactgtacacatcaaccttcagaggaaactacttcaaatatgggagaaatcaagccatcattgggagatactagtagtgatgaactagtgcaattacatactggcagcaaagaagtcctggatgataatgctaatccagcccatggcaatggcacaatgcaaataccttgcccctcttcagatcaactaatggcaggaaaccttaataaaaaacatgaaggaggagctaaaaaaattgaagtaaaagatttgggatgtttacgaagagatttccattcagatacgtcggcatgtctcaaagaatcaacagaagaaggatcttctaaggaagattattatggcaatggtaaggatgatgaagaacaaagaatatatttaggtgttaatgaaaaacaaagaaaaaatttccaaacaatcttacatgaccaagaaaggaagatgggtaaccctaaaataagtgtggcagggattggagctagtaacagagacctggctactctgctgagcgaacataccgcaatccccacccgggcaatcacagcagatgtgtctcattcaccaaggacaaatttaagttgggaagaagctgtgttaaccccagagcatcatcatttgactagtgaaggcagcgctttaggagggataactggtcaagtttgttcatcaagaactggaaatgttttgaggaatgattatcttttccaagttgaagaaaaatcaggtgggattaattctgaagatcaggataatagcccacagcataaacaaagttggaatgttctggaaagtcagggaaaatcaagagagaataagacaaacataacagagcatatcaaaggacaaacagattgtgaagacgtgtggggaaaaagagataatacgaggagtttgaaagctactacagaagaattgtttacctgccaagaaacagtgtgctgtgaactgtcttctctagctgatcatggcattactgagaaagcagaagctggtacagcctatataattaagacaacatcagaaagtactccagaaagcatgtctgctagagaaaaagcaataattgctaagctacctcaagagacagcacgaagtgacaggcccatcgaggtaaaggaaacagcgtttgatccacatgaagggagaaatgatgattcacattataccctttgtcaacgagatacagtaggtgtaatctatgacaatgattttgaaaaggaatcacgtttaggtatttgtaatgtacgtgtagatgaaatggagaaggaagaaaccatgtctatgtacaatcctaggaagacacatgacagggagaaatgtggcactggaaatataacatctgtggaagaatcctcatgggtcattacagaatatcaaaaagcaacttcaaaactggatttacagttgggaatgttaccaacagacaaaactgtattttcagaaaacagagatcataggcaggttcaagaattatcaaagaaaacagactcggatgccattgtgcattctgcttttaactcagacactaatagagctcctcagaatagctctcctttttccaaacatcatactgaaatttcagtgtcaactaatgagcaggcaattgctgtagagaatgcagttactaccatggctagccaacctatttctacgaaatcagaaaatatttgtaattcaacaagagaaatccagggtattgagaagcacccttatcctgagtctaaacctgaagaagtttccagaagttcaggaatagtgacatcaggtagtagaaaagaaagatgcataggccagattttccaaacagaagagtatagtgtggaaaaatctctagggccaatgattttaatcaacaaacctcttgagaatatggaagaagcaaggcatgaaaatgaaggattagtaagctctgggcaatcactatacacttcaggtgaaaaggaatctgacagctctgcttctactagtcttcctgttgaggaaagtcaagctcaaggcaacgaatctttgttttcaaaatataccaactctaaaataccttatttccttttgtttctgatatttcttataactgtctaccattatgacttaatgattggcttgacattctacgttttgtcattgtcctggctatcctgggaagagggtagacaaaaagagtctgtcaaaaagaagtaacctcagcactactattctctcttaaaagataagctatttaaccccaaacatttggattggtgaatgggactattcattgttcaaagatccagtgcagtttttctcttgaaggatcatttaaaaagggacgcgaataagtttgctccttcatataagtaattattctatataggaccattatgtttggatcattaaatacctatatgaatatgagatctgaagcacgtcaagttgaaattaggtacagctgttgctccttagcaggctatgaagttgcaatgcttcacatctcttcactacttaaagtgctatttcttgcattcatttctcttgcaataaagcttcatttttttttccccttgagagtatatattttcccctacggttttaaaaaacagataaaacatggacaatggcagaggacttttttggtcttttagtattgaacatgaaatttgtatttaacactgtatcatttatcaggattcattgatcaaatatttcaacctttcatatttttaagaaaacacccatatatattgaaatgcaaacttaaacatattctgttcacttgagtgtaatacttgatgcatgcacacacacacacacataccttctttatagctacaaagtcagggcgttcataggcaaaatctgacaagactgaaacaattgggagattatctttcaattctgaaaaattctgtgggtggcctgtctttaagcaatgcttttctcttgtgagggaagactgtaacacagctgaactatttcagtgtcaactattcagaattgaaaatgtaaattaaaatttccacaagcattgcttcagaatgaatttgtacctataaagcataaggcattaaatgacaataaaaattccaaatggactatttgttccacattgtatttttgtcttcaaatattttctaagagaatgaattatcccccaaaatgcatttanaaaacagtctttggtgatatttattatatgattatcaggttgttagatgataactcnaaattttcngtaggcaaataggtaatgtggaaatctgaagaagaaatgaatatccagtatagcagtgactttgactgctgttattacctatagctaagtgtgtatgataatgaaactcatcattttagtcaagtagaggcaatgcnaagattcacatagtttatttcaactatttattgaatgattactatatgcaaaactctgtgctctgttctgtggcatagaacttcctttgatatgctgcatagctagttctaggcataggtacgtagtgtgacanttctgacttcactgaaattatggaagaaagacacccagaggaggcctctttggttggttcttttttcataggaaattccttcataaaacatgtaacactgatcttcagatagaaaaagcaatctgtttatttacctgtaagggcaaagtcaatgagtanaacttgcatatgtcatcccatataactaagacatatgcatttatgggaagacaaaacaagaatgaaacacttatactgactttcatctggtagtagatgatttccttaatttttattaggtacgtaactatttccaaatcctctaatngcatactactctcaagtcccattgaaaatgaatgcttgacttcaactttttagttgaccaaatacaaacatcctaaagtagagcttagggcaaatatttgattgagagggcacaatttcattcagtacaagagaagtactgtaagcagtacctagaaataatctctaaaattgctatcctgataattttgttgacaggtctaaattacaatgaagttaaggttaggatttccttagttcttaatgtctcagtttttgaattctacctttaagggttttagtcaacatgccatatctcattattgcagagaacactacattactttatgaacacaggtgtctgagctagaattattctcttaaaagacaacataactttttatgtcttttatttactttttggtaatattaacttaccaaatcttctcctntgcatttttaatatgacaaaacaaattttaaaagatttgaaataattgtatttctctgaattcagtgaagaaataattcatgattcaactgcatctccaaacattactcatgaccttgaaataaaataggaacctatgaaactattgatatgtgaatagatgggttatttcaacctgttttggtcacatcactatgccgagcaagaaaagtggatctcagggaggactagcagcccctggttaagggagatctggctgtgagtcatcatggcaagggtaatctttacaagcatagctgcctgcactctgtctctccaagtactggttaaggcccaaatgaaggcatgtcaggagagttagaggtgcatcacacatccgcttcatatgttgggtaagaaacataacttagtctttattttgctgggcttctgacttttagaaacaaaattctaaaaatttgcaagtcaagtaagtgtgggtagcaaaaacaattatctttaaaaaaaaaatcacatcagtataggccatcaatatcacaatagatttctcaaggtaagagaaaataagctcatgagatgacattcacccttcaacataaaagaacattgggttaatgcagccttggtttcctgctgagctccagtattttgatagttaattatttcaactaatatatctatgtctatatcatctatcaatttattaagcaggtctatctttaatttgttatctcaaaccagtctgctggttaaatggaaacttaaaaatatccatggcaagctttgtatataaatgaacaaaaaagcaagcaaagcaaaacaataaactagcagaagaactagtaaaaatacaagcagattcctctactgatttctgtttttgtgatctctgactttcctttcaaatttttactgagaatatcgaaattggattatgcaataggatcttatttagttatttgaatctgtcttagccagttcctgtagaactgagaaataagattgactttgaatctgcaacaagatctgaaataaatgagaagccaagctcttcaagcacctctatctctgtactcctatatgaagagaacagtaaaaaaaattactggtatttatttggttaaattcatttgcttattttttctgtttttggaaataatttgtaataaaaatcatggcaacataattcactttccatcttttaaaaatatattttgccattaatccaatatgtttccatcactttgccaaaacctatttaaaacagtgaattaaattttcactaggtttgaatgatcatgttttataagaaatgtctttattttagtgtgttaaaaccttattaaacaaacaactgttt

SEQ ID NO: 74434 - DNA, 836 bp, Homo sapiens
  misc_feature (51)..(51): n is a, c, g, or t
tagtcattacaacgctgtgttcacgcacaaccaccaccacaaaaaactcangaagggcagggagtctcgccatcttgcccaggctcatttcaaactcctgagcacaagcgatccttcatcttggcgtcctgaactgctgggattaaaggcacagtggctcatatctgtacgaccagctacttggaagattgaggagggagtatcccttgagtccaggagttccgatcagattgagcaatataaagagaccccgtcacaaaacaaaataaacaagaaaaaatttaatttgtatttatgggagacggggtttcaccatattgggcaggctggtctcgaactcctgacctcaagcgatccacccgccttgacctctcgaagttctgggattacaactgtgaaccactgcacccggcccataagttatttaaatgacggagaaatcctataaagagaaaattccacctcctctactgttagaggtgaagctcacataataaaggcctcaacaactcactagccactgtgcggacattctgattcgctaacctctgactactctgatcttttttacgactctcatttactaaccattttcaaagatctttgttgttagtgaatattcccggcaatgctattccgagatagcggacgctccgcatcgtggagtataggcgtcttgctactatcctcacaccttcgccatggcatttgttcggcgaacctagcactggggcttcggggctttggcactactctattctactgtctccctgcgtgacgtcctcggtcgtagcttaataccttgctctatctatactcctcatctcctccacccg

SEQ ID NO: 74435 - DNA, 965 bp, Homo sapiens
cgaagtgctgggattacaggcataagccaccgcgcccggtcaacagcatggttttatagaagaccaattaattatcattttacaattttatcagctggaaaagctaaaagaacagctagtggaggagaaggattctgagacgtcctatgctgtagatggtctattctcttctcatcctagcaaacgaggggagtctcgccatcttgcccaggctcatttcaaactcctgagcacaagcgatccttcatcttggcgtcctgaactgctgggattaaaggcacagtggctcatatctgtacgaccagctacttggaagattgaggagggagtatcccttgagtccaggagttccgatcagattgagcaatataaagagaccccgtcacaaaacaaaataaacaagaaaaaatttaatttgtatttatgggagacggggtttcaccatattgggcaggctggtctcgaactcctgacctcaagcgatccacccgccttgacctctcgaagttctgggattacaactgtgaaccactgcacccggcccataagttatttaaatgacggagaaatcctataaagagaaaattccacctcctctactgttagaggtgaagctcacataataaaggcctcaacaactcactagccactgtgcggacattctgattcgctaacctctgactactctgatcttttttacgactctcatttactaaccattttcaaagatctttgttgttagtgaatattcccggcaatgctattccgagatagcggacgctccgcatcgtggagtataggcgtcttgctactatcctcacaccttcgccatggcatttgttcggcgaacctagcactggggcttcggggctttggcactactctattctactgtctccctgcgtgacgtcctcggtcgtagcttaataccttgctctatctatactcctcatctcctccacccg

SEQ ID NO: 74436 - DNA, 1063 bp, Homo sapiens
  misc_feature (984)..(985): n is a, c, g, or t
  misc_feature (987)..(987): n is a, c, g, or t
  misc_feature (989)..(989): n is a, c, g, or t
catcactatcaggaagactaccacctagctcaaaagtagtcaaatgaaagacattgttcccattttcacctgccctctatgctctcagctttagtattaataagatttgaggttaattaatcctggaatctggaaattaaaccataaattgtgaaaatccaacagttttttatttcaagatgttgcttcatgcttgtgcatctatttgaatgtgtgggcatgcataggaatgcttgcttttagtgaagtgggcggatcattcgtaactgaggcacacttgccttttgcaactaagctctactgaattccaaagctatagaaatatccatcttgacctggaaagtctgtttctttgctagtccagaagattttttttaacatgaacaagatcctctcaagcactgtttgctttggactcctaactttgttatccgtgttgatttttttacaatctgtgcatggacgaccatatcttacccaaggaaatgaaatatttccagataaaaaatatacaaatcgtgaggaactattgctggctctactgaataaaaattttgatttccaaagacctttcaacactgacctagccttacctaacaaactggaagaacttaaccagctggaaaagctaaaagaacagctagtggaggagaaggattctgagacgtcctatgctgtagatggtctattctcttctcatcctagcaaacgagcttgcttttggaaatactgtgtttaaagctttttctctggatgcaaaaaaagataagaatatcaggaaaatatatgtatctactcactctgctgtaggcagaccccctgaaactattggtgtggaataaaagatgaaatgctcctgattattgtaaataccaaatgcatgcgggattgtgtaaagacaatgccaggttggactgcagaatgagccaacagcattgtttccctgtagagagcctatgaatggacgtgcagtcagggggttcnntnanagatctttcagaaaaaagtaagtctggttgaggctcggggacataaggatgaagggcatgtaaaagggaaccag

SEQ ID NO: 74437 - DNA, 1242 bp, Homo sapiens
  misc_feature (1163)..(1164): n is a, c, g, or t
  misc_feature (1166)..(1166): n is a, c, g, or t
  misc_feature (1168)..(1168): n is a, c, g, or t
catcactatcaggaagactaccacctagctcaaaagtagtcaaatgaaagacattgttcccattttcacctgccctctatgctctcagctttagtattaataagatttgaggttaattaatcctggaatctggaaattaaaccataaattgtgaaaatccaacagttttttatttcaagatgttgcttcatgcttgtgcatctatttgaatgtgtgggcatgcataggaatgcttgcttttagtgaagtgggcggatcattcgtaactgaggcacacttgccttttgcaactaagctctactgaattccaaagctatagaaatatccatcttgacctggaaagtctgtttctttgctagtccagaagattttttttaacatgaacaagatcctctcaagcactgtttgctttggactcctaactttgttatccgtgttgatttttttacaatctgtgcatggacgaccatatcttacccaaggaaatgaaatatttccagataaaaaatatacaaatcgtgaggaactattgctggctctactgaataaaaattttgatttccaaagacctttcaacactgacctagccttacctaacaaactggaagaacttaaccagctggaaaagctaaaagaacagctagtggaggagaaggattctgagacgtcctatgctgtagatggtctattctcttctcatcctagcaaacgagccctatcatccagaacgttgatacagcttaactgcctccaacattgccaaaacagaagaggataaaggatacatcccagctttcaattgcctcagttcggaagggacacacatcatttctactgaagtccattggccgggattagtcactgggactaccaccaacatatggcaaggcagcttgcttttggaaatactgtgtttaaagctttttctctggatgcaaaaaaagataagaatatcaggaaaatatatgtatctactcactctgctgtaggcagaccccctgaaactattggtgtggaataaaagatgaaatgctcctgattattgtaaataccaaatgcatgcgggattgtgtaaagacaatgccaggttggactgcagaatgagccaacagcattgtttccctgtagagagcctatgaatggacgtgcagtcagggggttcnntnanagatctttcagaaaaaagtaagtctggttgaggctcggggacataaggatgaagggcatgtaaaagggaaccag

SEQ ID NO: 74438 - DNA, 1204 bp, Homo sapiens
  misc_feature (1125)..(1126): n is a, c, g, or t
  misc_feature (1128)..(1128): n is a, c, g, or t
  misc_feature (1130)..(1130): n is a, c, g, or t
catcactatcaggaagactaccacctagctcaaaagtagtcaaatgaaagacattgttcccattttcacctgccctctatgctctcagctttagtattaataagatttgaggttaattaatcctggaatctggaaattaaaccataaattgtgaaaatccaacagttttttatttcaagatgttgcttcatgcttgtgcatctatttgaatgtgtgggcatgcataggaatgcttgcttttagtgaagtgggcggatcattcgtaactgaggcacacttgccttttgcaactaagctctactgaattccaaagctatagaaatatccatcttgacctggaaagtctgtttctttgctagtccagaagattttttttaacatgaacaagatcctctcaagcactgtttgctttggactcctaactttgttatccgtgttgatttttttacaatctgtgcatggacgaccatatcttacccaaggaaatgaaatatttccagataaaaaatatacaaatcgtgaggaactattgctggctctactgaataaaaattttgatttccaaagacctttcaacactgctggaaaagctaaaagaacagctagtggaggagaaggattctgagacgtcctatgctgtagatggtctattctcttctcatcctagcaaacgagccctatcatccagaacgttgatacagcttaactgcctccaacattgccaaaacagaagaggataaaggatacatcccagctttcaattgcctcagttcggaagggacacacatcatttctactgaagtccattggccgggattagtcactgggactaccaccaacatatggcaaggcagcttgcttttggaaatactgtgtttaaagctttttctctggatgcaaaaaaagataagaatatcaggaaaatatatgtatctactcactctgctgtaggcagaccccctgaaactattggtgtggaataaaagatgaaatgctcctgattattgtaaataccaaatgcatgcgggattgtgtaaagacaatgccaggttggactgcagaatgagccaacagcattgtttccctgtagagagcctatgaatggacgtgcagtcagggggttcnntnanagatctttcagaaaaaagtaagtctggttgaggctcggggacataaggatgaagggcatgtaaaagggaaccag

SEQ ID NO: 74439 - DNA, 899 bp, Homo sapiens
  misc_feature (820)..(821): n is a, c, g, or t
  misc_feature (823)..(823): n is a, c, g, or t
  misc_feature (825)..(825): n is a, c, g, or t
tgtcacttctccaagtagtgaatcatgttaactacttgattgcattgcattttatagatttattttctttctttctttttccttcatctagatcattcgtaactgaggcacacttgccttttgcaactaagctctactgaattccaaagctatagaaatatccatcttgacctggaaagtctgtttctttgctagtccagaagattttttttaacatgaacaagatcctctcaagcactgtttgctttggactcctaactttgttatccgtgttgatttttttacaatctgtgcatggacgaccatatcttacccaaggaaatgaaatatttccagataaaaaatatacaaatcgtgaggaactattgctggctctactgaataaaaattttgatttccaaagacctttcaacactgacctagccttacctaacaaactggaagaacttaaccagctggaaaagctaaaagaacagctagtggaggagaaggattctgagacgtcctatgctgtagatggtctattctcttctcatcctagcaaacgagcttgcttttggaaatactgtgtttaaagctttttctctggatgcaaaaaaagataagaatatcaggaaaatatatgtatctactcactctgctgtaggcagaccccctgaaactattggtgtggaataaaagatgaaatgctcctgattattgtaaataccaaatgcatgcgggattgtgtaaagacaatgccaggttggactgcagaatgagccaacagcattgtttccctgtagagagcctatgaatggacgtgcagtcagggggttcnntnanagatctttcagaaaaaagtaagtctggttgaggctcggggacataaggatgaagggcatgtaaaagggaaccag

SEQ ID NO: 74440 - DNA, 563 bp, Homo sapiens
ctggcttgagccacattgtcaaccagctacattattaagcacgttgtacagttcagctgtctttttttctgggtagcaagactttctcaatgaaggaagcaatggttgacttacattctggtgcatactccataccttacgtggacctgcaatgaatattttgacaactggctactttgagttttcactgatctaaggcacaaataaggtgattttctaaagtctcatattaaatattataaacaggattagatttcaagtctttcatttttttttttactctgtggcctaacctagtgtgaagtcttagttcacatccttgaattgatttgatttcttattattcaagaagtgaattattcactcttactctgtacatttcactggctgttaaacctttactttaaaggttttggaaattactacacattaaaaaaaagaagaagaagaaatgaagataaaacctttaaaggttttggaaattactacagatttaaaaaaagaagaagaaatgaagataaaacctttactttaaaggctttggaaattactacacatttaaa

SEQ ID NO: 74441 - DNA, 1269 bp, Homo sapiens
acgtggaggaaaagcacgcgagtttggagcgggtggagcaggaacagaggtggactggaatgtcacacgacggggcagctggaagggcaccactgagttcagtacttcaaaattgccgtgctctacctctccccagtgcacaaaaacactctccacaccaagctgctgctgctgggggatggagggatggcgtcagcgattcaagactgtttttcctacctgttcagcacttctttcagcgatatgaagttaaatccaggccaagttcccacctggtgggaagcactgtgcaggttcgtggggatgcagccctgcacagcccagactggactccttccccatggaactcacaacacacgggagaggcagagagatccaagcgcacagaaaaacacaagaagattcagccctgtcatcttgtgcaaatcctcactgtccccagaaggaagagaggcacacagcgctccccagccgctggaatccaggaagaattgaggtgctcaagacccaccacctctttgcctgcaaactctaagctcactgtcctgctcccttgctcccagaagtggcactggatggatcccatccaggtcagcccaggctgtcatttcctccccttctgtacctaatctcagcgagatgaagagtttacacctgtttctcacttgaattagggaagtctagtttgcattctcctgactggatgggcctgcattgaatctttcatctcattggtctggggatttggttctgaagaccaatgccttccagaatcttcctgtctctccccaaattctgggcggttctgtttccagcactcatccatgatgggggggtacaggaaatgagtgttgagggaaaggcatcccaccttctctctgttccatcttccagatctgacaactcactggaaagttcttctctgtgtccctgtcccccgtctggttctgaggccgctgctttccccagccttggtgccttgggttttctgctctgtgaaatgaaccaggtcccttatcctgttctcccctgaagaaaagagggtgtggggggcttggcacaggaaatggcccttgcctttcacaggctttggggtctgagggcagctctgatgccccagcatgcttttccaacccaacaactggggagacccgcttgccattttaccacccagtatctgaaattagcagccgcctaatctctctctgccatatcactcaatggtttaattgtgcagaaaaaaatgtattaaaatgcaaagcactcagt

SEQ ID NO: 74442 - DNA, 1186 bp, Homo sapiens
acgtggaggaaaagcacgcgagtttggagcgggtggagcaggaacagaggtggactggaatgtcacacgacggggcagctggaagtgcacaaaaacactctccacaccaagctgctgctgctgggggatggagggatggcgtcagcgattcaagactgtttttcctacctgttcagcacttctttcagcgatatgaagttaaatccagctcacaggtccctgagtgaagaggagccacccctgaggagttgtacccaaggagactcagccacagccagacctactgcacattttgagatcatggtcttggagcctgatgtcgtgattgggtgctttgggaaggtcctcactgtccccagaaggaagagaggcacacagcgctccccagccgctggaatccaggaagaattgaggtgctcaagacccaccacctctttgcctgcaaactctaagctcactgtcctgctcccttgctcccagaagtggcactggatggatcccatccaggtcagcccaggctgtcatttcctccccttctgtacctaatctcagcgagatgaagagtttacacctgtttctcacttgaattagggaagtctagtttgcattctcctgactggatgggcctgcattgaatctttcatctcattggtctggggatttggttctgaagaccaatgccttccagaatcttcctgtctctccccaaattctgggcggttctgtttccagcactcatccatgatgggggggtacaggaaatgagtgttgagggaaaggcatcccaccttctctctgttccatcttccagatctgacaactcactggaaagttcttctctgtgtccctgtcccccgtctggttctgaggccgctgctttccccagccttggtgccttgggttttctgctctgtgaaatgaaccaggtcccttatcctgttctcccctgaagaaaagagggtgtggggggcttggcacaggaaatggcccttgcctttcacaggctttggggtctgagggcagctctgatgccccagcatgcttttccaacccaacaactggggagacccgcttgccattttaccacccagtatctgaaattagcagccgcctaatctctctctgccatatcactcaatggtttaattgtgcagaaaaaaatgtattaaaatgcaaagcactcagt

SEQ ID NO: 74443 - DNA, 669 bp, Homo sapiens
acgtggaggaaaagcacgcgagtttggagcgggtggagcaggaacagaggtggactggaatgtcacacgacggggcagctggaagggcaccactgagttcagtacttcaaaattgccgtgctctacctctccccagtgcacaaaaacactctccacaccaagctgctgctgctgggggatggagggatggcgtcagcgattcaagactgtttttcctacctgttcagcacttctttcagcgatatgaagttaaatccaggccaagttcccacctggtgggaagcactgtgcaggttcgtggggatgcagccctgcacagcccagactggactccttccccatggaactcacaacacacgggagaggcagagagatccaagcgcacagaaaaacacaagaagattcagccctgtcatcttgtgcaaaagtcacacaggctggagtgcagtggcatgatctcagctccccacaacctctgcctccgatgttcaagcgattctcctgtctcagcctgctgagtagctggaattacagggcatgctttctcgcctgccggccttccaccatgggatgaagcagcaagaaggctcttgccagaggcagacccctcgaccttggacttcccagcccccagaactgtgagaaataaatctctcttctttatatatt

SEQ ID NO: 74444 - DNA, 585 bp, Homo sapiens
acgtggaggaaaagcacgcgagtttggagcgggtggagcaggaacagaggtggactggaatgtcacacgacggggcagctggaagggcaccactgagttcagtacttcaaaattgccgtgctctacctctccccagtgcacaaaaacactctccacaccaagctgctgctgctgggggatggagggatggcgtcagcgattcaagactgtttttcctacctgttcagcacttctttcagcgatatgaagttaaatccagatgtcgtcatcatccacttgttcaaacaagagcccaaggatcatcctagattccttctcacttcctctcaatccatccctgaaacagccaaaccaccagccaagttcccacctggtgggaagcactgtgcaggttcgtggggatgcagccctgcacagcccagactggactccttccccatggaactcacaacacacgggagaggcagagagatccaagcgcacagaaaaacacaagaagattcagccctgtcatcttgtgcaaagtgagttccacataattcaattataaaatgagagattgtgtttctgtgagcttcataaaaa

SEQ ID NO: 74445 - DNA, 537 bp, Homo sapiens
acgtggaggaaaagcacgcgagtttggagcgggtggagcaggaacagaggtggactggaatgtcacacgacggggcagctggaagggcaccactgagttcagtacttcaaaattgccgtgctctacctctccccagtgcacaaaaacactctccacaccaagctgctgctgctgggggatggagggatggcgtcagcgattcaagactgtttttcctacctgttcagcacttctttcagcgatatgaagttaaatccaggcatcatcgccatcaacatacagccatactccaggattgcccatcttcaacataaacggactctcctggactccacttcccacatcagtcacagccacacttcctgagaaagaagtctacactcttcattcactttcattcacccacttccaacctggctcctgttaccactggaccgtcaaaagtgactcttgtcaaagtcactattctggctacctattgctgtgtaataacctcctcaaaatttagtatctttaaaaaacaatttattatgtctc

SEQ ID NO: 74446 - DNA, 776 bp, Homo sapiens
acgtggaggaaaagcacgcgagtttggagcgggtggagcaggaacagaggtggactggaatgtcacacgacggggcagctggaagggcaccactgagttcagtacttcaaaattgccgtgctctacctctccccagtgcacaaaaacactctccacaccaagctgctgctgctgggggatggagggatggcgtcagcgattcaagactgtttttcctacctgttcagcacttctttcagcgatatgaagttaaatccaggccaagttcccacctggtgggaagcactgtgcaggttcgtggggatgcagccctgcacagcccagactggactccttccccatggaactcacaacacacgggagaggcagagagatccaagcgcacagaaaaacacaagaagattcagccctgtcatcttgtgcaaagatgagtcaggaactcctggagtgagaagggctcaggcctcacccagcagtgacctcagagagggtgtgcaaggtcagaagagcctccagctgagctcagcactgtgacaacagactttccaaaatacgcttaagggtctggccggggctggacatgctccagcaggtgtcagggaagaagaatgagcaagctggctgagtctgagcctggccccgcctaatgttgtctcctccctgaagcctcccctcccttctgtgctaccacagttcttaggtctgtggcgtcctgaagccactggtgccatgtgatggtttgcatttcaattaattaaaattacatgaaatgaaag

SEQ ID NO: 74447 - DNA, 444 bp, Homo sapiens
acgtggaggaaaagcacgcgagtttggagcgggtggagcaggaacagaggtggactggaatgtcacacgacggggcagctggaagggcaccactgagttcagtacttcaaaattgccgtgctctacctctccccagtgcacaaaaacactctccacaccaagctgctgctgctgggggatggagggatggcgtcagcgattcaagactgtttttcctacctgttcagcacttctttcagcgatatgaagttaaatccagatgtcgtcatcatccacttgttcaaacaagagcccaaggatcatcctagattccttctcacttcctctcaatccatccctgaaacagccaaaccaccaagcagcaagagggatcttataaaaatatgaccagatcacatccttcaacacttccctgttacccttacaataaaattcaaactcttc

SEQ ID NO: 74448 - DNA, 325 bp, Homo sapiens
ccctatgtgttggtttgtaatatagtctgcttgcttcttatcttactaagacaaatcccaacatagcccacagctactgaccacaataaaacataatggtcaatatgagagtcatgcaaacaagctctccctttcttgttgcattttctagtgactaacagtgttttcttcaaagtagccaatccgcaatctcagcaggaatgcctaagggataacactcatagaccttactatagccatagactcacaggtgatctctcttttgctctttctcttctattcactccctcctcattcctcacctgctggttgagcatcctgctgt

SEQ ID NO: 74449 - DNA, 423 bp, Homo sapiens
tgagtcaaaacgatcttgacgggaagctgttagaggtctcatggaaataggcctggagcacaggatttggctgaggctttcaactgacatcagacaagactgcaatcaagggaaagcagacctggggaccacgggcaatcacatgagatgagaaataccaaagaatgtgaccatccaggtagccgggggacacagctccaaaaaagtgagagtggtgctggattagctccattggaggaactggaggttccattgccatttggcaaaccagatcctcctccatgatggcggtcagctgacagtgaccaacagcccccgactacacaaagagaatgactgcagacaagaactgagaagaaaaactggagctggtataggtgaactcaggctgggaataaactgatgttatctcaaaagtccact

SEQ ID NO: 74450 - DNA, 249 bp, Homo sapiens
acagcttttatttttatttttttttaaattttctctggaatagtcttcattttgtcataatattcccacactgaaggttaggagaggggagattaagaaaggaacagagccaaaggtaattaaacattctattaatatttaaaatgttgcaatcacaagcatctgactgttagtagtcctgttatcacattcatatcccataggctcaattctactgtcaatgtgctgatatcacgctcatgaagctgc

SEQ ID NO: 74451 - DNA, 368 bp, Homo sapiens
atgtcctccagaattgttcttcctcctccatagatcctcgcagcttctcctctccatcattttaactgcacagtgcactctctatccctgggactccccccatccaaagcccccacagcccgtttcctagtctaagtgactttccctcctgctctagaactttttctaacctcaaaccctgggaggcccctcaagtcatcagccctaaaactttcatctcaaaataacttacaattctttctaccttgccctgggattccttccacctgccctcttcctttctcgaacctccccccccgccgtgcaaaacccagaacctagcccctcagtctgtccccctccatcaaagtgaaccaaagagccttctc

SEQ ID NO: 74452 - DNA, 471 bp, Homo sapiens
  misc_feature (222)..(222): n is a, c, g, or t
tatgcttctctgcgtatatgcccagctctcagggtgtatggggctggagaatgcatgcgtagactgtgtgtatatgtaaactagaaactgaaccagggaaacaaaatgaactactgtatgcaagaaatatatgaagtgcacccagctgccggcagcaattgctacatgcagtccactgattattacgcgtattttgaagatagtccgggttacagcggttgngatgctcaggctgtgcccagtaacaacatatatatggaacaggcctgggcagtgaatcagccttatacctgtagttaccctggaaacatgtttaaaagcaaggactctgacttggacatggccctgaatcaatacagccaacctgaatatttcactgaagaaaagcctactttttctcaagtgcagtcgccatcgtattctcaaaaaaaagggtacatccccagttacttagacaaggacgagctctgt

SEQ ID NO: 74453 - DNA, 275 bp, Homo sapiens
cccccccccccacctacaccctcatctaccacaaaacttccccaaggactttcttttgccaagcgcctacagcagctcatagaggtcttgaaggggaagacctattccgacggaaagaaccattatgacatggagaccacagagctcccagaactgacctcgacctcctgatctgacctggttctcaacagacccagtgagcccttcactcctgagaaaaaggaaagatgaaataaataaataaacatatatatatagatatacacacacacata

SEQ ID NO: 74454 - DNA, 421 bp, Homo sapiens
tgagatggagtcttactctgtcacccaggctggagtgcagtggcatgatatcagctcactgcaacctccgcctcctgggttcaagcgattctcctgcctcagcctcccgagtagctgggattccaggtacccgccaccacacccggcggctaatttttgtatatttagtagagacagggtttcaccacttgggccaggctagtcttgaactcctgacctcgtgatccacccgcctcagcctcccaaagtgctgggattataggcgtgaaccaccgcgcctggacagatctctatgatcttaagttaggcaaagatttcatagctacaacacaaaaggcaaagccataaaagagaaaattcataagtggaacttatcaaaattaaaaacttttaacttcaaaagaaagtcgagtgaaacact

SEQ ID NO: 74455 - DNA, 198 bp, Homo sapiens
gagttggagttaacaatataagctcagtttttaatatataggagtatagacagatataaaggtgtttgtgtaaatgtgcactcacatacatatatttcctagctctgtctgctgagaaggcctagaagcaatgatacccctatagctatgaacacagctggtgctctgataaaaggaactagggttccttgaagaaat

SEQ ID NO: 74456 - DNA, 756 bp, Homo sapiens
cgccccgccgcccgccgcctcctggggccgctctccactgcgagtccgccgggactaaccgggcgtttgcgagagggggtgcgtccaagggcccctcccgcgtgtccggcgcccacctttggccctgagggccgagtggggagccccacgacgctattacagcctttcagatgcacggactgggaaactggggctcagagaagtcaagtggctcgcccaaggtcacccagcgagtgatcctgggaagaggggacaagggccgagctggagctgggaagggcgccccagttcgccccagtcgcgctctgaggaatagcagcgggaccgccctgctctctaaagcttcctggacttctctaagttatgtcgcgttgctgtcccctcgtacttataagagagtaaggcaggggcgccgtcctttctccgcgcctgagctcagagcgccaacctcctgagatccgccagctcagagccagctcaagtcccggcctcaatgtcaccttccctggacagcctctcaggacctccctggcaaatctcaacttgcaagaagcagaaaaatggcacagttaaaagcaaagcctctggggttaaacagcctggatttggaatcatggatctgctgctcactagctgtgaccttgggcaagtttcttcacctcagggtcctcatccgtcaagtggagatgacaaccaaacttatttcataagaagttcatgagaataaatatgttaactcataatgaaatacccaaa

SEQ ID NO: 74457 - DNA, 573 bp, Homo sapiens
gggacagagtttgagttttgtttttgagggggaaggtcaccagtgtgtagtacagggggcagggatggagggtactggaaatgtctcttggaggaataagtcagtggcataccactctcagccaatagcctgaggacaatcgccacagtcccccaggcagcccccccgcactcccaatgcaaatggaggcagctttacaaacccgaggggagtgggaggtggtagaaatcttggaagctctaagtcccagacccgagtactcaactgccctcactctcaaggctccactcctcccccggctaaggtgtcatttcagagtccccagtaagagtcttcttcatggctctcttcagtctcaacttgcaagaagcagaaaaatggcacagttaaaagcaaagcctctggggttaaacagcctggatttggaatcatggatctgctgctcactagctgtgaccttgggcaagtttcttcacctcagggtcctcatccgtcaagtggagatgacaaccaaacttatttcataagaagttcatgagaataaatatgttaactcataatgaaatacccaaa

SEQ ID NO: 74458 - DNA, 257 bp, Homo sapiens
ggaaaaaacatccatttattgtccactgtgcccaggtccatgctaggcactatagaagatacaagggaaggcccttgccctggaaatgtttattctctatctggaaaaaagattaactcacataaaataattaaaaataagatgccagcctctaaggaaaaatgttagattgtctgaaactcaagcagagagcattttggctgccctggaattccccatagtagtagaattactcttggggccaagagaggggttgc

SEQ ID NO: 74459 - DNA, 286 bp, Homo sapiens
ctcttccaaggatcagcctgagatgtaaacgaaaggtctttgctcagtctgcatcttttcctgggcatgcgcagtcactttctgattttccctctatatgcagttgcttttgaatgtcctagtctatttatttatttagagacaagagtctctgtcacacaggctagagtgcagtggcacagtctcagctcagtgcaacctccgcctcctgggtttaagtgattctcctgcctcagcctcccatgtagctgggattacaggtgcatgccaccacacctggctaatt

SEQ ID NO: 74460 - DNA, 437 bp, Homo sapiens
acttaataacaaatattttgctgtaagttgatttattatattggatcagtactgcttgtttttcagtgatttcctcacttggacataatacaaatcagtgttcttgttgtttgttatacatttagacatttacatcagtttaaaagttagtcttcaacaaatatttgtgtccacactttagtattccattgtttgaaagattcaggctttgtccactctggtttatagttacatatgcttaaaattttttcactttgtggaaatgtctgtaaaatacatttttgtaacatgaatcatttctactgataaccataaatttgcccttcctgctttgcactgattgcggcacaaggaagagaaagagaaggaagcaccagctttgggaacataggccttaagcttgaagcagagagaatgaaagcagactgtattagatt

SEQ ID NO: 74461 - DNA, 401 bp, Homo sapiens
acctgccgccccagccgccgctgtacactggcgcttagcgctcagccgacccgagggcgccgggctgggcgggcggagtcgggccgtgggggcggggccgcgaggaaggcttgcctagcccaggccctccgcccatccgactcttccggcccttggaggcctggctcctgtaccttcacctggcgtcttggcgcctttttctcagcggcctgtgggtggatgtgcatggtgtggcctggagagagcctggagctccatgagcacctgaagactgaaagaggaaatggaagtgggggcggccacacccagtgcagggttgatactgtgccctgaggtgacataaaagacactccttttccaaagcagaattggccaggaaatgaataaacacccggagaaaa

SEQ ID NO: 74462 - DNA, 424 bp, Homo sapiens
acctgccgccccagccgccgctgtacactggcgcttagcgctcagccgacccgagggcgccgggctgggcgggcggagtcgggccgtgggggcggggccgcgaggaaggcttgcctagcccaggccctccgcccatccgactcttccggcccttggaggcctggctcctgtaccttcacctggcgtcttggcgcctttttctcagcggcctgtgggtggatgtgcatggtgtggcctggagagagtgcaggactccccctccttccagcctggagctccatgagcacctgaagactgaaagaggaaatggaagtgggggcggccacacccagtgcagggttgatactgtgccctgaggtgacataaaagacactccttttccaaagcagaattggccaggaaatgaataaacacccggagaaaa

SEQ ID NO: 74463 - DNA, 320 bp, Homo sapiens
ttagccaggatggtctcgatctcctgacctcatgatctgcccgccttggcctcccaaagtgctgggattacaggcatgagccactgcgcctggctggtgataactttttagatccaataccaaaattatagttcatgaaagaaacaattgataagctgaacttcaacaaaattaaaacttctgctctgcaaaagacaacgtcaagagaatgagaagagaagccacagactgggagaaaatatttgcaaaagaaccatctgacaaaggactcttatccaaaatacacaaagaaatcttaaaattcaacaataagaaaatga

SEQ ID NO: 74464 - DNA, 552 bp, Homo sapiens
gataattggctcttcactcctctgccttcccagtacacaggtattgctaaagtggttaggctttaatgttttatgtttttagtttcaaactatgggaaatggagatttgaagaggcatttattccttgtcatcattttgtgtgctctgtgagaaggtggttatatgtttttgctggtttgtgtcccacagtgttcaactgcacattattctgatgaaaatccacaatgtctttgagcttctggttgtgtaatgctggggtttaaagtcaccatttgtgggtttggcatcaattaatatttagccagctggctaagagataggaaaagaatatgatatttctttccttatgtaataatgaaaagcaataattacaagtaggtaataatacacaaaggccataattagtctcttctagtgtttagaatgcacttgagaatcgtagagtcatttggagcgtgtttggaccaattagtatgtactgtagtacccttctggcaaacaaataactgaattgctactatttaacaatcttatgagcccacactactgca

SEQ ID NO: 74465 - DNA, 447 bp, Homo sapiens
caagaagccccaggtattcctaatcccaattgtttaagtctttccagtgttaaccaccagacatgtgatggattaaggactccagattattccagttcccagctgtcttagtcagggttctccggagaagttatcacatgattacagaggctggcaagtctgacgtctgcagggtagaccagcaagtcagagacccatggaagttgatgttgcagctcaagtccaaaggcaatctgctggcagaatcctctcttctgtttcctcagtgtgtttttacttaagaaactgattggatgagccccacccacattatggagggaaattgccagtgctctggatgcaaatggatttttccttaggaattcagagttgctgagttttgcatcaagactgaaagaggccaaaaagagaagctgtgtggtaggactgtgtgatgactcatcctac

SEQ ID NO: 74466 - DNA, 568 bp, Homo sapiens
caagaagccccaggtattcctaatcccaattgtttaagtctttccagtgttaaccaccagacatgtgatggattaaggactccagattattccagttcccagctgtcttagtcagggttctccggagaagttatcacatgattacagaggctggcaagtctgacgtctgcagggtagaccagcaagtcagagacccatggaagttgatgttgcagctcaagtccaaaggcaatctgctggcagaatcctctcttctgtttcctcagtgtgtttttacttaagaaactgattggatgagccccacccacattatggagggtaatttactttacttaaagtttacttatttaaatgttaatctcgtttaaaaaataccttcaaagcaacatccacactggtgtttaaccaagtatctgggtcctatgaccttgctaaattgacacataaaattaaccattacaccaaccattaagctaccccagctaacaccaactggaacagcaacaagccgctccaccaagtacgcccaaattgtagaattgtgagcataataaatattgttatttta

SEQ ID NO: 74467 - DNA, 333 bp, Homo sapiens
agagatgggggtctcattatgttgcccaggctggtctcgaactcctgggctcaagctatccacctaccttggcctcccaaaatgctgggatcacaggtgcaagccaccgtacctggccttatgtactactttgaactttttctcaatccagaacttcagaaagtgttatttcaaagactaacaaagctagaatggcagtcacatagagtatggaactgctcactcttttgacaagaggtaatttcccctcctgtctcctgcaagggcctctcactgcaccagtctcaaggtcctcagcatggaattcaaatgctaatctgtaccatagagctt

SEQ ID NO: 74468 - DNA, 3139 bp, Homo sapiens
  misc_feature (3093)..(3093): n is a, c, g, or t
ggctggatcccaccactgtccaggttcccaattgatattttcttcacaccaaagcaggaaggagatgtgaactttaatttgatctgcaatgtggaaaagaaagtccaccctgtgacattaaatgtcaaggccgagggctacactatgaatgtggagatcaagtgcaaggacaggacaggctccatcactctgttgactcccaaccagactaacatcatcaacttctatgaggtggagttaaatgaatgtgtccagtgtgaattcaactttatcaacactggaaagttcaccttcagcttccaggcacagctgtgtggctccaaaaccttgctgcagtacttggaattttcacccatcgacagcactgtggatgtaggacagagtgtacatgccaccctgtcttttcaaccattaaagaagtgtgtcttgacagacctggaactcataatcaagatcagccatggtccaacatttatgtgcaacatctcaggctgtgctgtgagcccggctatccatttctccttcaccagctacaactttgggacctgctttatctatcaagctgggatgcccccatacaaacaaaccctggtaattaccaacaaggaagaaacacctatgagcatagattgtctgtacaccaacaccactcacctcgaggtgaactcccgtgttgatgtggtaaagccaggaaacacattggagattccaataactttttatcctcgagaaagtatcaactatcaagaactcattccctttgaaatcaatgggctctcacaacaaacagtcgaaatcaaagggaagggtaccaaaatgaagattttagtcctagatccagccaacaggattgtgaagttgggagctgtcctaccagggcaggttgtgaaaagaacagtttccatcatgaacaacagcctggcccagctcacatttaatcagtccattctgttcacaattccagaactccaggaacccaaggtccttaccctggcgcccttccacaacatcacactgaagcccaaagaagtctgtaaactggaagtcatctttgccccgaagaagcgtgtccctcccttctctgaggaagtgttcatggaatgcatggggctcctgcgccccctcttcctccttagcggctgctgccaggccctggagatctcactggaccaggaacatattccctttggacccgtggtgtatcagacgcaagccacacgtcgcatcctcatgatgaacacaggcgatgtgggtgcaaggtttaaatgggacatcaaaaaatttgagcctcatttctccattagcccagaagaaggctatattacctcaggcatggaggtttcttttgaagtgacctaccatcccaccgaggtgggaaaggagagcctttgtaaaaacattctctgctacatccagggaggcagtcctctgagtctaaccctgtctggagtctgcgtgggaccacctgcggtaaaagaggtagtgaatttcacgtgccaggtgcgctccaagcacacgcagaccatcctgctgtcaaaccgcaccaaccagacctggaatctgcaccccatctttgagggcgagcactgggaggggcctgagttcatcaccctggaggcccaccagcaaaacaagccctatgagatcacctacaggccccgcaccatgaacttggagaaccgcaagcaccagggcaccctcttcttccccctcccagatgggaccggctggctgtatgctctgcatgggacttctgagctccccaaagctgtagccaatatctatcgtgaagtgccatgtaagaccccctacactgagcttctgccaatcaccaactggctgaacaagccccagagattccgggtcatcgtggaaatactgaaaccagagaagccggacctaagcatcactatgaagggccttgattacattgatgtactgtctggctctaagaaagactacaagctgaacttcttttcccacaaggagggaacgtacgctgcaaaggtgatcttccgaaacgaggtgacaaatgagttcttgtactacaatgtgagtttcagggtcatcccttcaggcatcatcaaaaccatcgagatggtgaccccagtccggcaagttgcgtcagcctccatcaagttggagaaccctctgccctactcggtgaccttctccacggaatgccggatgcccgacatcgccctgccctcccagtttgtggtgcctgccaactccgagggcacgttctcatttgaatttcagcccctgaaagctggagaaaccttcggaagactaactttgcacaacactgacttgggttactaccaatatgagctctatctgaaagccacgccagcacttccggaaaagcctgttcacttccagactgtccttggcagcagccaaatcatccttgtgaagttcatcaattacacacggcagaggacagaatactactgcaggaccgactgtacagacttccacgcagaaaaactcattaatgcagccccaggaggccagggaggcactgaagccagtgtggaagtcttattcgagcccagccacctgggtgagaccaagggcatcctgatcctatcatcgctcgcaggtggagagtatatcatccccctctttggaatggctctgcctcccaagccccaaggtcccttctcgatccgagccgggtacagcataatcatccccttcaagaatgtcttctatcacatggtgaccttctccatcatcgtggataacccagccttcaccattcgcgctggagagtctgtgcggcccaagaagatcaacaacatcacagtctcctttgaaggaaacccatctggcagcaaaacccccatcaccaccaagctgactgtgagctgccctcctggtgaagggagtgagactggagttaaatgggtttattatctgaaggggatcaccctttagtggtaaccagggttacctgtatcaaccaaaagctatgcattgtcttagcctgaaaaagaatagagaaaacaataagaattctaaaggaactgtttttattcttctcatacaattatagggcagttatttccctattatgtgttttcnaaatatagatatgaaatatctattccatattaaacattataactac

SEQ ID NO: 74469 - DNA, 356 bp, Homo sapiens
tattatgtttctttccagagcctccattatcctccattaatcctgggtctctacatgtccaataagtacctagtaaagaatgctgtgtggcattctgatcacatccttcttctccttagggcaccctcttcttccccctcccagatgggaccggctggctgtatgctctgcatgggacttctgagctccccaaagctgtagccaatatctatcgtgaagtgccatgtaagaccccctacactgagcttctgccaatcaccaactggctgaacaagccccagaggtaagggggtggggctagggggctgggtggggagatgaaaggaggactttcaccatctagcctggtccttccc

SEQ ID NO: 74470 - DNA, 618 bp, Homo sapiens
tacatgcagggtctaggtgggaccaacagtggctccagatgtatatacacacgggtccaggggcaacagaacaggccaggctacagtatggacttgaacctctgcttcacttctggtctctgttttacagtagtgctcaccaatatttcaataaattctactgaacttactctaatagaacattattcaacccccaaagacttatctcttcactatgacatctccatactttatttttaggagacagactttcaaaaccagagaaatcaggtgccttcctcaaggtcatgctccaacccaggccaactattaaatgcttgcatctgttagctggattagtctctatgtatactgaactgtgatgaaaatctatagctttgttttagaaaattattgttgatggactattaatattatattaacaatttctcagtaagtgtgttttttcctcattgaatctaggaatgctgggctttaagttgataactgtgtcatttcaatcaagtacaaggattttgaggcagattttgctagatatcttagtaatcccccacaatgttttatgtaactcttctcagaatatcaatacattaattattttagatgacatattaaata

SEQ ID NO: 74471 - DNA, 394 bp, Homo sapiens
ccagtctgggagcttcaataccctgtcttttaaaaactgaaagataaagttgtttattattttacatgaatcagtatttactacttctgcatgggggcatttctggtaaagactggaaaacctgctagacaaattctgtaagagctgcaacactccagtacttcttttctcttttgtagagatggggtcgcactatattgcccaagctggtctccagctcctgaactcaagtgatcctcctacctcagcctcccaaagtgctgggattacaggcataagacaccatgcctagcctccagtacttctaaaataaactgctggatagcattaaattattttcatgaagttttatgtacatataagaaatgtcatgaatgtccccatattctccttt

SEQ ID NO: 74472 - DNA, 351 bp, Homo sapiens
actaacaatatattttgcaccgaacatgttattcaggtctaagtcatctcatagaccatcttacatgactatttttgcagcagaaatcacaatttcaatatttgggtggcacccattttgctttgattcacactatttcctcagagctagtcagcaaatagtcaaatgaccttccagtgactgcacaaaatatggaatgcttcaaagatctgtgctgcctccttatgcagaagccacgctaactttccccgtattgttccaattttaggatatgtgccgccgaagcaagcacaaagccctacttttacacatgattagtgatgcgtcatggacaaggcttggctctgtgaa

SEQ ID NO: 74473 - DNA, 549 bp, Homo sapiens
ttttgggaaaggaaatgaggctaatctgtagtcataaaattctgatactttgcggaaattagaagatggtgatagtgcattcttttgtgcccaccccccctctgatggatgttgttagcccaaattacatttttcatatcatggacattgaatagggtttattgaatcaggaaggtaaggggaagaaccgggcacatatgtgttggaatactgtgggtttgacacctggttgaaaacaacttattggacatgatttttaacccaggatattttttttcccaaagcagatctaaattgtttactacccagggttggaaagggcaggcacctctaatctagtctttgtcctctggttgccctctcccacacccctttccacctatacttggttcaagacattttctgaaacgaaaattctgctgttgttcaaactgccattggttatgagaactctgcgtcctttgggatcatctcttagaactccagtgatctatcatatttgctgctacatttgtaaaatgaactttgcctgtattggttgactttaat

SEQ ID NO: 74474 - DNA, 389 bp, Homo sapiens
ttcaaaaccagaaaaatctgtcaacacagcaattataatagtaacatcttaaagaggaaaatcatatggcatttgaccaaattcagcagcagtacccacccagcatgcactggcatggcgccaaccagcctgcatgggtccgggaagagtcctgtgagcttggactccggagcaccagcggccttgcaaaggctgcttaccagaaaccaagagccactttcccatcaacttaggaaacgctgaagccatttactgaaatgggagaaaacaggaatgcctgctatcacctctgttccaggttttattggtccttcttagtggcagaataaaattaaaataactagtctatgttggcataaatagtggaagagagataaaagaatctattg

SEQ ID NO: 74475 - DNA, 313 bp, Homo sapiens
agattctcttaactgagaagtttttatctccttttcctttttactcttgtgtctgctgaggtaggaaattgtagtgagtcctctatttatcctataggtgagtcatttttgtttttttgggactttgaacagaggcagaggcttcagtgacgataaaggaaacagtgtgtggttgtgttttttcatggaaatttttctggggcttgctccatagagcagggctttcccataggcagagaggcccagagtagcacacacatgtgtgtgtgtgttctaagcaacataatatggatttggacagagagggaaagtg

SEQ ID NO: 74476 - DNA, 466 bp, Homo sapiens
agctttgcatgtgacattttttcagcccctcatgcccacatctacactcaaggattccacccccataccatgtagctacattaaactcaacatattccagactggatttctgtctgcacctctatctaccatgccaatctgtgcttcctctgtttcctccctcaaggaacagaaacctgatatttagccaccgatggccccagaaggtccaacaggaggagctccaggacctgtctaggaggggagatgtggacacttcctgtaaagtggggcatgcatgaggaggaggtggcctggatccttccctttctgggtaaagggtggaagcggtgtggattctttacttcgtgtgttctgatagccatgtgtcactgtgtacttgttctttgggtcttcacatctcctcctgttgcattttaaagcatttcaatggcatttttatgcctaataaagcattctcctagaa

SEQ ID NO: 74477 - DNA, 665 bp, Homo sapiens
ctgtgtatgtattcctcatactatacttgtataatgcacataggtgccatatatgaatgcatgccattttgttaacttattttcttctgtcatagacaaacaaaattcaaagcaataatgacaaaaaccagtgtttcatttcctcctcaaatgtgtaaaatcactcgttatgctgcctagtagaggggaagagtacgaagaggccactaggttagcaagggcatggagtgatttcaagagaagatataaagttttcttgctcattttatagttatcaaaactttttctgccagtgagccctgaattttttgtacacaatctcttgtgtgattacattagcatttctacaggtctgaaaatatagcaaaaactgaagtaattgttggtcattggctgaggctcaaaaactactaattttgctaattctcaattttgctaattcagaaaccaagtaaacaaaaatatcttcaacgactgttgtcagtagttgaagccaaattactgaccttccaaggccacccagaattatcaccatgattttctggatcataatattcatctgatgttatagaccaatggttgccaaactatatggcctgtgggcttaatcttagcttgtacattctgcaagctaagaatgatatttacctttttaaatgcctgaa

SEQ ID NO: 74478 - DNA, 807 bp, Homo sapiens
tctctggtctctgctagtatatttttcacctctatttaatggaatttcaacttggttctttggcataatttccatgactctacagaaatccccatcttttcaagcatattgttaacctttatcattcaatcatccagcatttttttcataattatctttaaatccctgtctgataattctgataaatctggatcatctctgggtcttcttctactgactatttcttctcttgacctttggtcacattttcttgcttttcttgtgtcttgtaactttttattacacaccagacattttatataaaaatagattacttattaaattaagtaatattttacttccagaaaaagacacgacaatttttctgttaggacactagaagggagtctgagtcaatccaatatgtaactgagctgggtgtgggctatgatgcagctgtaatttgacagttaatcactggcttcaaatatttaaggactgagatcaagtccttcacttgagcaggtctgggatctgagcctaggtaaaattacagagacctgcttgtgtttcatagccaagccaccaatttttaaaactgtgggagtaccttacatgtatgctagagtagaatgattaagtaaatgggtggctgatggtaggagacagatttctcactattggagcaggagtttttagataagcaagggcaggaagttagaatcatccatgtagtgattcaactggaaccgaatacatcaatataaactcatgtttagcttaattagatacagatggatacatatagaaatatttatagatatgtgg

SEQ ID NO: 74479 - DNA, 482 bp, Homo sapiens
tgatgaatgaacatgcacaaaatatttatagcaaatatatttgctggtaagatgaatgctttccctgtaaaactgggaacaaggcaaggatgtttgctcctgccactcttattcattgtagtactgtaacttctatcaagcacaatgaggcaagaaagtgaaatagaagtcatacacgtagagaagaaataaaactttatatttacatatgacatgattgtatacgtagaatattacaaggaatcttagaaaaaaacctcaggccaggcgcagtggctcatgcctataatcccagcgctttgggaggctgaggcaggtggatcacctgagatcgggagttcaagagcagcctgaccaatatggagaaaccccatctctactaaaaatacaaaattagccgggtgtggtggtgcatgcctgtaatcccagctacgtgggaggcaggagaattgcttcaacctggaaggtggaggttacggtga

SEQ ID NO: 74480 - DNA, 344 bp, Homo sapiens
tgatgaatgaacatgcacaaaatatttatagcaaatatatttgctggtaagatgaatgctttccctgtaaaactgggaacaaggcaaggatgtttgctcctgccactcttattcattgtagtactgtaacttctatcaagcacaatgaggcaagaaagtgaaatagaagtcatacacgtagagaagaaataaaactttatatttacatatgacatgattgtatacgtagaatattacaaggaatcttagaaaaaaacctcaggccaggctggtctcaaactcctgacctcgtgatctgcccgccttggcctcccaaagtgctgggattacaggtttgagccacc

SEQ ID NO: 74481 - DNA, 665 bp, Homo sapiens
aaatgatattaaatctcactgtggagcatcataaaaacaacctatttgtcagagaagagtaggacaattgtcctattaaattggaaaactgaaaaagaaaatttaaaaacagacttccattattgcattcatatgacaaatactttttgagtgtctgtgtcactgggcactgtactaccttgtaactacctaggcagtcggggtagggaatcctccttggggaagtaccctttgtaaggccaggcacagagaaaaaggagggtaaagagtgtgctaggtaataggtagaggacatgtacaaatagatggctactgattttcagttgataactatgtctaattaggtgaataccatcttattctagcaagagtatcagagtgcgttcattcctgaggaccctttccctggtgttgaaacaaattatctctagccttcagtacgaaataaattcccttttgctacatttctgccaaatctgaagaatcacaatggatgagtctcatgcctatttcaaaatggtatagagtctctgggggttcagtatatttaacttgtttcctcataagtgtgacttcaagatattgtttcatgctggaattgtaaattgtgatttatccattctctgtagaaatattaaataaatctgaaaaaactccaaaaccca

SEQ ID NO: 74482 - DNA, 400 bp, Homo sapiens
ttgccctctcggcctagaagtctcccattatggtgctgtgtctgctgggacccacggggcgctgcacagggaaccatgtggccgtgaacctcaagtccagcccagcaggggtcaattgtctcagcccacccctccctacccccagtatcctctctcctttatagatcatccattaagtgccagacactgcagaaggcacattgactaatattaaatattagcccagctaccctgctgggctgtccttcttagaaatgaggaagtggagggttaagtggatttctcaaggtcgtgcagctggtaaatggcagaaccaggatttgaactcaggtgtgcatgacttcaaaggaagacaccactgaggcctcctctactgggtctgcctccctaccgcccctgg

SEQ ID NO: 74483 - DNA, 459 bp, Homo sapiens
taggtgccttaatgtttgtggcatggatgactactgttagcataggtgtactggttgcccggttcttcaagccagtttggtcaaaagctttcttgcttggtgaagcagcttggtttcaggtgcatcggatgctcatgttcaccacaactgtcctcacctgcattgcttttgttatgccgtttatatacaggggaggctggagtaggcatgcaggttaccacccatacctcggctgtatagtgatgactttggcagttcttcagcctcttctggcagtcttcaggccacctttacatgacccaagaaggcaaatgtttaactggactcattggagtatgggaacagctgctagaataatagcagtggcagcgatgttcctgggaatggatttaccaggactgaatcttcctgattcatggaaaacctatgcaatgaccggattcgtagcctggcatgttg

SEQ ID NO: 74484 - DNA, 637 bp, Homo sapiens
taggtgccttaatgtttgtggcatggatgactactgttagcataggtgtactggttgcccggttcttcaagccagtttggtcaaaagctttcttgcttggtgaagcagcttggtttcaggtgcatcggatgctcatgttcaccacaactgtcctcacctgcattgcttttgttatgccgtttatatacaggggaggctggagtaggcatgcaggttaccacccatacctcggctgtatagtgatgactttggcagttcttcagcctcttctggcagtcttcaggccacctttacatgacccaagaaggcaaatgtttaactggactcattggagtatgggaacagctgctagaataatagcagacttaatacaatctggaaaatgtgggtgcatctcttttaaggattggtagattacgcagccataaaaaagaatgaagtcatgtcttttgtagcaacatggatgctgctggaagtgattatcctacatgaattaatgcagaaacagaaaatcacataccacatgttctcacttataaattggcagcgatgttcctgggaatggatttaccaggactgaatcttcctgattcatggaaaacctatgcaatgaccggattcgtagcctggcatgttg

SEQ ID NO: 74485 - DNA, 419 bp, Homo sapiens
tataacagagagactggatggcctttgtcccagctccagttggtgccctttaaatccctgaaatgtcctgagagggacagggcatctctgtgattcatggtgagcacctagtttatgttaacaagatctcaggatgtggaggtggggggctggccaaaccagaaagaccaaccatggcattagaaggttggggctctgagccccaggataacagcccaaagttcagagaggggagcaagaaattgagttcaagctcaaggccaatgattcaatggatcatgctgatgtagttaagcaccaataaaaactctggacacagaggctcacatgagctttcccggttaataccctgtctccacaggagggcatgaacacttcatatctgagaccttcccagacactgccctatatgtcacttc

SEQ ID NO: 74486 - DNA, 222 bp, Homo sapiens
agggttttagaaaacttttgagaatccaagtatagtttgagtagggagtgtgatacataggtttagagtttcaagaaaggtgagcatttgttaagtatctacacatatattactgtcaaagccgtaattatctatgagattatttaaggggattatatattctgaaagaattttcaaataatgtggaaatgctcatgaaataatgagacgaaattcaggaaa

SEQ ID NO: 74487 - DNA, 427 bp, Homo sapiens
cataaatgtactatggaaaataaaaatgagaaaaatggaaataaaatacaagaaaaggttatgataaatttcatattattttaccacaataaaaaaattttaataaattataaatggtgtgatatgttttgcctgtgttccacccaaatctcatcttgaattagagctcccacaattcccacgtgttgtggctgggaccctgtgggagataattgaatcatgggggcagtttaccccatactgttctcttggtggtgaataagtctcatgagagttgatggtttgataaggggtttccccttttgcttggctctcattctctcttgactgccaccatgtaagatgtgccttttgccttccaccatgattgtgaagcctcccagccacatggaactgtgagtccattaaacctttttctttacaaatt

SEQ ID NO: 74488 - DNA, 1883 bp, Homo sapiens
agggtagctccagctgtccctcccgcagttggccctgtggtgttccgaagccggttacgtacggcctgagggccaggcgaacctcaggctctttgtcctactaaaaagcgcagcacaatggtagaagcagatcatcctggcaagcttttcattggtggcctcaatagagaaaccaatgagaagatgcttaaagcagtatttgggaaacatggtcccatatcagaagttcttttgataaaggatcgaaccagcaaatccagaggctttgcatttattacttttgagaaccctgcagatgctaagaatgctgcgaaagatatgaatggaacgtctttgcatggaaaagcaataaaagtagaacaagccaagaaaccatcttttcaaagtggtggtaggcggagaccaccagcttcttcgagaaacagaagcccttcaggaagtctgagatctgcaagaggaagcagtggaggaacaagagggtggcttccctcacatgaagggcacctggatgatggtggatacactcctgatctcaagatgagttattctaggggactcattccagttaaaagaggtccatcttcaagaagtggaggtcctcctccgaaaaaatctgctccttctgctgtggcaagaagcaatagttggatgggaagccaaggtcccatgtcacaaagaagagagaattatggagttcctccacgcagagcgacaatatcttcctggagaaatgatcgcatgtcaacaagacatgatggttatgcaactaacgatggaaatcatccaagttgccaagaaacgagggattatgctccaccatctagaggctatgcataccgtgataatggtcattctaatcgggatgaacattcctctagaggatatagaaatcatcgaagttcccgagaaactagggattatgctccaccatctagaggccatgcataccgtgattatggtcattctcgtcgggatgaaagttattctagaggatacagaaatcatcgaagttcccgagaaactagggagtatgctccaccatctagaggccatggataccgtgattatggtcattctcgtcgacatgaaagttattctagaggatatagaaatcatccaagttcccgagaaaccagggattatgctccaccacatagagactatgcataccgtgattatggtcattctagttgggatgaacattcctctagaggatatagttatcatgatggctacggtgaggcccttggtagagatcattctgaacatctaagtggaagttcttatagagatgcacttcagagggacctctcatggtgcaccacctgcaagagggcctcggatgtcttatggtggaagcacctgccacgcatatagtaatacacgagatagatatggcagaagttgggagagttactcgagctgtggtgattttcattattgtgatcgtgagcatgtttgcagaaaagaccaaaggaatccgccttctctgggtagggtgctccctgatcctcgtgaagcatatggtagctcaagttatgtggcatctatagtagatggtggggagagtcgatctgaaaaaggagactcgagcagatattaaagcaagcattgaaaataatagttattgcataccaatccttgtttgcaaatcaaaaattgaaatgttatttctgcattgttacctgcatattactgaaagaaacatgttggttttgtggagagaggtagatactaacttcctccatgaattttttgaggtattcaaaggaaaaggaattgttttcaaagtaatttcatacttgttgatgctatttgaaaagtgtttagatgtaatatctaccttaaaattttcacaataaaattttacatgtactgcaaat

SEQ ID NO: 74489 - DNA, 296 bp, Homo sapiens
cgtcaaagtcccagctttcaaatacagagcccccagaacctgaaatccaagtcccagcccataagggttccgtgaacacgctcatgtgcttgttcttactagacaaagatgtgattgcaagaacaagacccctgccctgggaaactcaacactggacatctcaagctcttcctactcctgaacatgccatggaaccacaactggtgatggagccaaaagccgtgaacagtgggacatttgaaacccctcagcaagcatgcttgctaacatgatttccagggaagtgttattgatga

SEQ ID NO: 74490 - DNA, 373 bp, Homo sapiens
taaaagaggcagcaaattagaacctcaggggaagcactagtatttgaggggaaagaatggagagcaccatttttttgtgcttgaggcatccaggtaagagttccttaaagcaatcttacctttgttttctgccttcagttcctctgccatcaagctgtcttgtcgattaccaagcacaaatgctagaaatgagaggatcagggcatccaaaattccaataatagccaggatgtatgcccagcggactgagcaagccccaagagtgtacttgtctgtcttttctccacacatccgttttacttcatctgagtcccagccatcagggaaaatcatacagccaagcacaaggcaggcagcttggagagaaagagag

SEQ ID NO: 74491 - DNA, 384 bp, Homo sapiens
ccttaaactttgtaggcaatgatatattctgagatgagaccaaaagtatgaatgccattcacagtttgtcaaaatgtcaaggaggtacctgaataaccatgtagcacaggttaataataaatctttatctagttaattcatttgtgcaaatcatggcttccacttgagccccttccctctgtctagtctttcctggttgttcaagccatttttgatcatatggttcctaatctctgagaacaactgatgttcaggttatttgctgtgtgctaacctcatgtcaatttctgaagtcttgagagatagtatccacttaccctatgtaccttatagaacctgggacagtgtgagtccagatttgttctttggtttcctgaggttgta

SEQ ID NO: 74492 - DNA, 183 bp, Homo sapiens
taaaaaacagtagattaatgaggatatatgtaaatggagactttcatgcatttctaaagggagaaatacacagttgatacaagtaatgtgggtaaagaaatatgtatagtcattgcagtagtatatgtaatactatacatatttctttacccacattacttgtatcaactgtgtgtcgacgcg

SEQ ID NO: 74493 - DNA, 974 bp, Homo sapiens
tgacatttcagctccacccatagcacacccactcaaggaacatataaatgaagagatccgctcagttctcagacaagatttttcaagcaagatgaagtccatcatcctctttgtcctttccctgctccttatcttggagaagcaagcagctgtgatgggacaaaaaggtggatcaaaaggccaattgccaagcggatcttcccaatttccacatggacaaaagggccagcactattttggacaaaaagaccaacaacatactaaatccaaaggcagtttttctattcaacacacatatcatgtagacatcaatgatcatgactggacccgaaaaagtcagcaatatgatttgaatgccctacataaggcgacaaaatcaaaacaacacctaggtggaagtcaacaactgctcaattataaacaagaaggcagagaccatgataaatcaaaaggtcattttcacatgatagttatacatcataaaggaggccaagctcatcatgggacacaaaatccttctcaagatcaggggaatagcccatctggaaagggattatccagtcaatgttcaaacacagaaaaaaggctatgggttcatggactaagtaaagaacaagcttcagcctctggtgcacaaaaaggtagaacacaaggtggatcccaaagcagttatgttctccaaactgaagaactagtagttaacaaacaacaacgtgagactaaaaattctcatcaaaataaagggcattaccaaaatgtggttgacgtgagagaggaacattcaagtaaactacaaacttcactccatcctgcacatcaagacagactccaacatggacccaaagacatttttactacccaagatgagctcctagtatataacaagaatcaacaccagacaaaaaatctcagtcaagatcaagagcatggccggaaggcacataaaatatcatacccgtcttcacgtacagaag

SEQ ID NO: 74494 - DNA, 2435 bp, Homo sapiens
tgacatttcagctccacccatagcacacccactcaaggaacatataaatgaagagatccgctcagttctcagacaagatttttcaagcaagatgaagtccatcatcctctttgtcctttccctgctccttatcttggagaagcaagcagctgtgatgggacaaaaaggtggatcaaaaggccaattgccaagcggatcttcccaatttccacatggacaaaagggccagcactattttggacaaaaagaccaacaacatactaaatccaaaggcagtttttctattcaacacacatatcatgtagacatcaatgatcatgactggacccgaaaaagtcagcaatatgatttgaatgccctacataaggcgacaaaatcaaaacaacacctaggtggaagtcaacaactgctcaattataaacaagaaggcagagaccatgataaatcaaaaggtcattttcacatgatagttatacatcataaaggaggccaagctcatcatgggacacaaaatccttctcaagatcaggggaatagcccatctggaaagggattatccagtcaatgttcaaacacagaaaaaaggctatgggttcatggactaagtaaagaacaagcttcagcctctggtgcacaaaaaggtagaacacaaggtggatcccaaagcagttatgttctccaaactgaagaactagtagttaacaaacaacaacgtgagactaaaaattctcatcaaaataaagggcattaccaaaatgtggttgacgtgagagaggaacattcaagtaaactacaaacttcactccatcctgcacatcaagacagactccaacatggacccaaagacatttttactacccaagatgagctcctagtatataacaagaatcaacaccagacaaaaaatctcagtcaagatcaagagcatggccggaaggcacataaaatatcatacccgtcttcacgtacagaagaaagacaacttcaccatggagaaaagagtgtacagaaagatgtatccaaaggcagcatttctatccaaactgaagagaaaatacatggcaagtctcaaaaccaggtaacaattcatagtcaagatcaagagcatggccataaggaaaataaaatatcataccaatcttcaagtacagaagaaagacatctcaactgtggagaaaagggcatccagaaaggtgtatccaaaggcagtatttcgatccaaactgaagagcaaatacatggcaagtctcaaaaccaggtaagaattcctagtcaagctcaagagtatggccataaggaaaataaaatatcataccaatcttcgagtacagaagaaagacgtctcaacagtggagaaaaggatgtacagaaaggtgtatccaaaggcagtatttctatccaaactgaagagaaaatacatggcaagtctcaaaaccaggtaacaattcctagtcaagatcaagagcatggccataaggaaaataaaatgtcataccaatcttcaagtacagaagaaagacgactcaactatggaggaaagagcacgcagaaagatgtatcccaaagcagtatttctttccaaattgaaaagctagtagaaggcaagtctcaaatccagacaccaaatcctaatcaagatcaatggtctggccaaaatgcaaaaggaaagtctggtcaatctgcagatagcaaacaagacctactcagtcatgaacaaaaaggcagatacaaacaggaatccagtgagtcacataatattgtaattactgagcatgaggttgcccaagatgatcatttgacacaacaatataatgaagacagaaatccaatatctacatagccctgttgcttagcaaccacttgaaaagctggaccaatagcaaggtgtcacccgacctcagtgaagtctttgatgtttctgagaggcagactcccatgtggtcccagatccttggtccatggatgacaccaccttcccatgcttccttgcattaggctttctaaacccggagccccttcaaacttccaataaagggatcattttctgctttaaaaaaaaaaaaaaaaaaaaaaaaaaaagaaaaaaaaccaaaaaaaaaaaaaaaaaaaaacaaaaaaaaatttggggggggccatgccacccccccaggaaaaagatttttgaaaaacaaccctcgcgggggcgaggaggcgagggcccccacagaagagaataatgaacaaaactgtgcacagaaaagggtggtctcatagcaaagacacgtcggtgcacaaaaaaaaaaggggggcgagcgatcaccacaccagaaaaaaacaaacgcgcggggggagacacacgcgctcttttggaaaacacaccccacgagaggcatgagacaccacacggggtaataaaagagcagcaacgacgcaagaaaaaaacgcggcggcagggc

SEQ ID NO: 74495 - DNA, 1531 bp, Homo sapiens
tgacatttcagctccacccatagcacacccactcaaggaacatataaatgaagagatccgctcagttctcagacaagatttttcaagcaagatgaagtccatcatcctctttgtcctttccctgctccttatcttggagaagcaagcagctgtgatgggacaaaaaggtggatcaaaaggccaattgccaagcggatcttcccaatttccacatggacaaaagggccagcactattttggacaaaaagaccaacaacatactaaatccaaaggcagtttttctattcaacacacatatcatgtagacatcaatgatcatgactggacccgaaaaagtcagcaatatgatttgaatgccctacataaggcgacaaaatcaaaacaacacctaggtggaagtcaacaactgctcaattataaacaagaaggcagagaccatgataaatcaaaaggtcattttcacatgatagttatacatcataaaggaggccaagctcatcatgggacacaaaatccttctcaagatcaggggaatagcccatctggaaagggattatccagtcaatgttcaaacacagaaaaaaggctatgggttcatggactaagtaaagaacaagcttcagcctctggtgcacaaaaaggtagaacacaaggtggatcccaaagcagttatgttctccaaactgaagaactagtagttaacaaacaacaacgtgagactaaaaattctcatcaaaataaagggcattaccaaaatgtggttgacgtgagagaggaacattcaagtaaactacaaacttcactccatcctgcacatcaagacagactccaacatggacccaaagacatttttactacccaagatgagctcctagtatataacaagaatcaacaccagacaaaaaatctcagtcaagatcaagagcatggccggaaggcacataaaatatcatacccgtcttcacgtacagaagaaagacaacttcaccatggagaaaagagtgtacagaaagatgtatccaaaggcagcatttctatccaaactgaagagaaaatacatggcaagtctcaaaaccaggtaacaattcatagtcaagatcaagagcatggccataaggaaaataaaatatcataccaatcttcaagtacagaagaaagacatctcaactgtggagaaaagggcatccagaaaggtgtatccaaaggcagtatttcgatccaaactgaagagcaaatacatggcaagtctcaaaaccaggtaagaattcctagtcaagctcaagagtatggccataaggaaaataaaatatcataccaatcttcgagtacagaagaaagacgtctcaacagtggagaaaaggatgtacagaaaggtgtatccaaggcggttcttcccacctggaagaacatcgggcgtcagacccggaaattcctgcagacaagacgccaggaaacagtctccatcagcggaaacgccactggaacggaaagtccagatccaaagaaggcccacaccaaaggcaagcgcaaa

SEQ ID NO: 74496 - DNA, 2374 bp, Homo sapiens
  misc_feature (1818)..(1818): n is a, c, g, or t
  misc_feature (1823)..(1823): n is a, c, g, or t
  misc_feature (1826)..(1826): n is a, c, g, or t
tgacatttcagctccacccatagcacacccactcaaggaacatataaatgaagagatccgctcagttctcagacaagatttttcaagcaagatgaagtccatcatcctctttgtcctttccctgctccttatcttggagaagcaagcagctgtgatgggacaaaaaggtggatcaaaaggccaattgccaagcggatcttcccaatttccacatggacaaaagggccagcactattttggacaaaaagaccaacaacatactaaatccaaaggcagtttttctattcaacacacatatcatgtagacatcaatgttcaaacacagaaaaaaggctatgggttcatggactaagtaaagaacaagcttcagcctctggtgcacaaaaaggtagaacacaaggtggatcccaaagcagttatgttctccaaactgaagaactagtagttaacaaacaacaacgtgagactaaaaattctcatcaaaataaagggcattaccaaaatgtggttgacgtgagagaggaacattcaagtaaactacaaacttcactccatcctgcacatcaagacagactccaacatggacccaaagacatttttactacccaagatgagctcctagtatataacaagaatcaacaccagacaaaaaatctcagtcaagatcaagagcatggccggaaggcacataaaatatcatacccgtcttcacgtacagaagaaagacaacttcaccatggagaaaagagtgtacagaaagatgtatccaaaggcagcatttctatccaaactgaagagaaaatacatggcaagtctcaaaaccaggtaacaattcatagtcaagatcaagagcatggccataaggaaaataaaatatcataccaatcttcaagtacagaagaaagacatctcaactgtggagaaaagggcatccagaaaggtgtatccaaaggcagtatttcgatccaaactgaagagcaaatacatggcaagtctcaaaaccaggtaagaattcctagtcaagctcaagagtatggccataaggaaaataaaatatcataccaatcttcgagtacagaagaaagacgtctcaacagtggagaaaaggatgtacagaaaggtgtatccaaaggcagtatttctatccaaactgaagagaaaatacatggcaagtctcaaaaccaggtaacaattcctagtcaagatcaagagcatggccataaggaaaataaaatgtcataccaatcttcaagtacagaagaaagacgactcaactatggaggaaagagcacgcagaaagatgtatcccaaagcagtatttctttccaaattgaaaagctagtagaaggcaagtctcaaatccagacaccaaatcctaatcaagatcaatggtctggccaaaatgcaaaaggaaagtctggtcaatctgcagatagcaaacaagacctactcagtcatgaacaaaaaggcagatacaaacaggaatccagtgagtcacataatattgtaattactgagcatgaggttgcccaagatgatcatttgacacaacaatataatgaagacagaaatccaatatctacatagccctgttgcttagcaaccacttgaaaagctggaccaatagcaaggtgtcacccgacctcagtgaagtctttgatgtttctgagaggcagactcccatgtggtcccagatccttggtccatggatgacaccaccttcccatgcttccttgcattaggctttctaaacccggagccccttcaaacttccaataaagggatcattttctgctttaaaaaaaaaaaacacaacanacacnacnacaaaaacaaaagacacaaacacagtggtggcgggccggccgcgcccagaaaagaaagtttctcctccaacccacttgcttgggggggccgcgggcccccagaggataagcaggaaccagtggctcacagctggccgcccaggagagatcggcggcgcgaacgacagtgggtctggttttcccaccaacaaaaaagccgcggcggggaacaccgaggcgtctggaacacacccgagggggcctgccggcggcgacacacgccgtccaacacaagggggccccagagggcccagtaaaaatcccccccccgacgggtgcgtaaaagagacgaaaagactagaaacacaacaagcacgaaagaagaaaagaccaaacgacaagacagcaaggagaccaacaagagaagagacagaaacagcagaagagaacgaaaaaggaaagacagcagaaacacaaatcgtaacacaacagacgataagacacacatacagcgagaacaacagaacacaaacgatcgcaacagaaagcgacgtcaagcagcccgcgac

SEQ ID NO: 74497 - DNA, 2052 bp, Homo sapiens
tgacatttcagctccacccatagcacacccactcaaggaacatataaatgaagagatccgctcagttctcagacaagatttttcaagcaagatgaagtccatcatcctctttgtcctttccctgctccttatcttggagaagcaagcagctgtgatgggacaaaaaggtggatcaaaaggccaattgccaagcggatcttcccaatttccacatggacaaaagggccagcactattttggacaaaaagaccaacaacatactaaatccaaaggcagtttttctattcaacacacatatcatgtagacatcaatgatcatgactggacccgaaaaagtcagcaatatgatttgaatgccctacataaggcgacaaaatcaaaacaacacctaggtggaagtcaacaactgctcaattataaacaagaaggcagagaccatgataaatcaaaaggtcattttcacatgatagttatacatcataaaggaggccaagctcatcatgggacacaaaatccttctcaagatcaggggaatagcccatctggaaagggattatccagtcaatgttcaaacacagaaaaaaggctatgggttcatggactaagtaaagaacaagcttcagcctctggtgcacaaaaaggtagaacacaaggtggatcccaaagcagttatgttctccaaactgaagaactagtagttaacaaacaacaacgtgagactaaaaattctcatcaaaataaagggcattaccaaaatgtggttgacgtgagagaggaacattcaagtaaactacaaacttcactccatcctgcacatcaagacagactccaacatggacccaaagacatttttactacccaagatgagctcctagtatataacaagaatcaacaccagacaaaaaatctcagtcaagatcaagagcatggccggaaggcacataaaatatcatacccgtcttcacgtacagaagaaagacaacttcaccatggagaaaagagtgtacagaaagatgtatccaaaggcagcatttctatccaaactgaagagaaaatacatggcaagtctcaaaaccaggtaacaattcatagtcaagatcaagagcatggccataaggaaaataaaatatcataccaatcttcaagtacagaagaaagacatctcaactgtggagaaaagggcatccagaaaggtgtatccaaaggcagtatttcgatccaaactgaagagcaaatacatggcaagtctcaaaaccaggtaagaattcctagtcaagctcaagagtatggccataaggaaaataaaatatcataccaatcttcgagtacagaagaaagacgtctcaacagtggagaaaaggatgtacagaaaggtgtatccaaaggcagtatttctatccaaactgaagagaaaatacatggcaagtctcaaaaccaggtaacaattcctagtcaagatcaagagcatggccataaggaaaataaaatgtcataccaatcttcaagtacagaagaaagacgactcaactatggaggaaagagcacgcagaaagatgtatcccaaagcagtatttctttccaaattgaaaagctagtagaaggcaagtctcaaatccagacaccaaatcctaatcaagatcaatggtctggccaaaatgcaaaaggaaagtctggtcaatctgcagatagcaaacaagacctactcagtcatgaacaaaaaggcagatacaaacaggaatccagtgagtcacataatattgtaattactgagcatgaggttgcccaagatgatcatttgacacaacaatataatgaagacagaaatccaatatctacatagccctgttgcttagcaaccacttgaaaagctggaccaatagcaaggtgtcacccgacctcagtgaagtctttgatgtttctgagaggcagactcccatgtggtcccagatccttggtccatggatgacaccaccttcccatgcttccttgcattaggctttctaaacccggagccccttcaaacttccaataaagggatcattttctgcttta

SEQ ID NO: 74498 - DNA, 2627 bp, Homo sapiens
  misc_feature (2071)..(2071): n is a, c, g, or t
  misc_feature (2076)..(2076): n is a, c, g, or t
  misc_feature (2079)..(2079): n is a, c, g, or t
tgacatttcagctccacccatagcacacccactcaaggaacatataaatgaagagatccgctcagttctcagacaagatttttcaagcaagatgaagtccatcatcctctttgtcctttccctgctccttatcttggagaagcaagcagctgtgatgggacaaaaaggtggatcaaaaggccaattgccaagcggatcttcccaatttccacatggacaaaagggccagcactattttggacaaaaagaccaacaacatactaaatccaaaggcagtttttctattcaacacacatatcatgtagacatcaatgatcatgactggacccgaaaaagtcagcaatatgatttgaatgccctacataaggcgacaaaatcaaaacaacacctaggtggaagtcaacaactgctcaattataaacaagaaggcagagaccatgataaatcaaaaggtcattttcacatgatagttatacatcataaaggaggccaagctcatcatgggacacaaaatccttctcaagatcaggggaatagcccatctggaaagggattatccagtcaatgttcaaacacagaaaaaaggctatgggttcatggactaagtaaagaacaagcttcagcctctggtgcacaaaaaggtagaacacaaggtggatcccaaagcagttatgttctccaaactgaagaactagtagttaacaaacaacaacgtgagactaaaaattctcatcaaaataaagggcattaccaaaatgtggttgacgtgagagaggaacattcaagtaaactacaaacttcactccatcctgcacatcaagacagactccaacatggacccaaagacatttttactacccaagatgagctcctagtatataacaagaatcaacaccagacaaaaaatctcagtcaagatcaagagcatggccggaaggcacataaaatatcatacccgtcttcacgtacagaagaaagacaacttcaccatggagaaaagagtgtacagaaagatgtatccaaaggcagcatttctatccaaactgaagagaaaatacatggcaagtctcaaaaccaggtaacaattcatagtcaagatcaagagcatggccataaggaaaataaaatatcataccaatcttcaagtacagaagaaagacatctcaactgtggagaaaagggcatccagaaaggtgtatccaaaggcagtatttcgatccaaactgaagagcaaatacatggcaagtctcaaaaccaggtaagaattcctagtcaagctcaagagtatggccataaggaaaataaaatatcataccaatcttcgagtacagaagaaagacgtctcaacagtggagaaaaggatgtacagaaaggtgtatccaaaggcagtatttctatccaaactgaagagaaaatacatggcaagtctcaaaaccaggtaacaattcctagtcaagatcaagagcatggccataaggaaaataaaatgtcataccaatcttcaagtacagaagaaagacgactcaactatggaggaaagagcacgcagaaagatgtatcccaaagcagtatttctttccaaattgaaaagctagtagaaggcaagtctcaaatccagacaccaaatcctaatcaagatcaatggtctggccaaaatgcaaaaggaaagtctggtcaatctgcagatagcaaacaagacctactcagtcatgaacaaaaaggcagatacaaacaggaatccagtgagtcacataatattgtaattactgagcatgaggttgcccaagatgatcatttgacacaacaatataatgaagacagaaatccaatatctacatagccctgttgcttagcaaccacttgaaaagctggaccaatagcaaggtgtcacccgacctcagtgaagtctttgatgtttctgagaggcagactcccatgtggtcccagatccttggtccatggatgacaccaccttcccatgcttccttgcattaggctttctaaacccggagccccttcaaacttccaataaagggatcattttctgctttaaaaaaaaaaaacacaacanacacnacnacaaaaacaaaagacacaaacacagtggtggcgggccggccgcgcccagaaaagaaagtttctcctccaacccacttgcttgggggggccgcgggcccccagaggataagcaggaaccagtggctcacagctggccgcccaggagagatcggcggcgcgaacgacagtgggtctggttttcccaccaacaaaaaagccgcggcggggaacaccgaggcgtctggaacacacccgagggggcctgccggcggcgacacacgccgtccaacacaagggggccccagagggcccagtaaaaatcccccccccgacgggtgcgtaaaagagacgaaaagactagaaacacaacaagcacgaaagaagaaaagaccaaacgacaagacagcaaggagaccaacaagagaagagacagaaacagcagaagagaacgaaaaaggaaagacagcagaaacacaaatcgtaacacaacagacgataagacacacatacagcgagaacaacagaacacaaacgatcgcaacagaaagcgacgtcaagcagcccgcgac

SEQ ID NO: 74499 - DNA, 7899 bp, Homo sapiens
ttcaagtatggcagacaaaggatgttctgcgtggggaaatgtggtgacacccatttcacaaggacagctcacatagattgagtgctcaggaaggaccagcaccatacccagtgcctgatgtgtatcatctcaattagtccttgcctcagatgcaaaaggaaaccatcgccatcatcatcaccaccatcatcatcttcctcctgtgcagatggaaaggctgaggcatagagaggtgacggagtctgcccaggactgcaagcctgctggtggcagagccaggttccaatggaatgaaggctgtcatcctcagatggcagggtaggcaggtggctagagctcacttgggagaaggggaaaggacactgactttggctagggatggagcagagcttgggctggctttccatgcacgggcagggggcgtggctcatggctacgctccagccccgggtgtggacatttaatcttccaggtctaccctaggctatgggtctggacagcactgtgatggaaagaagacactctatgtcctgcattctgtgaccaatgatgtgactgtgggaatggcgctggcatctggctgccactctgggacgggtggccagctgccatcaggccccacccaggatgggaccaccatgcgacttcttccctcgctcctcctggtcatgtccagagccccaggaggaccagcaaagcctctcgagccgatggcagctcacgttctgccttgtcagctactcctctcctgggcaatattggctgcttgctgtggctctccccggggtatgtgactgcctctgtgctgggcacctggcctgggctttccttctgggcctgggcagctgggctcagcttggacccaggcagcagccacagaggggcccatggaggtgacagagttgcttctatgatggtgaacgggcagctgtgacacggaggaggcgaccactcctgagtttccaagtgctgcggtcagggccggggccagcaaagtccctcccatattcaaagagcgggtttgggtttgtcccaggaggacatagtcaggagcccatgctgggacatgcctcctccaaagttcagcctggatccccagcctctgccaacggccccgctccttagctaacccagcttgctcctgggttccacggcggagtcagatgtttctgggcagtttcacctttgtgccttaaatgcatgttgaggactttaaggaattgtggagaaatagggctgtggcaaaggcaagtgacaactgggaacaatgatcccgcagaggctgctgaggcctgggccccaggggcgtgggttcatccttctgcctgggctttggtgggaggggcagactctgtggtctgagacacaaaaaaacccaaaacatatgtgtgtacagacacacagcagagccacacacacacttgtgcccatgcacacactcacaggaggcccgtggactccgcacagggaagaaactcctccggtcgacagtggacggcgctgcagcagggactcacccccaagccctgcctgcctcccattgcccacctggccctggcttgatgggcttatctcatgctgtggccggggacctcttgcttcctgcaaccccttgctggactggggcctgggcctctcctgggctgtgcctagggtttgtaacccagggcctgtgccggcgtgcacagagcatctctccctgggaggctcagggctgcctcctcgagctctgtgggcctgcactggccggtgagcttgtggtgtgggttttcaggctgtatccttctacctcctgagcccaggggtcccaggcgccctgcagctgtctcctcggccatcctgtggggccccgaggccttgccctcacttcagtgcctgggtgctcaggctttgcccaggtgccaggagaaggtgtgagcatgagcctattggacacacctggcgacgtataccaggtgtcccacccctgccaccatggggcctcccgatacggcaaccaccacggacctgtggggaccaatgaggaaagagagaggcaggtctgggccaggctcacagggactccggcatagcagaccctgccccagcaggcccccttgtccttcctgggtcctggtccttcatgaggaactagcccatccctggtggggctcccaccccgcttctcagtgggctctatgcttgcctcgtcggagtcacccctcaggcagtcctgggatcctctcctttagacccactgtgccttcccggcctcccgggcttctgctgggggcagaagaaatgcctccccaggtctgtctctggaggctctgagggagatgggcttgggggctgtaggaggaggcagggattccagggtgtcaggaaggcaggggtgccaggtcccacctagtgaagtaataaaccgtgggtggtgatagtgacccagtgccctcactgcccagccccgcctgtcctcagccagcactgcagggatcccaggcccagactctggaggccttcactgatcccagccaccccagaaaagctgcagcctgcaggcaccagccgggccatatgcccagtgccagctagggcccaccgcccatcctgcacacggggccgctgggcaggtgcccctcacacccccaggatgtcagtgctcacctcgagcaaagcgccccagctcggccttgggaggtggtcatgtccagggggatgatggagagctgtccaaccaagagagcgggagggagggaaggagggagggagagagatagagagagagagagagagagaggaagtgtgggccctaaggctgccttagtggaggtgcgcgtggcctgcacctcaccaagcctagccactctcgcggctctgagtggctcacaggcttgtgagggccccgtcgctgcctgctgggtccccaccagggctccctctaggaatgcgccatggctgctatgacaatttgcacagcccagtggcttaaacaccatttataccacaggtccagatgaatcctgcagggccagggtctgggggtgctggaggccatgctccctccaggcttgcggggagaacttccctgcctcctccagtctctccatccctgagctctcggctcctcctccgtcttcagggccagggcgtagcgtctgctctctcggcctctgcctccgcttcccacctcacctggcttctgtctatgtcagtctccctctgccaacctcctagaaggacacttgtgattacattagggctcacccctttaatccaggggagcctctccacttcatgattttcagctaacttgcttctgcacagaccccctttccctataagggcacacattcactggtcccggggctaaggaccttgctccaagtccctccacccatgatgctgtgccttccagaaacctgtcctctgcagctcggtcttgaccccaagcctgctggtgacctgaacttcacagggttatccccttggactgtgtgcagcacgatgcaatttctgggcctgaatgtcatgctccctggggcaggaccttgagcctgcagcacacactaggccacctgcagtctcacaggccatgccctgggtagacagggaggtgctcaaccccagctcgggtcctctagtctgcctggctaccatgcttctcactctcctgcatctgcagaccctgcgttgccatgtgaggcaggggtggggtggggctgagggcgtggctttggtccctggctgtccggatgaagtaccagagtgacgccacagcccatcccggtgacatgctcacccccaacccccgtgtccgggaccccggtcttgtgtggtccctgatgtggagtcctcagtccttaagatacatccagaaagtcctggccatgaattggaggtgcagagtcctgcagagcctctgggctgggctggtgcccccaggagatggagggcctggtggatgccctcctccctcagagctggggcagctgcctcccaggggtgggactctgggctcagagagaggcccttgagctgcagctcagggggatgcgaggcttcgtggactgtgtcctggtccatgtggtgcacgtgtctccacctccaaggagaggctcctcagtgtgcacctcccccacatccgtcctctctgccggccccgggcgtctgagcagtcattccatgccagcacctctgcagcctgctgggcctcaggttctctgtgagggacctccccggccttcggcggaggtggagtaagctccgtcaaggcaggtggcttcgtcccttcctgtgagtgacaccagtgatgaaatggacccctccacacaggcatcctcagggcacagggccctgggggcaccttcctcctttcgtatttgttgagaaaaaaagtggcattgcgctcacaccaggatgctggagcagagctgacatgctcgggaaagggcagaggtcactgggggtgggaaggtcatccagtccagactcagcacctcgtgggctggtaaactgaggctcaaagtgctggtgccaggcctgaggcctcgcggtgacccctctctctggttcccagcacctgcctgagacctgccccaggcacccataacctggaattccctgtttccttgtccagggcctgaggaaatggctccccaggtctgtctctggatgctctgaggcagatgggcttgggggctctaggaagaggcagggactccagggtgtcaggaaggcaggggtgccgggtcccacccagtggagtaacaaactgtgggtggcgtttgggcctccccgccttccccactgggtgtgctggtgctggcgctgctgggtcagggctgcccgtgaccccagacaccactgtccatcctgtgaggctcccgtctgggcatgtcctgggtggattcctcctttctgttaagtagctacatgaggcaggggctcctggatccaaagcaaatgacaggaattccagagccaggtgcatccactcagggcagccagtgttggtggagctgcctctagcacatggaggagagtgaaagtcagcctgcccctctcacgagaaaagaacctggggatacctctcagcctccagcgttgcaagtgcaaggccagtggagttaatctgcaacgtgcacgagggcgtgtgtcagtggctgtgtgcaggagtgtgagtgagcaagagcaagagcgcatggctcctgctgtacctcaaggtgtgggctcctggtggctgctcagtgttcccaggggtgagaggcctcatgtatcctaggctgcctgagatttctgtgtgctgatcgcatcctcagtttcttgtccaccgcttcactggcaagagtcccaggctccaaggacaccctccctgcacatgattgggtgttaatggtggcctgggttgtgtcttcccctggggatgagggttgggtgtccatggtgccctgggctgtgtcctcccctagggatgagggtcgggcctccacgatgccctgggctgtgtgctcttatgggaatgagggttgggtgtccaagatgccctgggctgtgtccttccctggggatgagggttggatgtccaagatgccctgggctgtgtactcccctaggaatgagggctgggtgtccaagataccctgggctgtgtcctcccctggggatgagggttgggtgtccatggtgccctgggctgtgtcctcccctggggatgacggttgggtgtccatggtgccctgggctgtgtttccttggggatgagggttgggtgctatggcatcctgggcaggtgcttcctttctgcacaagggttgggtgaccatgatgtcctggcaatggcttccctgggttgcctcttttctgccatgtgggaagagcaggggaggtttagttggtctcagcacatcattctctcaggataagtagaagagtgtctgagctgtgaggccagtgctccagctttggaattgtcttccccaccctcacctccatcccatcaaagcccgacatgtcgtgtggcagcagcgaggtgggtgttggctgttctcttgggctgggggttagtcgtggacggggaaaggagagatgctggtcaaagggcatgaagtttctgctgatgggaggagtcagttcttttgatctgttgcacagcatggtgactatagttaacaataatgactatttcaaaattgctaaaagatgagattttaaatgttctcaccacaaaatgataagtgtgtgaggtgatggatatgccacttaccttgttttaatcatcccacaatatagacaggcattgtcactttgcattgtaccccaggaatcttcacatttgcttttttgtcaattaaaaatagagacacaaaaggagagaggggagagcaatagactcttcacggaaccgtgggcttctgcctccgggtaaaataaactgcaaaaaggattcccaggaaaccgttccctctttcagcccttggttacaggaagccggatttgggaaatctgcctggatgacattcacatgaacgggcacatacaggaaaacacggtaatgtaattagaatagtcagagaaaagtagccagaaatgacattcacatgaacgggcacatacaggagaaaacacggtaacgtaattagaatagtcagagaaaagtagccagaaatgacattcacatgaacgggcacatataggagaaaccatggtaacgtaattagaatagtcagagaaaagtagccagaaatgacattcacatgaacgggcacatacaggaaaacacggtaatgtaattagaatagtcagagaaaagtagccagaaatgacattcacatgaacgggcacatacaggagaaaacacggtaacgtaattagaatagtcagagaaaagtagccagaaatgacattcacatgaacgggcacatacaggagaaaacacggtaacgtaattagaatagtcagagaaaagtagccagaagaatttgcaacgtgcccttgtaacaccaaatttgatcagttttttaaaaaatgatcgttatgtaggtgattgagaagtaaatgtattcttttttaaggtaaaaatttggacccttatcatgcatacccccctctgtgctcttcaaatcaacatcattattaatatctgtacatttttgctcatctgagccagcacaggctgaggctgtcagaatggacaccttttggttgttgggtttctgtcagtttctggggtgaagctgcgtgattgagaacgtagctcttggctgccatctcggggattattaaggactgtgaactctatccacaagccatggcaatatctgtcccaccgaatgctccctctaacacactcttactcccgtgatgtgtgttaagggctccgatgatgctgaaaacagcacaggatgtgaaaaggcaggaacagttctgaagtcaaaggctgatgtcctgtttctctttccctctgtgaccgactcccttcccagtggtaacaagtacccacagcttggtttgaatttctgcacgctgttgtctgtgcactcgctcacacttacgcacacagcaggcatgtgggcgatgctgggtattttgtgtatgagtgggatgcacatacacacatctacatccatatcatgcccatgcatctgtaacttgcttttcccgtgtaagaacacttcttagagtttgttcaatgcatgtgtctgtgtgaatgattgaaggcatttctaacccattttaaagatggctacttaggaccatatggatgttgtactgatgtcatttgaccacgtccattgtttccatcttttgggctgttcttgtgtattttactttccatgtaacactgtgacattgagaattggtacctacaacagtctatttgctttacattaaatttgtaggctaatttgtgtaccttca

SEQ ID NO: 74500 - DNA, 961 bp, Homo sapiens
  misc_feature (10)..(10): n is a, c, g, or t
  misc_feature (12)..(12): n is a, c, g, or t
  misc_feature (138)..(138): n is a, c, g, or t
cgtcaatcanantttgcatttcttctcagccttagtagtttgtgtctttgtagatgtttgttgatttcacccatgttatcaaattgttggcatacacttgttggtaatattccttgatatcaagtattccttgataanattcctttccacctcagtctttttagtggatagatcactattaattacacctcctgctgatgtttcatttcttgttactctaattacaaaatacatacttgaaaatatggaaatgtgtaaaatagaaaatccacagccccaaaacctcatcattactgtttgtctagcatttgcctggctagtctcatgtgcttatttttcccattaacatttagaatcattttgagcaagtttttaaaaaaatgacttcataagtaaatgaggaaaatttttacctatttacaatagagtatcttgaatgtagcatatttatccctttattaagttttttgatgcctttaagtgagttgggttttttttttttcttttttgagacagagtctctgtcgcccaggctggagtgcagtggtgcgatcacagctcactgcagccttgagcttcccaggctcaggtgagcctcccaccacagcctcccaaggaactgggaccgcagataaacaccagcacacttggataatttttttgtagaaacggggtctcagtatgttgcccaggcgggtctgaaactcctgggttcaagcaatccaccagcctcggcctcccaaaatgctgggattacagacgtgagctgctgcatccagctgagattttaaagtatttcataaaagtcttgcacatttctctttgggtggattcttcgggtattttttgttactattgtgaatggaatccttccttttgttgcattttctcattgttatttggatatagacgagctattagttttctcacattaatttgaaatcacccatctatttgggct

SEQ ID NO: 74501 - DNA, 1017 bp, Homo sapiens
  misc_feature (10)..(10): n is a, c, g, or t
  misc_feature (12)..(12): n is a, c, g, or t
  misc_feature (138)..(138): n is a, c, g, or t
  misc_feature (146)..(146): n is a, c, g, or t
  misc_feature (148)..(148): n is a, c, g, or t
  misc_feature (151)..(151): n is a, c, g, or t
  misc_feature (155)..(155): n is a, c, g, or t
  misc_feature (158)..(158): n is a, c, g, or t
  misc_feature (161)..(161): n is a, c, g, or t
  misc_feature (178)..(178): n is a, c, g, or t
cgtcaatcanantttgcatttcttctcagccttagtagtttgtgtctttgtagatgtttgttgatttcacccatgttatcaaattgttggcatacacttgttggtaatattccttgatatcaagtattccttgataanatttctgnanagnccanagnaanatttcttcttcagagtnatgtaatctttatatccttcctttccacctcagtctttttagtggatagatcactattaattacacctcctgctgatgtttcatttcttgttactctaattacaaaatacatacttgaaaatatggaaatgtgtaaaatagaaaatccacagccccaaaacctcatcattactgtttgtctagcatttgcctggctagtctcatgtgcttatttttcccattaacatttagaatcattttgagcaagtttttaaaaaaatgacttcataagtaaatgaggaaaatttttacctatttacaatagagtatcttgaatgtagcatatttatccctttattaagttttttgatgcctttaagtgagttgggttttttttttttcttttttgagacagagtctctgtcgcccaggctggagtgcagtggtgcgatcacagctcactgcagccttgagcttcccaggctcaggtgagcctcccaccacagcctcccaaggaactgggaccgcagataaacaccagcacacttggataatttttttgtagaaacggggtctcagtatgttgcccaggcgggtctgaaactcctgggttcaagcaatccaccagcctcggcctcccaaaatgctgggattacagacgtgagctgctgcatccagctgagattttaaagtatttcataaaagtcttgcacatttctctttgggtggattcttcgggtattttttgttactattgtgaatggaatccttccttttgttgcattttctcattgttatttggatatagacgagctattagttttctcacattaatttgaaatcacccatctatttgggct

SEQ ID NO: 74502 - DNA, 995 bp, Homo sapiens
  misc_feature (124)..(124): n is a, c, g, or t
  misc_feature (126)..(126): n is a, c, g, or t
  misc_feature (129)..(129): n is a, c, g, or t
  misc_feature (133)..(133): n is a, c, g, or t
  misc_feature (136)..(136): n is a, c, g, or t
  misc_feature (139)..(139): n is a, c, g, or t
  misc_feature (156)..(156): n is a, c, g, or t
gcattttttcccaccgcaaaaggtgtggccttgtagaaatttgtttattttcccccgtgttcacatggttgggaaaacctggtggggaaataccctataaccagattccctgaaaatattctgnanagnccanagnaanatttcttcttcagagtnatgtaatctttatatccttcctttccacctcagtctttttagtggatagatcactattaattacacctcctgctgatgtttcatttcttgttactctaattacaaaatacatacttgaaaatatggaaatgtgtaaaatagaaaatccacagccccaaaacctcatcattactgtttgtctagcatttgcctggctagtctcatgtgcttatttttcccattaacatttagaatcattttgagcaagtttttaaaaaaatgacttcataagtaaatgaggaaaatttttacctatttacaatagagtatcttgaatgtagcatatttatccctttattaagttttttgatgcctttaagtgagttgggttttttttttttcttttttgagacagagtctctgtcgcccaggctggagtgcagtggtgcgatcacagctcactgcagccttgagcttcccaggctcaggtgagcctcccaccacagcctcccaaggaactgggaccgcagataaacaccagcacacttggataatttttttgtagaaacggggtctcagtatgttgcccaggcgggtctgaaactcctgggttcaagcaatccaccagcctcggcctcccaaaatgctgggattacagacgtgagctgctgcatccagctgagattttaaagtatttcataaaagtcttgcacatttctctttgggtggattcttcgggtattttttgttactattgtgaatggaatccttccttttgttgcattttctcattgttatttggatatagacgagctattagttttctcacattaatttgaaatcacccatctatttgggct

SEQ ID NO: 74503 - DNA, 572 bp, Homo sapiens
  misc_feature (10)..(10): n is a, c, g, or t
  misc_feature (12)..(12): n is a, c, g, or t
  misc_feature (138)..(138): n is a, c, g, or t
  misc_feature (146)..(146): n is a, c, g, or t
  misc_feature (148)..(148): n is a, c, g, or t
  misc_feature (151)..(151): n is a, c, g, or t
  misc_feature (155)..(155): n is a, c, g, or t
  misc_feature (158)..(158): n is a, c, g, or t
  misc_feature (161)..(161): n is a, c, g, or t
  misc_feature (178)..(178): n is a, c, g, or t
cgtcaatcanantttgcatttcttctcagccttagtagtttgtgtctttgtagatgtttgttgatttcacccatgttatcaaattgttggcatacacttgttggtaatattccttgatatcaagtattccttgataanatttctgnanagnccanagnaanatttcttcttcagagtnatgtaatctttatatccttcctttccacctcagtctttttagtggatagatcactattaattacacctcctgctgatgtttcatttcttgttactctaattacaaaatacatacttgaaaatatggaaatgtgtaaaatagaaaatccacagccccaaaacctcatcattactgtttgtctagcatttgcctggctagtctcatgtgcttatttttcccattaacatttagaatcattttgagcaagtttttaaaaaaatgacttcataagtaaatgaggaaaatttttacctatttacaatagagtatcttgaatgtagcatatttatccctttattaagttttttgatgcctttaagtgagttgggcgataagatcacgggacactctaggc

SEQ ID NO: 74504 - DNA, 381 bp, Homo sapiens
aatgaacaagataaaatacataaagtgtataaaatatataaaataaacataggtgctttgggctactaagttccttttttaaatttctaaattaaaaatttcaactaagttaaacaaaacaaaacacttggactggtgtggtggctcatgcctgtaatcccagcactttgggaggcggaggcaggcgggctgccagagctccagagttcgagaccagcccgggcaacatggaaaaaccccgtctctacaaaaaaacacatggtgcacgcctgtagtcccagctactcagaaggctgtggtgggaggaatacttgagcctgggaggccaaggctgcagtgagctgtgtttgcaccactgcactccagcctgggcaacagaag

SEQ ID NO: 74505 - DNA, 260 bp, Homo sapiens
aacaaaggtccgattatgacatttcattactataatttagtggtaaacgtcctttggctctaaggctttctcctgaaaagctgtcatttgtttgtcaagatacttaaaataataactctttgtttttacagaccttgggtttattctaaaccacttagaaaaatgtgtcagagtgcttcaagcccacagatatgaaatgcccaatttctcttggcccttgcctgttggacatctccaaagagactggcttagttgctgtc

SEQ ID NO: 74506 - DNA, 479 bp, Homo sapiens
ttctcgtcagaccccactgaatatatacaggagttccaatatctaactctgtcctacaatttaacctggagagacttaaatgtcatcctaacttctaccctctccccagatgaacgggaaagagttttttctctagcccaatctcatgtggacaactaccggcttcatgagccaggcctccaggaaggcattagagcagttccctgagaggatccccagtggaactatcaggcagattccccaggtatagctcagtgagattacacgatttcttgcctagttgaagggctttaaaaggcagcatagaaatctgttaattatgacgaacctgaagaaaccacccaaggaaaggttgaaaacgcagccagttcatggctcacttagcagcaatcctgagacgctttacagccttggacccagaggggccagaaggccgtcttgttctcaatatgcgttttatcactcagtccacccatttg

SEQ ID NO: 74507 - DNA, 343 bp, Homo sapiens
aaacaattccaataaagaagtgatcaacaggagtgtccaggcacataatctgtgattcttaagagaaatattaagcaccaccacactccaaagagaagtctaaagataaacagtggacaatttaagatgagatatctaaaacaaatgaaatctggagtcaaaaagatcctatcaaccaacaatctgctatatcactctttagcaaggataacgtggattataatatgtcgtctgcatctatgatcaagttgaaaaaggttaaaaaattataaaactcaatgccactaacggtaaggtagttaaataaataaatggtacaagcataagaaaaatttagaaattt

SEQ ID NO: 74508 - DNA, 453 bp, Homo sapiens
gaagagttgaacaaaaagtgccagtccttggcaggctttttgaaaaatcatactacaagatacaaaaattagaacaaaaactagtaaatgttttgttcaaaatcacaaagaattattttttacagagcagtgtgtctctcctggtcttttatattattaatgtaccatgccacatttttaactgttagaaagaaggaataaaagaaaatgtcccatagtctgtcactttagacgctttaacagtgtttgacaaaatgtaggtaaattcttctaagaacattatcattaacagttgattatggtgttcataagagtggtgatattaagaatttatattttaaaatttagtcatatctgtatgtaatcccaagttgctgactgaacttaaatcttttaaaggataattacaattaaagtgaaaatattttctgcactcatgcttttttctagatg

SEQ ID NO: 74509 - DNA, 416 bp, Homo sapiens
agaataaagctgctcaataaaagctattctttctttactctgaatgggcactatgccgagaatatgcttatagtgcaaccttttaaacgagggggtaaacgtcattaaaatgtggtcactttgggaatttacggcccaagttgaatatatttcagggactctgaggctccttatggaaatgaaacctctaccatttgttagcctatcatatttttgcactggcttatttatttatttgacaaattctgctgtttgtgaccagttcaccttagaccacagatgttaaattcaagttgctaaatgacagtgctattcagactcctttaaaaagaaggccagggtgcagtggctcacacctgtaatcccagcactttgggaaggccaaggcaagaggatcacctgaggttaggagctcg

SEQ ID NO: 74510 - DNA, 398 bp, Homo sapiens
gggctagagtacaatggtacaatcatggctcactgcagcctcgacctcctgcgctcaagcagtcctccctgccttggccttccaaagtgctgggattacaggtgtgaggcacggtgcccagccaatatctttattttaatttgtttttatttcctttatttttagctggttttgtccattttcctaacaaagcagggaccctgggtttctttttagtctgtctgttatataaacttgaagcctgactccattctatttgcctggagttagtatactttcttagggtgaaaggaaggcagcttgtattgagccttttaaagtattgaatgcttgcaaattgctaacattcttttgtgtaaaataaccaataaacctgttttgtcatactctacttaaaa

SEQ ID NO: 74511 - DNA, 371 bp, Homo sapiens
gccaggctggtctcgaactcctgactgaccttgtggtccacctgccttggccttccaaagtgctgggattacaggtgtgaggcacggtgcccagccaatatctttattttaatttgtttttatttcctttatttttagctggttttgtccattttcctaacaaagcagggaccctgggtttctttttagtctgtctgttatataaacttgaagcctgactccattctatttgcctggagttagtatactttcttagggtgaaaggaaggcagcttgtattgagccttttaaagtattgaatgcttgcaaattgctaacattcttttgtgtaaaataaccaataaacctgttttgtcatactctacttaaaa

SEQ ID NO: 74512 - DNA, 549 bp, Homo sapiens
cttccgtcattcctatgggactaaggataatactttgtgttcgggcagaatcattccctgtgtaccaccagcgcggtgtgcatctcttgggccaccaccaacagttacacaagctttgtactttgtaactcccaggagtacaactcacatccatagtttttgcaaatagattccctagagttgtgtggtgtttgactaagcagctcttcacagtgatcttaggagaaaccaaagaccccatcacccagatatgatgctgatggttacaaccagtattaaatcacagaagtcacaaaccagacgccttcaggggcctggcaaataatataaatgagtgaagtaggttgtatataggacagtaggaagtgatggggcaagcacctgctccaccaaaaggcatctaaattcaacaaaaaacaagaagccaggtgcagtagagtgcacctgtagccccagctactcaggaggctgacacaggaggatcccttgagcccagcagttcgagacaagcctgggcaacatagcaagaccccatctttaaaaaaataa

SEQ ID NO: 74513 - DNA, 6457 bp, Homo sapiens
gctgaccagccagtgaggacgcccgctgcctcccacctgccctcctgccgtctttcgccagccaagcccagcctgagccagcacttgcctttacgaccatgttcaaggggctgagcaaaggctcccaggggaaggggtcccccaagggctcccccgccaaggggtcccccaaaggctcccccagcaggcacagccgggctgccacccaggagctggcccttctcatctcccgcatgcaagccaacgccgaccaggtggagcgggacatcctggagacgcagaagaggctgcagcaggaccggctgaacagtgagcagagccaggccctgcagcaccagcaggagacgggccgcagcctgaaggaggctgaggtgctgctcaaggacctcttcctggacgtggacaaggcccggcggctcaagcacccgcaggctgaggagattgagaaggacatcaagcagctgcacgagcgggtgacccaggagtgtgcggagtaccgtgccctgtacgagaagatggtgctgccccccgacgtgggacccagggtcgactgggcacgcgtgctggagcagaaacagaagcaggtctgcgcaggccagtacgggccgggcatggcggagctggagcaacagatcgccgagcacaacatcctgcagaaggagatcgacgcctatgggcagcagctgcggagcctcgtggggccggatgcagccaccatccggagccaataccgagacctactgaaggcggcgtcgtggcgcgggcagagcctgggcagcctgtacacgcacctccagggctgcacgcggcagctgagcgccctggctgagcagcagcgccgcatcctgcagcaggactggagcgacctcatggccgaccctgcgggcgtgcggcgggagtacgagcacttcaagcagcacgagctgctgagccaggagcagagcgtgaaccagctggaggacgacggcgagcgcatggtggagctgcggcaccccgcggtggggcccatccaggcccaccaggaggccctgaagatggagtggcagaacttcctgaacctgtgtatctgccaggagacccagctgcagcacgtggaggactaccgccggttccaggaagaggccgactcagtcagccagaccctggcgaagctcaactccaacttggatgccaagtacagccctgcacctgggggcccccctggcgcccccacagagctgctgcaacagctggaggcagaggaaaaacggctggccgtcaccgagagggccactggggacctgcagcggcgaagccgggatgtggcccctctgccacagcgaagaaacccccctcagcagcccctgcacgtggacagcatctgcgactgggactcaggagaagtgcagctgctgcagggtgagcggtataagctggtagataacactgaaccgcacgcctgggtcgtgcagggccctggcggggagaccaagcgtgctcccgccgcctgcttctgcatcccagcaccagaccctgatgctgtggccagggcctcccggctggcctcagagctgcaggccctgaagcagaaattggccacagtccagagccgcctgaaggccagtgctgtggagtctcttcggcccagccagcaggctccatctggctcagacctggccaacccacaggcccagaagctcctgacacagatgacccggctggatggagacctgggacagatagagaggcaggtgctggcctgggcgcgggccccgctgagccgccccacacccttggaggacttggagggccgcatccacagccatgagggcacagcccagcgcctgcagagcctgggaacggagaaggagacagcccagaaggagtgcgaggcgtttctgtccacgcggcccgtgggccccgctgccctgcagctgcccgtagccctcaacagcgtgaagaacaagttcagtgacgtgcaggttctgtgcagcctctacggggagaaagccaaggctgccctggatctggagcggcagatccaggatgcggacagggtcatccgaggcttcgaggccaccctggtgcaggaggcccccatccctgctgaaccgggggctctgcaggagagggtcagcgagctgcagcgccagcggagggagctgctggaacagcagacctgcgtgctgcggctacaccgcgcgctgaaggcctcggagcacgcatgcgctgccctgcagaacaacttccaggagttctgccaagacctgcctcgccagcagcgccaggtgcgagccctcaccgaccgctaccacgccgtaggggaccagctggacctgcgggagaaggtggtgcaggatgccgccctcacctaccagcagttcaagaactgcaaggataacctgagctcctggctggagcacctgccccgcagccaggtgcggcccagcgacggccccagccagatcgcctacaagctgcaggcgcagaagaggctgacgcaggagatccagagccgagagcgggacagggccacagcatcccacctctcccaggccctgcaggcagcgctccaggactatgagctccaggcagacacctaccgctgctctttggagcccaccctggcagtgtcagcccccaagagaccccgagtggctcccctgcaagagagcatccaagcccaggagaagaaccttgcaaaggcctatactgaggttgcagcagcacagcagcagctgctccagcagctggagtttgctagaaaaatgctggagaagaaggagctcagtgaggacatccgaaggacccatgatgcaaagcagggctccgagagccctgcccaagcagggagagagtcagaggccctgaaggcccagctggaagaggagaggaagcgggtggcccgggtgcagcatgagctggaggcgcagaggagccaactgctgcagctgaggacccagcggcccttggagaggctggaggagaaggaagtggtagagttctaccgggacccccagctggagggcagcctgtccagggtgaaggcccaggtggaggaggagggcaagcggcgggctggcctgcaggcagacctggaagtggcagcccagaaggtcgtgcagctggaaagcaagaggaagaccatgcagcctcatctgctgaccaaggaggtcacccaggtggagagggaccccggcctggacagccaggcggcccagctcaggatccagatccagcagctccgcggggaggatgccgtcatctcggcccggctggaagggctgaagaaggagctactggcccttgagaagagggaggtggacgtgaaggagaaggtcgtggtgaaagaggtagtcaaggtggagaagaatctggaaatggtcaaggcagcccaggctctgaggctgcagatggaggaggatgctgcgcggaggaagcaggcggaggaggctgtggccaagctacaggctcgcatcgaagacctggagcgggctatcagctcggtggagcccaaggtcatcgtgaaggaggtgaagaaggtggagcaggacccagggctcctccaggagtcctccaggctgaggagcctcctcgaggaggagaggaccaagaacgcgacgctggccagggagctgagcgacctgcacagcaagtacagcgtggtggagaagcagaggcccaaagtgcagctccaggagcgcgtccacgagatcttccaggtggatccggagacagagcaggagatcactcggctcaaggccaagctgcaggagatggcgggcaagaggagcggtgtggagaaggaggtggagaagctgctgcccgacctggaggtcctgcgggcccagaagcccacggtggagtacaaggaggtgacccaggaggtggtgaggcatgagaggagccccgaggtgctgcgtgagatcgaccgcctgaaggctcagctcaacgagctcgtcaacagccacgggcgctcccaggagcagctcatccgcctgcagggtgagcgcgacgagtggaggcgcgagcgggccaaggtggagaccaagacggtgagcaaggaggtggtgcgccacgagaaggacccggtgctggagaaagaagcagagcggctccgccaggaggtgcgggaggcggcccagaagaggcgggccgcggaggacgcggtgtacgagctgcagagcaagcgcctgctgctggagaggaggaagcccgaggagaaggtggtggtgcaggaggtggtggtcacccagaaggacccgaagctgcgcgaggagcacagccggctgagcgggagcctggatgaggaggtgggccggcggcgccagctagagcttgaggtgcagcagctgcgggccggcgtggaggagcaggagggcctgctcagcttccaggaggaccgcagcaagaagctggccgtggagagggagctgcggcagctgaccttgaggatccaggagctcgagaagcggcctcccacggtgcaggagaagatcatcatggaggaagtggtcaagctggagaaggacccggacctggagaagtccacggaagccctgcggtgggacctggaccaggagaagacccaggtaaccgagctgaatcgggagtgcaagaacctgcaggtccagattgacgtcctccagaaagccaaatcgcaggagaagaccatctacaaggaagtgatccgggtgcagaaggaccgcgtcctggaagatgagcgggcccgcgtgtgggagatgctcaacagggagcgcacggcccggcaggcccgggaggaggaggcacggcgcctgcgggagcgcattgaccgggccgagacgctggggagaacctggtcccgggaggagtccgagctgcagagggcccgggaccaggccgaccaggagtgtgggcggctgcagcaggagctgcgggctctggagaggcagaagcagcagcagacactgcagctgcaggaggagtcgaagctgctcagccagaagacggagagcgagcgacagaaggcggcccagcggggccaggagctctcgcggctggaggcggccatcctccgcgagaaggaccagatctacgagaaggagcggacgctccgggacctccacgccaaggtgagccgggaggagctcagccaggagacccagacgcgagagaccaacctttccaccaagatctccatcctggaacccgagacggggaaggacatgtccccatacgaggcctacaagaggggcatcatcgacaggggccagtacttgcagctgcaggagctcgagtgtgactgggaggaggtcaccacctcggggccctgtggggaggagtctgtgctcctggaccgcaagagcgggaagcagtactccatcgaggccgccctccgctgccggcgcatctctaaggaggagtaccatctgtacaaggacggccacctgcccatctccgagtttgcgctgcttgtagctggggagaccaagccaagctcctcactctccatcggctctatcatctccaagtccccgctcgcctccccggccccccagagcaccagtttcttctctcccagcttctctctcgggctcggtgatgacagcttccctatcgccgggatctatgacacaaccacagacaacaagtgcagcatcaagacggccgtggccaagaacatgctggaccccatcactgggcagaagctactggaggcccaggcggccacagggggcatcgtggacctgctcagccgtgagcgctactctgtgcacaaggcgatggagaggggcctgatcgagaacacctccacacagaggctgcttaacgcccagaaggccttcaccggcatcgaggaccccgtcaccaagaagaggctctcggtgggcgaggccgtccagaagggctggatgccccgggagagcgtgctcccacacctgcaggtgcagcacctgaccggggggctcatcgaccccaagaggacaggccgcatccccatccagcaggccctcctctccgggatgatcagtgaagagctggcccagctcctgcaggacgagtccagctacgagaaggatttgacagaccccatctccaaggaacggctgagctacaaggaggccatgggccgctgccgcaaagaccccctgagcggcctgctgctcctgccagcggcactggaggggtaccgctgctaccgctccgcctcccccaccgtcccgcgctcccttcgctgacacgggccaaggagccagtggggaagtgcgtgtgttgggccaggtaggatacgtacacctcttgcctcagagcagcctcatcccaggcagtgggtcttccctctgtccaaccactgttttattattttactaacatggtgatgggctccctcccctaaccttggtgcctgatccatccccagaccaggacagcagccactcagttcttcctccacctccacccagtgatcccaataaacgaattctgtctccccgtg

SEQ ID NO: 74514 - DNA, 4049 bp, Homo sapiens
atggggtttcactatgttgatcaggctggtctcgaactcctgacctcaggtgatccgcccacctgggcctcccaaagtgttgggattaaaggcatcagccattgcacctggcccttacttgcactttctaatgcaaaccaggcctgcgcactgccttgggtcctaaaatcattgcattgactgggtcttctcaaaatcctatatccaagcatcttaggtcttcagctccacctctgaggacccactggggagtctcaggaaacagggaggggtctttcatctcaggaaaaacatggagctcctatctctaccgcccaccccgtgctctacccttcttcctctctgcagaagaaggagctcagtgaggacatccgaaggacccatgatgcaaagcagggctccgagagccctgcccaagcagggagagagtcagaggccctgaaggcccagctggaagaggagaggaagcgggtggcccgggtgcagcatgagctggaggcgcagaggagccaactgctgcagctgaggacccagcggcccttggagaggctggaggagaaggaagtggtagagttctaccgggacccccagctggagggcagcctgtccagggtgaaggcccaggtggaggaggagggcaagcggcgggctggcctgcaggcagacctggaagtggcagcccagaaggtcgtgcagctggaaagcaagaggaagaccatgcagcctcatctgctgaccaaggaggtcacccaggtggagagggaccccggcctggacagccaggcggcccagctcaggatccagatccagcagctccgcggggaggatgccgtcatctcggcccggctggaagggctgaagaaggagctactggcccttgagaagagggaggtggacgtgaaggagaaggtcgtggtgaaagaggtagtcaaggtggagaagaatctggaaatggtcaaggcagcccaggctctgaggctgcagatggaggaggatgctgcgcggaggaagcaggcggaggaggctgtggccaagctacaggctcgcatcgaagacctggagcgggctatcagctcggtggagcccaaggtcatcgtgaaggaggtgaagaaggtggagcaggacccagggctcctccaggagtcctccaggctgaggagcctcctcgaggaggagaggaccaagaacgcgacgctggccagggagctgagcgacctgcacagcaagtacagcgtggtggagaagcagaggcccaaagtgcagctccaggagcgcgtccacgagatcttccaggtggatccggagacagagcaggagatcactcggctcaaggccaagctgcaggagatggcgggcaagaggagcggtgtggagaaggaggtggagaagctgctgcccgacctggaggtcctgcgggcccagaagcccacggtggagtacaaggaggtgacccaggaggtggtgaggcatgagaggagccccgaggtgctgcgtgagatcgaccgcctgaaggctcagctcaacgagctcgtcaacagccacgggcgctcccaggagcagctcatccgcctgcagggtgagcgcgacgagtggaggcgcgagcgggccaaggtggagaccaagacggtgagcaaggaggtggtgcgccacgagaaggacccggtgctggagaaagaagcagagcggctccgccaggaggtgcgggaggcggcccagaagaggcgggccgcggaggacgcggtgtacgagctgcagagcaagcgcctgctgctggagaggaggaagcccgaggagaaggtggtggtgcaggaggtggtggtcacccagaaggacccgaagctgcgcgaggagcacagccggctgagcgggagcctggatgaggaggtgggccggcggcgccagctagagcttgaggtgcagcagctgcgggccggcgtggaggagcaggagggcctgctcagcttccaggaggaccgcagcaagaagctggccgtggagagggagctgcggcagctgaccttgaggatccaggagctcgagaagcggcctcccacggtgcaggagaagatcatcatggaggaagtggtcaagctggagaaggacccggacctggagaagtccacggaagccctgcggtgggacctggaccaggagaagacccaggtaaccgagctgaatcgggagtgcaagaacctgcaggtccagattgacgtcctccagaaagccaaatcgcaggagaagaccatctacaaggaagtgatccgggtgcagaaggaccgcgtcctggaagatgagcgggcccgcgtgtgggagatgctcaacagggagcgcacggcccggcaggcccgggaggaggaggcacggcgcctgcgggagcgcattgaccgggccgagacgctggggagaacctggtcccgggaggagtccgagctgcagagggcccgggaccaggccgaccaggagtgtgggcggctgcagcaggagctgcgggctctggagaggcagaagcagcagcagacactgcagctgcaggaggagtcgaagctgctcagccagaagacggagagcgagcgacagaaggcggcccagcggggccaggagctctcgcggctggaggcggccatcctccgcgagaaggaccagatctacgagaaggagcggacgctccgggacctccacgccaaggtgagccgggaggagctcagccaggagacccagacgcgagagaccaacctttccaccaagatctccatcctggaacccgagacggggaaggacatgtccccatacgaggcctacaagaggggcatcatcgacaggggccagtacttgcagctgcaggagctcgagtgtgactgggaggaggtcaccacctcggggccctgtggggaggagtctgtgctcctggaccgcaagagcgggaagcagtactccatcgaggccgccctccgctgccggcgcatctctaaggaggagtaccatctgtacaaggacggccacctgcccatctccgagtttgcgctgcttgtagctggggagaccaagccaagctcctcactctccatcggctctatcatctccaagtccccgctcgcctccccggccccccagagcaccagtttcttctctcccagcttctctctcgggctcggtgatgacagcttccctatcgccgggatctatgacacaaccacagacaacaagtgcagcatcaagacggccgtggccaagaacatgctggaccccatcactgggcagaagctactggaggcccaggcggccacagggggcatcgtggacctgctcagccgtgagcgctactctgtgcacaaggcgatggagaggggcctgatcgagaacacctccacacagaggctgcttaacgcccagaaggccttcaccggcatcgaggaccccgtcaccaagaagaggctctcggtgggcgaggccgtccagaagggctggatgccccgggagagcgtgctcccacacctgcaggtgcagcacctgaccggggggctcatcgaccccaagaggacaggccgcatccccatccagcaggccctcctctccgggatgatcagtgaagagctggcccagctcctgcaggacgagtccagctacgagaaggatttgacagaccccatctccaaggaacggctgagctacaaggaggccatgggccgctgccgcaaagaccccctgagcggcctgctgctcctgccagcggcactggaggggtaccgctgctaccgctccgcctcccccaccgtcccgcgctcccttcgctgacacgggccaaggagccagtggggaagtgcgtgtgttgggccaggtaggatacgtacacctcttgcctcagagcagcctcatcccaggcagtgggtcttccctctgtccaaccactgttttattattttactaacatggtgatgggctccctcccctaaccttggtgcctgatccatccccagaccaggacagcagccactcagttcttcctccacctccacccagtgatcccaataaacgaattctgtctccccgtg

SEQ ID NO: 74515 - DNA, 3654 bp, Homo sapiens
cagttggaagagcacgcaactgatccatcatgggtccatcacgcgccaaccagcgcggaagtgaggcacggaactttgccaggcgagtcgacaatgctgcagggcaggctggaaatgaggctgggagatttggccaggcgagtcccccatgctgcagggcaggccggaaatgaggctcggaggtttggcccgggagtcccccatgctgcagggcaggcccgaacatgaggctgggagatttgcacagggggcccaccatggtctccgtgagggctggaaggagacccagaaggtcgtgcagctggaaagcaagaggaagaccatgcagcctcatctgctgaccaaggaggtcacccaggtggagagggaccccggcctggacagccaggcggcccagctcaggatccagatccagcagctccgcggggaggatgccgtcatctcggcccggctggaagggctgaagaaggagctactggcccttgagaagagggaggtggacgtgaaggagaaggtcgtggtgaaagaggtagtcaaggtggagaagaatctggaaatggtcaaggcagcccaggctctgaggctgcagatggaggaggatgctgcgcggaggaagcaggcggaggaggctgtggccaagctacaggctcgcatcgaagacctggagcgggctatcagctcggtggagcccaaggtcatcgtgaaggaggtgaagaaggtggagcaggacccagggctcctccaggagtcctccaggctgaggagcctcctcgaggaggagaggaccaagaacgcgacgctggccagggagctgagcgacctgcacagcaagtacagcgtggtggagaagcagaggcccaaagtgcagctccaggagcgcgtccacgagatcttccaggtggatccggagacagagcaggagatcactcggctcaaggccaagctgcaggagatggcgggcaagaggagcggtgtggagaaggaggtggagaagctgctgcccgacctggaggtcctgcgggcccagaagcccacggtggagtacaaggaggtgacccaggaggtggtgaggcatgagaggagccccgaggtgctgcgtgagatcgaccgcctgaaggctcagctcaacgagctcgtcaacagccacgggcgctcccaggagcagctcatccgcctgcagggtgagcgcgacgagtggaggcgcgagcgggccaaggtggagaccaagacggtgagcaaggaggtggtgcgccacgagaaggacccggtgctggagaaagaagcagagcggctccgccaggaggtgcgggaggcggcccagaagaggcgggccgcggaggacgcggtgtacgagctgcagagcaagcgcctgctgctggagaggaggaagcccgaggagaaggtggtggtgcaggaggtggtggtcacccagaaggacccgaagctgcgcgaggagcacagccggctgagcgggagcctggatgaggaggtgggccggcggcgccagctagagcttgaggtgcagcagctgcgggccggcgtggaggagcaggagggcctgctcagcttccaggaggaccgcagcaagaagctggccgtggagagggagctgcggcagctgaccttgaggatccaggagctcgagaagcggcctcccacggtgcaggagaagatcatcatggaggaagtggtcaagctggagaaggacccggacctggagaagtccacggaagccctgcggtgggacctggaccaggagaagacccaggtaaccgagctgaatcgggagtgcaagaacctgcaggtccagattgacgtcctccagaaagccaaatcgcaggagaagaccatctacaaggaagtgatccgggtgcagaaggaccgcgtcctggaagatgagcgggcccgcgtgtgggagatgctcaacagggagcgcacggcccggcaggcccgggaggaggaggcacggcgcctgcgggagcgcattgaccgggccgagacgctggggagaacctggtcccgggaggagtccgagctgcagagggcccgggaccaggccgaccaggagtgtgggcggctgcagcaggagctgcgggctctggagaggcagaagcagcagcagacactgcagctgcaggaggagtcgaagctgctcagccagaagacggagagcgagcgacagaaggcggcccagcggggccaggagctctcgcggctggaggcggccatcctccgcgagaaggaccagatctacgagaaggagcggacgctccgggacctccacgccaaggtgagccgggaggagctcagccaggagacccagacgcgagagaccaacctttccaccaagatctccatcctggaacccgagacggggaaggacatgtccccatacgaggcctacaagaggggcatcatcgacaggggccagtacttgcagctgcaggagctcgagtgtgactgggaggaggtcaccacctcggggccctgtggggaggagtctgtgctcctggaccgcaagagcgggaagcagtactccatcgaggccgccctccgctgccggcgcatctctaaggaggagtaccatctgtacaaggacggccacctgcccatctccgagtttgcgctgcttgtagctggggagaccaagccaagctcctcactctccatcggctctatcatctccaagtccccgctcgcctccccggccccccagagcaccagtttcttctctcccagcttctctctcgggctcggtgatgacagcttccctatcgccgggatctatgacacaaccacagacaacaagtgcagcatcaagacggccgtggccaagaacatgctggaccccatcactgggcagaagctactggaggcccaggcggccacagggggcatcgtggacctgctcagccgtgagcgctactctgtgcacaaggcgatggagaggggcctgatcgagaacacctccacacagaggctgcttaacgcccagaaggccttcaccggcatcgaggaccccgtcaccaagaagaggctctcggtgggcgaggccgtccagaagggctggatgccccgggagagcgtgctcccacacctgcaggtgcagcacctgaccggggggctcatcgaccccaagaggacaggccgcatccccatccagcaggccctcctctccgggatgatcagtgaagagctggcccagctcctgcaggacgagtccagctacgagaaggatttgacagaccccatctccaaggaacggctgagctacaaggaggccatgggccgctgccgcaaagaccccctgagcggcctgctgctcctgccagcggcactggaggggtaccgctgctaccgctccgcctcccccaccgtcccgcgctcccttcgctgacacgggccaaggagccagtggggaagtgcgtgtgttgggccaggtaggatacgtacacctcttgcctcagagcagcctcatcccaggcagtgggtcttccctctgtccaaccactgttttattattttactaacatggtgatgggctccctcccctaaccttggtgcctgatccatccccagaccaggacagcagccactcagttcttcctccacctccacccagtgatcccaataaacgaattctgtctccccgtg

SEQ ID NO: 74516 - DNA, 3575 bp, Homo sapiens
atggggtttcactatgttgatcaggctggtctcgaactcctgacctcaggtgatccgcccacctgggcctcccaaagtgttgggattaaaggcatcagccattgcacctggcccttacttgcactttctaatgcaaaccaggcctgcgcactgccttgggtcctaaaatcattgcattgactgggtcttctcaaaatcctatatccaagcatcttaggtcttcagctccacctctgaggacccactggggagtctcaggaaacagggaggggtctttcatctcaggaaaaacatggagctcctatctctaccgcccaccccgtgctctacccttcttcctctctgcagaaggatgccgtcatctcggcccggctggaagggctgaagaaggagctactggcccttgagaagagggaggtggacgtgaaggagaaggtcgtggtgaaagaggtagtcaaggtggagaagaatctggaaatggtcaaggcagcccaggctctgaggctgcagatggaggaggatgctgcgcggaggaagcaggcggaggaggctgtggccaagctacaggctcgcatcgaagacctggagcgggctatcagctcggtggagcccaaggtcatcgtgaaggaggtgaagaaggtggagcaggacccagggctcctccaggagtcctccaggctgaggagcctcctcgaggaggagaggaccaagaacgcgacgctggccagggagctgagcgacctgcacagcaagtacagcgtggtggagaagcagaggcccaaagtgcagctccaggagcgcgtccacgagatcttccaggtggatccggagacagagcaggagatcactcggctcaaggccaagctgcaggagatggcgggcaagaggagcggtgtggagaaggaggtggagaagctgctgcccgacctggaggtcctgcgggcccagaagcccacggtggagtacaaggaggtgacccaggaggtggtgaggcatgagaggagccccgaggtgctgcgtgagatcgaccgcctgaaggctcagctcaacgagctcgtcaacagccacgggcgctcccaggagcagctcatccgcctgcagggtgagcgcgacgagtggaggcgcgagcgggccaaggtggagaccaagacggtgagcaaggaggtggtgcgccacgagaaggacccggtgctggagaaagaagcagagcggctccgccaggaggtgcgggaggcggcccagaagaggcgggccgcggaggacgcggtgtacgagctgcagagcaagcgcctgctgctggagaggaggaagcccgaggagaaggtggtggtgcaggaggtggtggtcacccagaaggacccgaagctgcgcgaggagcacagccggctgagcgggagcctggatgaggaggtgggccggcggcgccagctagagcttgaggtgcagcagctgcgggccggcgtggaggagcaggagggcctgctcagcttccaggaggaccgcagcaagaagctggccgtggagagggagctgcggcagctgaccttgaggatccaggagctcgagaagcggcctcccacggtgcaggagaagatcatcatggaggaagtggtcaagctggagaaggacccggacctggagaagtccacggaagccctgcggtgggacctggaccaggagaagacccaggtaaccgagctgaatcgggagtgcaagaacctgcaggtccagattgacgtcctccagaaagccaaatcgcaggagaagaccatctacaaggaagtgatccgggtgcagaaggaccgcgtcctggaagatgagcgggcccgcgtgtgggagatgctcaacagggagcgcacggcccggcaggcccgggaggaggaggcacggcgcctgcgggagcgcattgaccgggccgagacgctggggagaacctggtcccgggaggagtccgagctgcagagggcccgggaccaggccgaccaggagtgtgggcggctgcagcaggagctgcgggctctggagaggcagaagcagcagcagacactgcagctgcaggaggagtcgaagctgctcagccagaagacggagagcgagcgacagaaggcggcccagcggggccaggagctctcgcggctggaggcggccatcctccgcgagaaggaccagatctacgagaaggagcggacgctccgggacctccacgccaaggtgagccgggaggagctcagccaggagacccagacgcgagagaccaacctttccaccaagatctccatcctggaacccgagacggggaaggacatgtccccatacgaggcctacaagaggggcatcatcgacaggggccagtacttgcagctgcaggagctcgagtgtgactgggaggaggtcaccacctcggggccctgtggggaggagtctgtgctcctggaccgcaagagcgggaagcagtactccatcgaggccgccctccgctgccggcgcatctctaaggaggagtaccatctgtacaaggacggccacctgcccatctccgagtttgcgctgcttgtagctggggagaccaagccaagctcctcactctccatcggctctatcatctccaagtccccgctcgcctccccggccccccagagcaccagtttcttctctcccagcttctctctcgggctcggtgatgacagcttccctatcgccgggatctatgacacaaccacagacaacaagtgcagcatcaagacggccgtggccaagaacatgctggaccccatcactgggcagaagctactggaggcccaggcggccacagggggcatcgtggacctgctcagccgtgagcgctactctgtgcacaaggcgatggagaggggcctgatcgagaacacctccacacagaggctgcttaacgcccagaaggccttcaccggcatcgaggaccccgtcaccaagaagaggctctcggtgggcgaggccgtccagaagggctggatgccccgggagagcgtgctcccacacctgcaggtgcagcacctgaccggggggctcatcgaccccaagaggacaggccgcatccccatccagcaggccctcctctccgggatgatcagtgaagagctggcccagctcctgcaggacgagtccagctacgagaaggatttgacagaccccatctccaaggaacggctgagctacaaggaggccatgggccgctgccgcaaagaccccctgagcggcctgctgctcctgccagcggcactggaggggtaccgctgctaccgctccgcctcccccaccgtcccgcgctcccttcgctgacacgggccaaggagccagtggggaagtgcgtgtgttgggccaggtaggatacgtacacctcttgcctcagagcagcctcatcccaggcagtgggtcttccctctgtccaaccactgttttattattttactaacatggtgatgggctccctcccctaaccttggtgcctgatccatccccagaccaggacagcagccactcagttcttcctccacctccacccagtgatcccaataaacgaattctgtctccccgtg

SEQ ID NO: 74517 - DNA, 2373 bp, Homo sapiens
ctcatggtgtgtgcccaggagaaactggagcaggccgagaagaaggccactgatgctgaggcagatgtggcctccctgagccgccgcattcagctggttgaggaggaagcccgaggagaaggtggtggtgcaggaggtggtggtcacccagaaggacccgaagctgcgcgaggagcacagccggctgagcgggagcctggatgaggaggtgggccggcggcgccagctagagcttgaggtgcagcagctgcgggccggcgtggaggagcaggagggcctgctcagcttccaggaggaccgcagcaagaagctggccgtggagagggagctgcggcagctgaccttgaggatccaggagctcgagaagcggcctcccacggtgcaggagaagatcatcatggaggaagtggtcaagctggagaaggacccggacctggagaagtccacggaagccctgcggtgggacctggaccaggagaagacccaggtaaccgagctgaatcgggagtgcaagaacctgcaggtccagattgacgtcctccagaaagccaaatcgcaggagaagaccatctacaaggaagtgatccgggtgcagaaggaccgcgtcctggaagatgagcgggcccgcgtgtgggagatgctcaacagggagcgcacggcccggcaggcccgggaggaggaggcacggcgcctgcgggagcgcattgaccgggccgagacgctggggagaacctggtcccgggaggagtccgagctgcagagggcccgggaccaggccgaccaggagtgtgggcggctgcagcaggagctgcgggctctggagaggcagaagcagcagcagacactgcagctgcaggaggagtcgaagctgctcagccagaagacggagagcgagcgacagaaggcggcccagcggggccaggagctctcgcggctggaggcggccatcctccgcgagaaggaccagatctacgagaaggagcggacgctccgggacctccacgccaaggtgagccgggaggagctcagccaggagacccagacgcgagagaccaacctttccaccaagatctccatcctggaacccgagacggggaaggacatgtccccatacgaggcctacaagaggggcatcatcgacaggggccagtacttgcagctgcaggagctcgagtgtgactgggaggaggtcaccacctcggggccctgtggggaggagtctgtgctcctggaccgcaagagcgggaagcagtactccatcgaggccgccctccgctgccggcgcatctctaaggaggagtaccatctgtacaaggacggccacctgcccatctccgagtttgcgctgcttgtagctggggagaccaagccaagctcctcactctccatcggctctatcatctccaagtccccgctcgcctccccggccccccagagcaccagtttcttctctcccagcttctctctcgggctcggtgatgacagcttccctatcgccgggatctatgacacaaccacagacaacaagtgcagcatcaagacggccgtggccaagaacatgctggaccccatcactgggcagaagctactggaggcccaggcggccacagggggcatcgtggacctgctcagccgtgagcgctactctgtgcacaaggcgatggagaggggcctgatcgagaacacctccacacagaggctgcttaacgcccagaaggccttcaccggcatcgaggaccccgtcaccaagaagaggctctcggtgggcgaggccgtccagaagggctggatgccccgggagagcgtgctcccacacctgcaggtgcagcacctgaccggggggctcatcgaccccaagaggacaggccgcatccccatccagcaggccctcctctccgggatgatcagtgaagagctggcccagctcctgcaggacgagtccagctacgagaaggatttgacagaccccatctccaaggaacggctgagctacaaggaggccatgggccgctgccgcaaagaccccctgagcggcctgctgctcctgccagcggcactggaggggtaccgctgctaccgctccgcctcccccaccgtcccgcgctcccttcgctgacacgggccaaggagccagtggggaagtgcgtgtgttgggccaggtaggatacgtacacctcttgcctcagagcagcctcatcccaggcagtgggtcttccctctgtccaaccactgttttattattttactaacatggtgatgggctccctcccctaaccttggtgcctgatccatccccagaccaggacagcagccactcagttcttcctccacctccacccagtgatcccaataaacgaattctgtctccccgtg

SEQ ID NO: 74518 - DNA, 1085 bp, Homo sapiens
ggggacggtgttaccgtggagaccctcgacggccacctgcccatctccgagtttgcgctgcttgtagctggggagaccaagccaagctcctcactctccatcggctctatcatctccaagtccccgctcgcctccccggccccccagagcaccagtttcttctctcccagcttctctctcgggctcggtgatgacagcttccctatcgccgggatctatgacacaaccacagacaacaagtgcagcatcaagacggccgtggccaagaacatgctggaccccatcactgggcagaagctactggaggcccaggcggccacagggggcatcgtggacctgctcagccgtgagcgctactctgtgcacaaggcgatggagaggggcctgatcgagaacacctccacacagaggctgcttaacgcccagaaggccttcaccggcatcgaggaccccgtcaccaagaagaggctctcggtgggcgaggccgtccagaagggctggatgccccgggagagcgtgctcccacacctgcaggtgcagcacctgaccggggggctcatcgaccccaagaggacaggccgcatccccatccagcaggccctcctctccgggatgatcagtgaagagctggcccagctcctgcaggacgagtccagctacgagaaggatttgacagaccccatctccaaggaacggctgagctacaaggaggccatgggccgctgccgcaaagaccccctgagcggcctgctgctcctgccagcggcactggaggggtaccgctgctaccgctccgcctcccccaccgtcccgcgctcccttcgctgacacgggccaaggagccagtggggaagtgcgtgtgttgggccaggtaggatacgtacacctcttgcctcagagcagcctcatcccaggcagtgggtcttccctctgtccaaccactgttttattattttactaacatggtgatgggctccctcccctaaccttggtgcctgatccatccccagaccaggacagcagccactcagttcttcctccacctccacccagtgatcccaataaacgaattctgtctccccgtg

SEQ ID NO: 74519 - DNA, 3646 bp, Homo sapiens
gctgaccagccagtgaggacgcccgctgcctcccacctgccctcctgccgtctttcgccagccaagcccagcctgagccagcacttgcctttacgaccatgttcaaggggctgagcaaaggctcccaggggaaggggtcccccaagggctcccccgccaaggggtcccccaaaggctcccccagcaggcacagccgggctgccacccaggagctggcccttctcatctcccgcatgcaagccaacgccgaccaggtggagcgggacatcctggagacgcagaagaggctgcagcaggaccggctgaacagtgagcagagccaggccctgcagcaccagcaggagacgggccgcagcctgaaggaggctgaggtgctgctcaaggacctcttcctggacgtggacaaggcccggcggctcaagcacccgcaggctgaggagattgagaaggacatcaagcagctgcacgagcgggtgacccaggagtgtgcggagtaccgtgccctgtacgagaagatggtgctgccccccgacgtgggacccagggtcgactgggcacgcgtgctggagcagaaacagaagcaggtctgcgcaggccagtacgggccgggcatggcggagctggagcaacagatcgccgagcacaacatcctgcagaaggagatcgacgcctatgggcagcagctgcggagcctcgtggggccggatgcagccaccatccggagccaataccgagacctactgaaggcggcgtcgtggcgcgggcagagcctgggcagcctgtacacgcacctccagggctgcacgcggcagctgagcgccctggctgagcagcagcgccgcatcctgcagcaggactggagcgacctcatggccgaccctgcgggcgtgcggcgggagtacgagcacttcaagcagcacgagctgctgagccaggagcagagcgtgaaccagctggaggacgacggcgagcgcatggtggagctgcggcaccccgcggtggggcccatccaggcccaccaggaggccctgaagatggagtggcagaacttcctgaacctgtgtatctgccaggagacccagctgcagcacgtggaggactaccgccggttccaggaagaggccgactcagtcagccagaccctggcgaagctcaactccaacttggatgccaagtacagccctgcacctgggggcccccctggcgcccccacagagctgctgcaacagctggaggcagaggaaaaacggctggccgtcaccgagagggccactggggacctgcagcggcgaagccgggatgtggcccctctgccacagcgaagaaacccccctcagcagcccctgcacgtggacagcatctgcgactgggactcaggagaagtgcagctgctgcagggtgagcggtataagctggtagataacactgaaccgcacgcctgggtcgtgcagggccctggcggggagaccaagcgtgctcccgccgcctgcttctgcatcccagcaccagaccctgatgctgtggccagggcctcccggctggcctcagagctgcaggccctgaagcagaaattggccacagtccagagccgcctgaaggccagtgctgtggagtctcttcggcccagccagcaggctccatctggctcagacctggccaacccacaggcccagaagctcctgacacagatgacccggctggatggagacctgggacagatagagaggcaggtgctggcctgggcgcgggccccgctgagccgccccacacccttggaggacttggagggccgcatccacagccatgagggcacagcccagcgcctgcagagcctgggaacggagaaggagacagcccagaaggagtgcgaggcgtttctgtccacgcggcccgtgggccccgctgccctgcagctgcccgtagccctcaacagcgtgaagaacaagttcagtgacgtgcaggttctgtgcagcctctacggggagaaagccaaggctgccctggatctggagcggcagatccaggatgcggacagggtcatccgaggcttcgaggccaccctggtgcaggaggcccccatccctgctgaaccgggggctctgcaggagagggtcagcgagctgcagcgccagcggagggagctgctggaacagcagacctgcgtgctgcggctacaccgcgcgctgaaggcctcggagcacgcatgcgctgccctgcagaacaacttccaggagttctgccaagacctgcctcgccagcagcgccaggtgcgagccctcaccgaccgctaccacgccgtaggggaccagctggacctgcgggagaaggtggtgcaggatgccgccctcacctaccagcagttcaagaactgcaaggataacctgagctcctggctggagcacctgccccgcagccaggtgcggcccagcgacggccccagccagatcgcctacaagctgcaggcgcagaagaggctgacgcaggagatccagagccgagagcgggacagggccacagcatcccacctctcccaggccctgcaggcagcgctccaggactatgagctccaggcagacacctaccgctgctctttggagcccaccctggcagtgtcagcccccaagagaccccgagtggctcccctgcaagagagcatccaagcccaggagaagaaccttgcaaaggcctatactgaggttgcagcagcacagcagcagctgctccagcagctggagtttgctagaaaaatgctggagaagaaggagctcagtgaggacatccgaaggacccatgatgcaaagcagggctccgagagccctgcccaagcagggagagagtcagaggccctgaaggcccagctggaagaggagaggaagcgggtggcccgggtgcagcatgagctggaggcgcagaggagccaactgctgcagctgaggacccagcggcccttggagaggctggaggagaaggaagtggtagagttctaccgggacccccagctggagggcagcctgtccagggtgaaggcccaggtggaggaggagggcaagcggcgggctggcctgcaggcagacctggaagtggcagcccagaaggtcgtgcagctggaaagcaagaggaagaccatgcagcctcatctgctgaccaaggaggtcacccaggtggagagggaccccggcctggacagccaggcggcccagctcaggatccagatccagcagctccgcggggaggatgccgtcatctcggcccggctggaagggctgaagaaggagctactggcccttgagaagagggaggtggacgtgaaggagaaggtcgtggtgaaagaggtagtcaaggtggagaagaatctggaaatggtcaaggcagcccaggctctgaggctgcagatggaggaggatgctgcgcggaggaagcaggcggaggaggctgtggccaagctacaggctcgcatcgaagacctggagcgggctatcagctcggtggagcccaaggtcatcgtgaaggaggtgaagaaggtggagcaggacccagggctcctccaggagtcctccaggctgaggagcctcctcgaggaggagaggaccatcgttgcaacgatggtcctcagctgatccaagtggaaccctttgttaactatact

SEQ ID NO: 74520 - DNA, 409 bp, Homo sapiens
attctgagctcggtacccccagaggcaccaaggaggccatgggccgctgccgcaaagaccccctgagcggcctgctgctcctgccagcggcactggaggggtaccgctgctaccgctccgcctcccccaccgtcccgcgctcccttcgctgacacgggccaaggagccagtggggaagtgcgtgtgttgggccaggtaggatacgtacacctcttgcctcagagcagcctcatcccaggcagtgggtcttccctctgtccaaccactgttttattattttactaacatggtgatgggctccctcccctaaccttggtgcctgatccatccccagaccaggacagcagccactcagttcttcctccacctccacccagtgatcccaataaacgaattctgtctccccgtg

SEQ ID NO: 74521 - DNA, 2899 bp, Homo sapiens
  misc_feature (2886)..(2886): n is a, c, g, or t
gctgaccagccagtgaggacgcccgctgcctcccacctgccctcctgccgtctttcgccagccaagcccagcctgagccagcacttgcctttacgaccatgttcaaggggctgagcaaaggctcccaggggaaggggtcccccaagggctcccccgccaaggggtcccccaaaggctcccccagcaggcacagccgggctgccacccaggagctggcccttctcatctcccgcatgcaagccaacgccgaccaggtggagcgggacatcctggagacgcagaagaggctgcagcaggaccggctgaacagtgagcagagccaggccctgcagcaccagcaggagacgggccgcagcctgaaggaggctgaggtgctgctcaaggacctcttcctggacgtggacaaggcccggcggctcaagcacccgcaggctgaggagattgagaaggacatcaagcagctgcacgagcgggtgacccaggagtgtgcggagtaccgtgccctgtacgagaagatggtgctgccccccgacgtgggacccagggtcgactgggcacgcgtgctggagcagaaacagaagcaggtctgcgcaggccagtacgggccgggcatggcggagctggagcaacagatcgccgagcacaacatcctgcagaaggagatcgacgcctatgggcagcagctgcggagcctcgtggggccggatgcagccaccatccggagccaataccgagacctactgaaggcggcgtcgtggcgcgggcagagcctgggcagcctgtacacgcacctccagggctgcacgcggcagctgagcgccctggctgagcagcagcgccgcatcctgcagcaggactggagcgacctcatggccgaccctgcgggcgtgcggcgggagtacgagcacttcaagcagcacgagctgctgagccaggagcagagcgtgaaccagctggaggacgacggcgagcgcatggtggagctgcggcaccccgcggtggggcccatccaggcccaccaggaggccctgaagatggagtggcagaacttcctgaacctgtgtatctgccaggagacccagctgcagcacgtggaggactaccgccggttccaggaagaggccgactcagtcagccagaccctggcgaagctcaactccaacttggatgccaagtacagccctgcacctgggggcccccctggcgcccccacagagctgctgcaacagctggaggcagaggaaaaacggctggccgtcaccgagagggccactggggacctgcagcggcgaagccgggatgtggcccctctgccacagcgaagaaacccccctcagcagcccctgcacgtggacagcatctgcgactgggactcaggagaagtgcagctgctgcagggtgagcggtataagctggtagataacactgaaccgcacgcctgggtcgtgcagggccctggcggggagaccaagcgtgctcccgccgcctgcttctgcatcccagcaccagaccctgatgctgtggccagggcctcccggctggcctcagagctgcaggccctgaagcagaaattggccacagtccagagccgcctgaaggccagtgctgtggagtctcttcggcccagccagcaggctccatctggctcagacctggccaacccacaggcccagaagctcctgacacagatgacccggctggatggagacctgggacagatagagaggcaggtgctggcctgggcgcgggccccgctgagccgccccacacccttggaggacttggagggccgcatccacagccatgagggcacagcccagcgcctgcagagcctgggaacggagaaggagacagcccagaaggagtgcgaggcgtttctgtccacgcggcccgtgggccccgctgccctgcagctgcccgtagccctcaacagcgtgaagaacaagttcagtgacgtgcaggttctgtgcagcctctacggggagaaagccaaggctgccctggatctggagcggcagatccaggatgcggacagggtcatccgaggcttcgaggccaccctggtgcaggaggcccccatccctgctgaaccgggggctctgcaggagagggtcagcgagctgcagcgccagcggagggagctgctggaacagcagacctgcgtgctgcggctacaccgcgcgctgaaggcctcggagcacgcatgcgctgccctgcagaacaacttccaggagttctgccaagacctgcctcgccagcagcgccaggtgcgagccctcaccgaccgctaccacgccgtaggggaccagctggacctgcgggagaaggtggtgcaggatgccgccctcacctaccagcagttcaagaactgcaaggataacctgagctcctggctggagcacctgccccgcagccaggtgcggcccagcgacggccccagccagatcgcctacaagctgcaggcgcagaagaggctgacgcaggagatccagagccgagagcgggacagggccacagcatcccacctctcccaggccctgcaggcagcgctccaggactatgagctccaggcagacacctaccgctgctctttggagcccaccctggcagtgtcagcccccaagagaccccgagtggctcccctgcaagagagcatccaagcccaggagaagaaccttgcaaaggcctatactgaggttgcagcagcacagcagcagctgctccagcagctggagtttgctagaaaaatgctggagaagaaggagctcagtgaggacatccgaaggacccatgatgcaaagcagggctccgagagccctgcccaagcagggagaggccgggtcagagccctgggggtgagcctgaaggcacagagaaagaccttgnccaaactcaggca

SEQ ID NO: 74522 - DNA, 346 bp, Homo sapiens
ttaaaagtgaccaaaacaaaacagaaacaaacaacctgatagagacccatagctggtggggatagagaaaggaaatactgcagaaagactcaccttcttaatagtagaggggcgcagagggggttgcaaagtctgtgggcttctgtttctcttctgtataatggatgtaatagtacctaccttcagcctggcgcggtggctcacacctgtaatcccagtactttgggaggccgaggcgggcggatcacgaggtcaggagttcgagaccagcctggccataatgttgaaacctgtctctactaaaaatacaaaaatgaaccgggcgtggtggcaagcgccagtagtc

SEQ ID NO: 74523 - DNA, 563 bp, Homo sapiens
tagcagaaaaaagatgggggaaggatgacagaatttaaaactacagctgctttgttttccagttaaaaatagttctgagttaaaaacgtaaggatgtcccatcacatgtggacaatttatataaaatatagcatactaatacaaataatcatgtcttatgaaaaagtttatagttctagattgttctggtttagcttgaaattgagattcttactgttgcaacataaaaggaagctttgtgaaggaaatatgacatctctgcccagatgcataaggagggaattacagtggggagttatttttagaagtatcttatgaatacatttcatgtactgagaacattttttaaaggttagtttcactggtaggagttatgcaagttgctcgggtcactggatattctattaagaaatcatttttatgttaccaaccaacctagttagtcttaaactggctgatctaagtagtagcttgcttgtttatttagagacagagtctcaccctgtcacccaggttggtgtgcagtggcacagtcatagctcactgctgccttgaactcctga

SEQ ID NO: 74524 - DNA, 482 bp, Homo sapiens
gaatgcacactagaatcacttttgagatgatcactaattttatggagtgatatacaccagaatgaacttctagcctgctttataatcaatcagttaatcaacaagtctgagtggagcgtgtatgctttgcgttatctgcagtgcggcctgaggttacgggagaaaaaaatggcactgtgtattgcttgaatgctcagggctgcgttcaactaattttaaccattgaatcaaaatgatcaggtagagggcaggaaatgtagaatggcttgaacaactacctcatgaaaacatgcagtatgcatttgtaattcagcatcttaaaatgtctcttttggcagtatttctttacaaatgtggcaaagcatgatatctttgagtaaatttttaaacttcacaaaagtttctgaaaaaaatatgtacaatcaaagaaaaacacttggaaataaattctgtctatagtttatgcacatttaatgtatttt

SEQ ID NO: 74525 - DNA, 347 bp, Homo sapiens
aggctggtctcgaactcctgacctcaagtgatcctcctgcctcagcctaccaaagcgctgggattacaggcatgagccaccgtgcccggcctcccttgcattttaatatagagagaagactgcaagtttccctctctggggactcaccctgcagaactcaaaaaatctataaattgtaaaaataataagagataatcatattgaactaactaagatttgaattttgcatggaaagaagcatggctttctttctgtagaaaaaaatttattagggcagtattatgaacatctaatatgttagagccaggcatagtggctcgcacctgtaatcccaggtacttggaggc

SEQ ID NO: 74526 - DNA, 558 bp, Homo sapiens
gaatcactgaatctctgagcctctgttttcttgcaaaagaaggataatactctttcccctattggccccccggctagtcggcaccctgcctaccagcatgagaaggaaagtgctctgggacctaaaagtgccacccagccatcggcctggtgccatggggccctcttctcttcactgcactctggggacttccctcagcgacctgtcttctgctttatcatttgagtttttaatttcaagcaaatatattttgcatttctagatgttctgtctggctcaattcggaaactgcttagccatgatgttaatatcttttttctgctgcatattctgtttttaatcatttttaaaatactttcttaaggtctctttcgattgctcatggggcactaatgcttgtgtttgggtcttcagacctcagggtggagtgttgcctcgtgttttgtaatgtctgtggagcggccaccagaattgcttgaacccaggaggcagaggttgcagtgagctgagatcacgccactgcactccagcctgggcaacagagtgagactgtgtctc

SEQ ID NO: 74527 - DNA, 350 bp, Homo sapiens
gatgggagtttcactcttgtctcccaggctgcagtgcaatggcgtgatctcggctccctgcaatctccacctcccaggttcaagccattctcctccatcagcctcccaagtagctgggattgcaggcatgcgccaccatgcctggctaaatttttttgtatttcagtagagacagggtttcgccatgttggtcaggctggtctcaaactcctgacctcaggtgatccacccgcctcagcttcccaaagtgctgggattacaggcgtgagccatcgtgcccggccgggtatcaggttcttactttgagcagattccatctatcaggtcactggtttatacatattaagtat

SEQ ID NO: 74528 - DNA, 706 bp, Homo sapiens
  misc_feature (1)..(1): n is a, c, g, or t
nccgggctgaggaattcggcacgagctcaggcggcggccatggcgggacaggaggatccggtgcagcgggagattcaccaggactgggctaaccgggagtacattgagataatcaccagcagcatcaagaaaatcgcagactttctcaactcgttcgatatgtcttgtcgttcaagacttgcaacactaaacgagaaattgacagcccttgaacggagaatagagtacattgaagctcgggtgacaaaaggtgagacactcacctagaacagtgccgtgctgctgctgggaagttgctttacacaacacaggccacatgggaaaggccccagcagccttcagctccttcctttctccttaaagagcaacagggcttattcttgtttttcttttttcaaaagtgtggcctttgggctctgccatctggggtgtggtgtggtatgtgggaagaagttcagaggaaccgttggaaacgacgttaggcattttaccttttcagtaacattttatacatctacttgtcaatgtatttgagacattcacagccaaaagcctgggactctttgtgaaggtcctcctcacctctatctttctttctctctctctcaaactttccttaaagttctcattgcctttgcactgcttctgggaacagtctttggctcctcccacttttggtgggaatggcggggcagtcctggctcaa

SEQ ID NO: 74529 - DNA, 650 bp, Homo sapiens
  misc_feature (1)..(1): n is a, c, g, or t
nccgggctgaggaattcggcacgagctcaggcggcggccatggcgggacaggaggatccggtgcagcgggagattcaccaggactgggctaaccgggagtacattgagataatcaccagcagcatcaagaaaatcgcagactttctcaactcgttcgatatgtcttgtcgttcaagacttgcaacactaaacgagaaattgacagcccttgaacggagaatagagtacattgaagctcgggtgacaaaaggtgagacactcacctagaacagtgccgtgctgctgctgggaagttgctttacacaacacaggccacatgggaaaggccccagcagccttcagctccttcctttctccttaaagagcaacagggcttattcttgtttttcttttttcaaaagtgtggcctttgggctctgccatctggggtgtggtgtggtatgtgggaagaagttcagaggaaccgttggaaacgacgttaggcattttaccttttcagtaacattttatacatctacttgtcaatgtatttgagacattcacagcctctcaaactttccttaaagttctcattgcctttgcactgcttctgggaacagtctttggctcctcccacttttggtgggaatggcggggcagtcctggctcaa

SEQ ID NO: 74530 - DNA, 1091 bp, Homo sapiens
acggttaccgggcagagccgtgatggctgcggtgcaatggagggactgcaatcctctgtagagctgaggcctgggctgaccccttgggaagctggacgaggtgactgtggagatgctcggtccacgactcaccttccatagcctccaggggtagacaccggtgtgtccaccgctcactggctcatgggttggtcccttatttttattgagacctgttcaatctgttagaaactgactttacataaggcatgaaaagcagcctgcggaatcactagctacacagattgaggataaataccaactcactgacaaacggcacttgtgttcagagtgttcagagacggagtcatttttagaaatgccaggctagagagtgtttcagtatagccacccttgccgaggcttacagaagggcaaagaccaccatctcaagattgatggaagaatcagttttcttggttcaagaaatgaagacggagaaatacaaatgttctaaacaagaagaggtgacagacgagaggctaaaaatgctagagttcctagaagagctcataggaatcaccccatcacaagcaatctttccaaacctcccaggaggccaagagccaagcaagccctgctggtcccttccccaggagtgggcctgggtcttaaagagtgctgcccctcccctccactcaggcctcccaagctgccaggtgcattcactcacttcgactccatctgagggtccaggggagccccttcctgggctggagttcctcccccatcacatgctggacacagcagtcggctccttcatgggcaatttctccaaatttaaagaagactggagatcccggaacacagcaagaaatgtgaaagtttctcagaaagtttgattcgctctcattggcagtgaaagaaatgctatacttgagacactaatctcttcctcaaattgaaacatcatcaaagtacatttctcaagataaagctctgcaaatgttaactatataagtaaataatttacattttattctccaattattgtattatactttgaaaatatatgcagtttgttaataaagacttttagtactcaatagcaa

SEQ ID NO: 74531 - DNA, 386 bp, Homo sapiens
gtattctttatgtgtatcctgtgcaccctcattccatctccatgagttctgtgacgtaggtactattattagctccattttgcattatgaggaaactgaagggagagaaaaataacttgcccaaggtcatattgctggcaagtggaagagccagacctggaagcctggggtatgtggggccacagccctgccttcagaaccaggacctgctgcctgttttgtttagagccttaacatattgtgctcctactttttgaacaatttagaaaataagtgttagaaaaaaatttagaaggacaaagaagaaaaggttttctttcttttaggtaggagatatggaggtctgggaggttaaggagatggatttgattgtagacctatttgaa

SEQ ID NO: 74532 - DNA, 340 bp, Homo sapiens
ctagctctgagtctgttataataggtggtggtgagttgtctgtgtttgaagagaaatgaaggctttgggtgtgagaataggtagacccttgaggggaaaaaaacatggagggaggaggtatagatctggatttgtgcctcggcactgccacatcctaactgcgtaaactagacatagttgttttgcctctgtgagcctcagtttcctcatctagtaaatgacagttcttacctcagggttgccgggataattcattggaagaataggggcaaagcattgagctcagcacctgtcatgcaataaatgctaaaaaaagaaaatagtagctgctgctatttta

SEQ ID NO: 74533 - DNA, 336 bp, Homo sapiens
gagatttacttttaaaggtccagtggccctaatgcccaggagtagtcttctgaaatttttcagaatcaaatctaatgcctttactttcatatagtttttattaaagaattctgtgtagttctgcctccttaatactcttacttttctcccactgttagtatttaaatgatcaccacctctagcgtgaagacttttaacaatctcctgttatatttactgtcctgtatctcctgtccctatactcttctaatctagcttctctccaaaagaacttctagagtaggatttttcagctgattccacagacagatgctagtgtcttgttatcttgtcagg

SEQ ID NO: 74534 - DNA, 521 bp, Homo sapiens
aggagaagagggattaaacctgctagttttggaaaaaaaaaaaaaaaggaaagaaaagaaaagaaagaaagaaaaacaaaaaacaacaacaaacagaaaaatgcaaaactgcagaacacgcagtggaggttggattcagaggacatggggatcagtgtgggctgtgctggtcaaggagggcttccagggagaggcaactgaggattcactgcaattgttccttgagaagatgaggatcaggtcgggaattggaaacatctgagggctcaattcaacctggcttctaaaacgaacatggtgaacatagatcaactactgaacttcttttaacctctggcatcctatctgtgaattgtggggaggaaacagggtccacccgctgctgcacaagaggggtgtgtgcagaccgtcaccttgtgtctgctgtagcaggagacccctggccatgcgggactgaacccatgattgcagctgatcttactctgtctcttctctgtgtgagtaaagtgttgttccatcta

SEQ ID NO: 74535 - DNA, 605 bp, Homo sapiens
aggagaagagggattaaacctgctagttttggaaaaaaaaaaaaaaaggaaagaaaagaaaagaaagaaagaaaaacaaaaaacaacaacaaacagaaaaatgcaaaactgcagaacacgcagtggaggttggattcagaggacatggggatcagtgtgggctgtgctggtcaaggagggcttccagggagaggcaactgaggattcactgcaattgttccttgagaagatgaggatcaggtcgggaattggaaacatctgagggctcaattcaacctggcttctaaaacgaacatggtgaacatagatcaactactgaacttcttttaacctctggcatcctatctgtgaattactcagcgtgtactctttgttctgcttaagcttgtgcgtcatgtggcaggcacctggccaaccccactgttatatctgttccaggtggggaggaaacagggtccacccgctgctgcacaagaggggtgtgtgcagaccgtcaccttgtgtctgctgtagcaggagacccctggccatgcgggactgaacccatgattgcagctgatcttactctgtctcttctctgtgtgagtaaagtgttgttccatcta

SEQ ID NO: 74536 - DNA, 282 bp, Homo sapiens
taaaaaataggaaaacaatagagaaaaatcaaaagctctttctttaaagagaccaacaaatgacaaatctttaattagactgacagaaagtgagagagataactcaaatttctcataacagcaatgaaagacgagccatcactacttataggaatttaaaaaattataaaaggatactataaacagctatgccaacaaatttgataaccaagatgaaatggacaaaatcgtagcaagataaaaattactggaactgactcaagaaatagaaaatcttaattg

SEQ ID NO: 74537 - DNA, 394 bp, Homo sapiens
tatggaaccacgaaagcctcaaatagccaaagcaatcataggcaaaaaggaataaagcaagaggcatcacactactttatttcaaaatgtactaaaaagctaacataatcaaaacagcatggcgctgatataaaaatgcacatgtaaaccagtacaacagaattgagagcccagaaatgaatctacacatttttggtcaattgatctttgacaaagataccaagaagacacaatgggaaaagggcactctctttaataaatggtgttgggacaactagataatcacatacagaaaataaaattggacccttatctcataccataaccaaaaatcaaattaaaatggattaaatacttaaatgtaagacatgaaactgtaaaactaagagaaaaa

SEQ ID NO: 74538 - DNA, 1864 bp, Homo sapiens
ggtactgtgtaaatacggtatacaagattaaaaatggtacacctgtatagggcacttaccataaatggagcatgcgggcctggaagttgctctaggtgagtcagtgaggcttccctgggccacactggaagaactgtctttcttgggccacatatatactaacactaacactaacaatatctgatgagctaaaaaaattgcaaaaaaatctcatgttttaagaaggtttatgaatttgtgttgggccacattaaagcaatcctgggctgcatgcagcccgtgggccgtgagttgaacaagcttggcctaggacattactgtatagcacttgtacagtagtgtacagactttatgaacactgtacatttaggctatacgaaatttataaaaaatatatttcttcaatgataaattaatctttactatagatttttaactttataaactttttacttttaactttttgactctttttgtaacaacacttaccttaaaacacacattatacagctgtacagaaatattttataagcttttttctatttttaagatttatttacttttttactttctaaacttttttcttaaaaactaagacataacacacacattagcctaggcctaaacagcgtcaggatcatcaccatcactgtcttccgcctccacctcttgtcccactggaaggtcttcaggggcagtaacatgcacggagctgtcatctcctttgataacaatgccttctggaatacctgctgaagggcctgcctgaggctgttttacagctaactttttttaataagtagaaggagtatactctaaaatgattaaaaagtatagtatagtataataaatgcataaaccagtaacataattatcaagtattactgtacataattgtaagtgctatacttttatactatgagcagcacagtaggtttgtttacaccagcatcaccaagaacatttgagtaatgcattgcatcacaatattaggatggctacgacgtccacaggcaataggaattttttagctccattataatcttgagaccaccatcacatatgcagtctgtgattaaccaaaacattgttaggtgatacatgaccatataatttattcactatgtgtaacacaaagctccctaaaatatggatcctgccatcagggccttacaatgctgacattgataatgggcatatgagtgaaagaatagtttagtcttaagtatcaggtgctgtgagagatacaaagggaataaaaagcagtttctgtcctccaggagctctttcatcttcttgggaagaaaaaagatttcaaaccttttgctccagccacaattcagagagcccctgaatgagccatatacctttgcagatggtattttcctttcctgaaactgcccttgtgagtttagtaagctccaaccttggtaactcagctcaaaacatcatcatctctctgctctcaaaatcaacacttgcctcaatgaaaagacttaaatattgcatattgattggctggcctttccataaactgtaagctctttgaatatagggtgtttgtcttagattctcaataaatgcttcttgaagtgattttaatttcttttaacctttgtgcttttttgtaatttttaaggttttcttcatcagacatgtattacttttgtaataatataaaaactgactgttccaaagtacagccactagactataaacttcttaaggataggagctatcactaatatgttttccattccctgttgtgcttatagcactgtatgtaagatatttagatagtacttaaaattttgatttgaatgtaaaaataaatgtcaaatgtatattaaatatagtaagtgct

SEQ ID NO: 74539 - DNA, 453 bp, Homo sapiens
actgtgtaaatacggtatacaagattaaaaatggtacacctgtatagggcacttaccataaatggagcatgcgggcctggaagttgctctaggtgagtcagtgagtgagtagtggtgagtggatatgaaggcctaggacaggagtgtacaatcttttggcttccctgggccacactggaagaactgtctttcttgggccacatatatactaacactaacactaacaatatctgatgagctaaaaaaattgcaaaaaaatctcatgttttaagaaggtttatgaatttgtgttgggccacattaaagcaatcctgggctgcatgcagcccgtgggccgtgagttgaacaagcttggcctaggacattactgtatagcacttgtacagtagtgtacagactttatgaacactgtacatttaggctatacgaaatttataaaaaatatatttcttc

SEQ ID NO: 74540 - DNA, 441 bp, Homo sapiens
ccatcagggccttacaatgctgacattgataatgggcatatgagtgaaagaatagtttagtcttaagtatcaggtgctgtgagagatacaaagggaataaaaagcagtttctgtcctccaggagctctttcatcttcttgggaagaaaaaagatttcaaaccttttgctccagccacaattcagagagcccctgaatgagccatatacctttgcagatggtattttcctttcctgaaactgcccttgtgagtttagtaagctccaaccttggtaactcagctcaaaacatcatcatctctctgctctcaaaatcaacacttgcctcaatgaaaagacttaaatattgcatattgattggctggcctttccataaactgtaagctctttgaatatagggtgtttgtcttagattctcaataaatgcttcttgaagtgatttt

SEQ ID NO: 74541 - DNA, 129 bp, Homo sapiens
ggcagaggctgcagtgggccaagatcacaccactgcactccagcctgggtaacagagccagactgtttcgaaaagagagtaagcaaagctggtcaccagtctgtgactattctgtgtctgagtccaggc

SEQ ID NO: 74542 - DNA, 443 bp, Homo sapiens
gacaacacttacaatctactcagaacaacctctctctctccagcagagagtgtcacctcctgctttaggaccatcaagctctgctaactgaatctcatcctaattgcaggatcacattgcaaagctttcactctttcccaccttgcttgtgggtaaatctcttctgcggaatctcagaaagtaaagttccatcctgagaatatttcacaaagaatttccttaagagctggactgggtaagtgcacattcaaaataaatatatttattctaagtagtattctcatatagtttggcaatgtttctattatagaatttagtagatagcactgaaataatgttgaaacatagtctcacttatttcacatgctagagaaaatacagcctactaccccaacatgaatacaaaatctaatactactagattattgtttaccatggtattc

SEQ ID NO: 74543 - DNA, 360 bp, Homo sapiens
gacaacacttacaatctactcagaacaacctctctctctccagcagagagtgtcacctcctgctttaggaccatcaagctctgctaactgaatctcatcctaattgcaggatcacattgcaaagctttcactctttcccaccttgcttgtgggtaaatctcttctgcggaatctcagaaagtaaagttccatcctgagaatatttcacaaagaatttccttaagagctggactggggtcctacgatgatacaccaaccacttgtgctaccatctgtcaaaactttggatggccctactttcaggcggagtcttgctctgtcgcccaggctggagtgcagtggcgcgaccttggctcactg

SEQ ID NO: 74544 - DNA, 5256 bp, Homo sapiens
  misc_feature (308)..(308): n is a, c, g, or t
gacaacacttacaatctactcagaacaacctctctctctccagcagagagtgtcacctcctgctttaggaccatcaagctctgctaactgaatctcatcctaattgcaggatcacattgcaaagctttcactctttcccaccttgcttgtgggtaaatctcttctgcggaatctcagaaagtaaagttccatcctgagaatatttcacaaagaatttccttaagagctggactgggtcttgacccctgaatttaagaaattcttaaagacaatgtcaaatatgatccaagagaaaatgtgatttgagnctggagacaattgtgcatatcgtctaataataaaaacccatactagcctatagaaaacaatatttgaaagattgctaccactaaaaagaaaactactacaacttgacaagactgctgcaaacttcaatttgtcaaccacaacttgacaaggttgctataaaacaagattgctacaacttctagtttatgttatacagcatatttcattttggcttaatgatggagaaaaagtgtaccctgtattttctggttctcttgcctttttttatgattcttgttacagcagaattagaagagagtcctgaggactcaattcagttgggagttactagaaataaaatcatgacagctcaatatgaatgttaccaaaagattatgcaagaccccattcaacaagcagaaggcgtttactgcaacagaacctgggatggatggctctgctggaacgatgttgcagcaggaactgaatcaatgcagctctgccctgattactttcaggactttgatccatcagaaaaagttacaaagatctgtgaccaagatggaaactggtttagacatccagcaagcaacagaacatggacaaattatacccagtgtaatgttaacacccacgagaaagtgaagactgcactaaatttgttttacctgaccataattggacacggattgtctattgcatcactgcttatctcgcttggcatattcttttatttcaagagcctaagttgccaaaggattaccttacacaaaaatctgttcttctcatttgtttgtaactctgttgtaacaatcattcacctcactgcagtggccaacaaccaggccttagtagccacaaatcctgttagttgcaaagtgtcccagttcattcatctttacctgatgggctgtaattacttttggatgctctgtgaaggcatttacctacacacactcattgtggtggccgtgtttgcagagaagcaacatttaatgtggtattattttcttggctggggatttccactgattcctgcttgtatacatgccattgctagaagcttatattacaatgacaattgctggatcagttctgatacccatctcctctacattatccatggcccaatttgtgctgctttactggtgaatctttttttcttgttaaatattgtacgcgttctcatcaccaagttaaaagttacacaccaagcggaatccaatctgtacatgaaagctgtgagagctactcttatcttggtgccattgcttggcattgaatttgtgctgattccatggcgacctgaaggaaagattgcagaggaggtatatgactacatcatgcacatccttatgcacttccagggtcttttggtctctaccattttctgcttctttaatggagaggttcaagcaattctgagaagaaactggaatcaatacaaaatccaatttggaaacagcttttccaactcagaagctcttcgtagtgcgtcttacacagtgtcaacaatcagtgatggtccaggttatagtcatgactgtcctagtgaacacttaaatggaaaaagcatccatgatattgaaaatgttctcttaaaaccagaaaatttatataattgaaaatagaaggatggttgtctcactgttttgtgcttctcctaactcaaggacttggacccatgactctgtagccagaagacttcaatattaaatgactttttgaatgtcataaagaagagccttcacatgaaattagtagtgtgttgataagagtgtaacatccagctctatgtgggaaaaaagaaatcctggtttgtaatgtttgtcagtaaatactcccactatgcctgatgtgacgctactaacctgacatcaccaagtgtggaattggagaaaagcacaatcaacttttctgagctggtgtaagccagttccagcacaccattgcatgaattcacaaacaaatggctgtaaaactaaacatacatgttgggcatgattctacccttattgccccaagagacctagctaaggtctataaacatgaagggaaaattagcttttagttttaaaactctttatcccatcttgattggggcagttgactttttttttgcccagagtgccgtagtcctttttgtaactaccctctcaaatggacaataccagaagtgaattatccctgctggctttcttttctctatgaaaagcaactgagtacaattgttatgatctactcatttgctgacacatcagttatatcttgtggcatatccattgtggaaactggatgaacaggatgtataatatgcaatcttacttctatatcattaggaaaacatcttagttgatgctacaaaacaccttgtcaacctcttcctgtcttaccaaacagtgggagggaattcctagctgtaaatataaattttgtcccttccatttctactgtataaacaaattagcaatcattttatataaagaaaatcaatgaaggatttcttattttcttggaattttgtaaaaagaaattgtgaaaaatgagcttgtaaatactccattattttattttatagtctcaaatcaaatacatacaacctatgtaatttttaaagcaaatatataatgcaacaatgtgtgtatgttaatatctgatactgtatctgggctgattttttaaataaaatagagtctggaatgctatatttggtaaatattttaaagacaaccagatgccagcatcagaagtctgtttgagaactaagagaacagaaacatctatcataagatatatttattttaaaaacacaaggtcactattttactgaatatatttgttttgataactcataccttaataataggtgtgtttgacatatttcttttttcattttgacaatgaactcacattctaatccagaaattttaaacaactactgtgataaataccaatctgctacttttatagattttaccccattaaaatattactttactgacttttactatgtgaagatatatagctttggaaatgtcccaggctattcaagaaatataaaaaactagaaggatactatatataccatatacaatgctttaatattttaatagagctactgtatataatacaaattagggaaatacttgaatatatcattgagaaaaaattattgtcagatcttactgaattattgtcagactttattaaataaagatagaagaaaaccttgctaatgaattaaagtgaaatttgcatgggattcagtttctctaatgttattttccgctgaaatctctaaagaacaagaatgacttcaattagtaaaagtcaattttgggaaaagtcatgggtatctgttttttaagtgtgtcaagttgattaaaatggatgaaacaaattactcatcataagttgtttcttaagctgtcaatatgtcaatagatggtgagttcagaacttatttcaaattgctaagacaaattatctaaattcgtaagaattaacatatagaatggtctggtcagtacatttataatttatctatgcatgaaaaagtattgttttgtttgaaacatgaatttcatagcaagctgccatagaaaggaacgcaggctgttctagaccttcaactgcctaaattatacaaaaattcattttaataaactcaattattagctatttattattcaaagacccatatttaaatcctttgctgaccatgttgacatatatcagccttcttctagacaaactgtcaactctcaaccatcttgacagtagaagtgacagtaaaaaatgttgaatgatcagagattatattaaaataaacatgtaattttcaagtatttttgttgtgcttttataatattaattctagatcagatttattttatagccagggtttgtctgttgtagagtcttgaggcgtagcagtcattcatgattaatcactgttagttttgtacccatatatttttagaatagttttaaatgttagatttctcaaaagctaaatgctacttaatatctttgtatcatactcataaagcaaagtaaatctgacactttttttaaagcaaacttctttgctgtcaaaaaaataaatttggggaaatttctagcttttaaaatgtagatctgcattttactgtgattacttgtgaaagtcatattttaattttctaaattctaatttgtcattttatttcctaaagttaatttccaatgcatttattcataaaatattcattctggaatgcagtgtttgtttaaatgtaatccaatgtatatagaattagtggtggctgtagtgctgtatttattgcttataattttttttaaatgtgaacttacttttaattttctcttggttttaatctgctagtagaaaccactagttatctgtaaaaatatattcaagatattctgatcaattataacaatttatgttatgcctagagtatatctctattttttgattgtatgaaaatattaaagttatgagttaaagtttattttcattgatatttactacagtgccaaataatctaatttataaacataattcttacagtaatcaatgggatacttctcaaaattaacaaatctcttaacaaaatatatcttttgccctctttaaagtcttcagtaaaccagtaaatgaattcaataaaccaattaagaaaaagtcatgatttgtttttcaaactaaaaaaatccaactatactacaatggatgcaaactccttcttatgctgaaagaagaaaaaggatgtctcaaaataagaaaatgttcagaaattcatctcctttatctactatatttcattttgtagttttgtttaaatattagaaagaaaaataagtatttaaaggtaatttttaaagagggcatattcatggctctcacacaaatataaaatgaaaatgtttcaaagatttcgtttaactcattaattaatgaag

SEQ ID NO: 74545 - DNA, 1834 bp, Homo sapiens
  misc_feature (308)..(308): n is a, c, g, or t
gacaacacttacaatctactcagaacaacctctctctctccagcagagagtgtcacctcctgctttaggaccatcaagctctgctaactgaatctcatcctaattgcaggatcacattgcaaagctttcactctttcccaccttgcttgtgggtaaatctcttctgcggaatctcagaaagtaaagttccatcctgagaatatttcacaaagaatttccttaagagctggactgggtcttgacccctgaatttaagaaattcttaaagacaatgtcaaatatgatccaagagaaaatgtgatttgagnctggagacaattgtgcatatcgtctaataataaaaacccatactagcctatagaaaacaatatttgaaagattgctaccactaaaaagaaaactactacaacttgacaagactgctgcaaacttcaatttgtcaaccacaacttgacaaggttgctataaaacaagattgctacaacttctagtttatgttatacagcatatttcattttggcttaatgatggagaaaaagtgtaccctgtattttctggttctcttgcctttttttatgattcttgttacagcagaattagaagagagtcctgaggactcaattcagttgggagttactagaaataaaatcatgacagctcaatatgaatgttaccaaaagattatgcaagaccccattcaacaagcagaaggcgtttactgcaacagaacctgggatggatggctctgctggaacgatgttgcagcaggaactgaatcaatgcagctctgccctgattactttcaggactttgatccatcagaaaaagttacaaagatctgtgaccaagatggaaactggtttagacatccagcaagcaacagaacatggacaaattatacccagtgtaatgttaacacccacgagaaagtgaagactgcactaaatttgttttacctgaccataattggacacggattgtctattgcatcactgcttatctcgcttggcatattcttttatttcaagagcctaagttgccaaaggattaccttacacaaaaatctgttcttctcatttgtttgtaactctgttgtaacaatcattcacctcactgcagtggccaacaaccaggccttagtagccacaaatcctgttagttgcaaagtgtcccagttcattcatctttacctgatgggctgtaattacttttggatgctctgtgaaggcatttacctacacacactcattgtggtggccgtgtttgcagagaagcaacatttaatgtggtattattttcttggctggggatttccactgattcctgcttgtatacatgccattgctagaagcttatattacaatgacaattgctggatcagttctgatacccatctcctctacattatccatggcccaatttgtgctgctttactggtgaatctttttttcttgttaaatattgtacgcgttctcatcaccaagttaaaagttacacaccaagcggaatccaatctgtacatgaaagctgtgagagctactcttatcttggtgccattgatggagaggtatgataattgattttattccttctattattttatatttgctatctgtctatctatccatgtatttaaatgagataaaattataaattccccaggaacaaccatgttaaattctgtttccatcagggaaagaaccatagaatctcttaccataggtttaactctccttctcaaatgctcaggtcatattggagttcaaagccagggaaaagtcaacctcacttaaaaatatttcaaatgctattcatctaatcttttgagatacct

SEQ ID NO: 74546 - DNA, 2993 bp, Homo sapiens
  misc_feature (308)..(308): n is a, c, g, or t
gacaacacttacaatctactcagaacaacctctctctctccagcagagagtgtcacctcctgctttaggaccatcaagctctgctaactgaatctcatcctaattgcaggatcacattgcaaagctttcactctttcccaccttgcttgtgggtaaatctcttctgcggaatctcagaaagtaaagttccatcctgagaatatttcacaaagaatttccttaagagctggactgggtcttgacccctgaatttaagaaattcttaaagacaatgtcaaatatgatccaagagaaaatgtgatttgagnctggagacaattgtgcatatcgtctaataataaaaacccatactagcctatagaaaacaatatttgaaagattgctaccactaaaaagaaaactactacaacttgacaagactgctgcaaacttcaatttgtcaaccacaacttgacaaggttgctataaaacaagattgctacaacttctagtttatgttatacagcatatttcattttggcttaatgatggagaaaaagtgtaccctgtattttctggttctcttgcctttttttatgattcttgttacagcagaattagaagagagtcctgaggactcaattcagttgggagttactagaaataaaatcatgacagctcaatatgaatgttaccaaaagattatgcaagaccccattcaacaagcagaaggcgtttactgcaacagaacctgggatggatggctctgctggaacgatgttgcagcaggaactgaatcaatgcagctctgccctgattactttcaggactttgatccatcagaaaaagttacaaagatctgtgaccaagatggaaactggtttagacatccagcaagcaacagaacatggacaaattatacccagtgtaatgttaacacccacgagaaagtgaagactgcactaaatttgttttacctgaccataattggacacggattgtctattgcatcactgcttatctcgcttggcatattcttttatttcaagagcctaagttgccaaaggattaccttacacaaaaatctgttcttctcatttgtttgtaactctgttgtaacaatcattcacctcactgcagtggccaacaaccaggccttagtagccacaaatcctgttagttgcaaagtgtcccagttcattcatctttacctgatgggctgtaattacttttggatgctctgtgaaggcatttacctacacacactcattgtggtggccgtgtttgcagagaagcaacatttaatgtggtattattttcttggctggggatttccactgattcctgcttgtatacatgccattgctagaagcttatattacaatgacaattgctggatcagttctgatacccatctcctctacattatccatggcccaatttgtgctgctttactggtgaatctttttttcttgttaaatattgtacgcgttctcatcaccaagttaaaagttacacaccaagcggaatccaatctgtacatgaaagctgtgagagctactcttatcttggtgccattgcttggcattgaatttgtgctgattccatggcgacctgaaggaaagattgcagaggaggtatatgactacatcatgcacatccttatgcacttccagggtcttttggtctctaccattttctgcttctttaatggagaggttcaagcaattctgagaagaaactggaatcaatacaaaatccaatttggaaacagcttttccaactcagaagctcttcgtagtgcgtcttacacagtgtcaacaatcagtgatggtccaggttatagtcatgactgtcctagtgaacacttaaatggaaaaagcatccatgatattgaaaatgttctcttaaaaccagaaaatttatataattgaaaatagaaggatggttgtctcactgttttgtgcttctcctaactcaaggacttggacccatgactctgtagccagaagacttcaatattaaatgactttttgaatgtcataaagaagagccttcacatgaaattagtagtgtgttgataagagtgtaacatccagctctatgtgggaaaaaagaaatcctggtttgtaatgtttgtcagtaaatactcccactatgcctgatgtgacgctactaacctgacatcaccaagtgtggaattggagaaaagcacaatcaacttttctgagctggtgtaagccagttccagcacaccattgcatgaattcacaaacaaatggctgtaaaactaaacatacatgttgggcatgattctacccttattgccccaagagacctagctaaggtctataaacatgaagggaaaattagcttttagttttaaaactctttatcccatcttgattggggcagttgactttttttttgcccagagtgccgtagtcctttttgtaactaccctctcaaatggacaataccagaagtgaattatccctgctggctttcttttctctatgaaaagcaactgagtacaattgttatgatctactcatttgctgacacatcagttatatcttgtggcatatccattgtggaaactggatgaacaggatgtataatatgcaatcttacttctatatcattaggaaaacatcttagttgatgctacaaaacaccttgtcaacctcttcctgtcttaccaaacagtgggagggaattcctagctgtaaatataaattttgtcccttccatttctactgtataaacaaattagcaatcattttatataaagaaaatcaatgaaggatttcttattttcttggaattttgtaaaaagaaattgtgaaaaatgagcttgtaaatactccattattttattttatagtctcaaatcaaatacatacaacctatgtaatttttaaagcaaatatataatgcaacaatgtgtgtatgttaatatctgatactgtatctgggctgattttttaaataaaatagagtctggaatgcta

SEQ ID NO: 74547 - DNA, 305 bp, Homo sapiens
tagacaaggtctcactctgttgcccaggctccgtctcaaaaacaaaacaaaacaaaactcaatatgtataaaactaactcgtgatcctgtctctcttccatccaatcaatcaaagtcccctcatttctgtctcataaaagctctcaaatcttctttcatgaggtcataagggaaaaagaaaaacaaactctcaaaacctttcatttaacctcatctctaccatcaaccaccccaatccagccctctacaatacatcccaatattgtatcacctgcttttttttttttttttttttgtcgacttag

SEQ ID NO: 74548 - DNA, 295 bp, Homo sapiens
atatcaacgcagtgaaaaacaaaaatagtgttataataattagtgtaaaacaattttgatctcataaacctaactgaaggaagaaagctccacaggcaacacgttgagaactccgccctagaaagggcttaaagactacagcctgtggtcaggtatagagggttctcttgtatttataacagtgaaactaatgaggatacattaatttccaaatctttatcttaacttggaagtaagacatgctcataataaaatgtgcttacacggccttcgaacacacttaccacagatgcta

SEQ ID NO: 74549 - DNA, 2224 bp, Homo sapiens
  misc_feature (319)..(319): n is a, c, g, or t
  misc_feature (341)..(341): n is a, c, g, or t
ggaggtgtgtaacgtgcgctatggagccgaaagtcgcagagctgaagcagaagatcgaggacacgctatgtccttttggcttcgaggtttaccccttccaggtggcatggtacaatgaactcttgcctccagccttccacctaccgctgccaggacctaccctggccttcctggtactcagcacgcctgccatgtttgaccgggccctcaagcccttcttgcagagctgccacctccgaatgctgactgacccagtggaccagtgtgtggcctaccatctgggccgtgttagagagagcctcccagagctgcagatagnaatcattgctgactacgaggtncaccccaaccgacgccccaagatcctggcccagacagcagcccatgtagctggggctgcttactactaccaacgacaagatgtggaggctgacccatgggggaaccagcgcatatcaggtgtgtgcatacacccccgatttgggggctggtttgccatccgaggggtagtgctgctgccagggatagaggtgccagatctgccacccagaaaacctcatgactgtgtacctacaagagctgaccgtatcgccctactcgaaggcttcaatttccactggcgtgattggacttaccgggatgctgtgacaccccaggagcgctactcagaagagcagaaggcctacttctccactccacctgcccaacgattggccctattgggcttggctcagccctcagagaagcctagttctccctccccggaccttccctttaccacacccgcccccaagaagcctgggaatcccagcagagcccggagctggctcagccccagggtctcaccacctgcatcccctggcccttgattttctcccatgtggaccctgatttatggtggtacttgctaggacttaattggctttggcaaagcaaaaggttttgagtacaagattactatttttgataatatagtagagatcttccatgaagataacaaggctcaaggaagttaggtttggccaagataaaggccagggaaccagaattcccatctgccttcaaatgagttttttttttttttttagacagagtcttactctgtcacctaggctggagtgcagtggcacagtctctactcaggaggctgaggcagtagaatcatttgagccagggaggcagagattgcagtgagccgagattgcatggctgcactctagcctgggtgacagtgtgagactgtctcaaaaaaaaaaaaaaaagtacctgcctcaggtagggactgaataaacacgtgtaaggcactttggaaaaatacctggcatatatagtaagcagtatgttggccattacgaaaggccctgggaattctgtactgctgctcatgggtgtagtcggttctagaggggtgggcaggtgggagtagctgaggaagacaagtggctggaatggtatcacatgatacacagaagtatcctcagttctgaatctaccttggcctcaagggcccaggagaataacttttcccagctgacagcctctctgaggacaatgacatatgaatgaggatcaaaacgagctttggccaggcactgtggcgctcacctgtaatcccaccattttgggaggctgaggcggaggaccacctgaggcaaggaattcagaaccactctgggcaacataatgacactaaaaaagactatctctaatcaaggctagaaccaagggaaggctaagaattgcccagtactgtgcaactactgaaagccctacccaaggccaccagccttgtcttcctctttcctctgtcagttcaaaaagaacagaaacctccagctcttttacatagcaggtaccaggcatttatcagaagaggccaacttctggttcccatgcagccctttgaatagtgtgtctaaacaaaaataggtgtccaagtagtcacactgagactttaactggtaacccaccctgtggcgtcagtcgcagtgctctggccaacactatagcagggcttattcttctccctcatgtgtagtgaaacaaaatgtaacaccttgggttcattcagttccattccctatgtctacctgtgtcaatataattccctgatttggaggcagctctcctcattttccccaaaacagggaaagcaaggagtaaattcctcttaaaatcaaaagctaataatatgcttcctaaaataaagactcatcaaggtctc

SEQ ID NO: 74550 - DNA, 432 bp, Homo sapiens
tgaatgttggtagacagaagaaaataagctgttgcttccagcaagtggcaattgagcctgtgagcacagctgtgtttggggtgagagactgccctctagggcagcccatacatgctctgttagaaatgctttgagtgcaagtaactgcaaatccagctaatatggccaaaaatacaggttgtgccaaacagtggcacacagggcaaatctggcccttagcccgtttttgaaaatgaagttttctcagaacatagtcacatccatttgttaacatattgtcaaaggctgctgtcacgatataaatgaagagtttagtagtcatgacagagacatatggctggcaaaacttaaaatatctactatgtggcccaaggagtttccagggttagtttcatagctgaacaatactcaggacattgggatagtgtctct

SEQ ID NO: 74551 - DNA, 385 bp, Homo sapiens
acatgagccaacctcattaaagatgtagataaccctggaaaatgttgcagctacatttggcacaattgtgttttgactccctcttgtttaacagttcttgtcagtcttagtttctctgttttctttcaagggagaatcgtagaagccagagtctctagtgttctcaggattcaaggtcaaatccaagggatcagggagagagaaatgtctacctgtagtgacttgtttctcactgatactagcccagcaaaacaaaaaggagctttctctttaaataattgataggacaagttgtaatctgacagaatgaaatgtgtgcattcagctttgaaaccatgtaaataattcaaaagaatgccacatttagccaatgggaaaaaaaaaa

SEQ ID NO: 74552 - DNA, 497 bp, Homo sapiens
cctgatattcccagctcccccggaggcagattaacctttaggcagctttgtgtgagtaaaggagtcgctttaaataggaaggaataatagaaaaaacccaagtgttccgttttatagcaaatgcacactgctttgttcctgctggcctgaaagaggttgcagggggtactggggcggggaattgtccagaaactctgcagatgatacagggacactccagcctagcctctgaggagagttttttttgagacggactcgctctgtctcccaggctggagtgcagtggcccaatctcggctcactgcagcctccgcctcctgggttcaagtgattctcctgcctcagcctcccgagtagctgggattacaggtgtgagccaccacgcctggctaatttttgtacttttagtagagagggggtttcaccatgttggtcaggctggtcttgaactcccgacctcaggtgatactccagcctcagcctcctgagtagctggg

SEQ ID NO: 74553 - DNA, 2891 bp, Homo sapiens
  misc_feature (2571)..(2571): n is a, c, g, or t
acagggcagcaggagccttagagcatggacggtgccatggggcctcgggggctgctgttgtgcatgtacctggtatctctcctcatcctgcaggccatgcctgccctgggctcggctacaggcaggtccaagagcagcgagaagcgacaggctgtggacaccgctgtcgatggcgtgttcatccggagtttgaaagtcaactgcaaagtcacctctcgcttcgcccactatgttgtcaccagccaagtggtcaacactgccaatgaagccagggaagtggccttcgacctggaaatccccaagacagcattcatcagtgactttgccgttacagcagatggaaacgcatttatcggagacataaaggacaaggtgactgcatggaagcagtaccggaaagcagctatctcaggagagaatgccggccttgtcagggcctcggggagaactatggagcaattcaccatccacctcaccgtcaatccccagagcaaggtcacgtttcagctgacttatgaggaagtgctgaagagaaaccatatgcagtatgaaattgtcatcaaagtcaagcccaagcagctggtgcatcattttgagattgatgtggacatcttcgagccccaggggatcagcaagctggatgcccaggcctctttcctgccgaaggaactggcagcccaaactatcaagaagtccttctcaggaaaaaagggtcatgtgctgttccgtcccaccgtgagccagcagcagtcctgccccacatgctctacatccttactgaacgggcacttcaaggtgacctacgatgtcactcgagacgagatctgcgacctcctggtggccaataaccactttgcccacttctttgccccccaaaacctgacaaacatgaacaagaacgtggtttttgtgattgacatcagtggctccatgagaggccagaaagtgaagcagaccaaggaggcactccttaaaattctgggggacatgcagccaggggactactttgacctggttctttttgggactcgagtacaatcgtggaagggctcgctggtgcaagcatctgaggccaacctacaagcagctcaagactttgtgcggggcttttccctggatgaggccacaaacctgaatggaggtttgctccggggaattgagatcttgaaccaagttcaggaaagcctcccagaactcagcaaccatgcctcaatactcatcatgttgacagatggcgatcccacagagggggtgacggaccgttcccaaatcctcaagaacgtccgcaacgccatccggggcaggttcccgctctacaacctgggtttcggccacaatgtggactttaactttctggaggtcatgtccatggagaacaacggacgggcccagagaatctacgaggaccatgatgccacccagcagctgcagggtttctacagccaggtagccaaacccctgctggtggatgtggatttgcagtacccccaggatgctgtcttggccctgacccagaaccaccataaacagtactacgaaggctcagagattgtggtggccgggcgcattgctgacaacaaacagagcagcttcaaggctgatgtgcaggcccatggggagggacaagaattcagtataacctgcctagtggatgaggaggagatgaagaaactgctccgagagcgtggccacatgctggagaaccacgtcgagcgcctctgggcctacctcaccatccaggagctgctggccaagcggatgaaggtggacagggaggagagggccaacctgtcatcccaggccctgcagatgtcgctggactatgggtttgtgaccccactgacctccatgagcatcaggggcatggcggaccaggacggcctgaagcccaccatcgacaagccctcagaggattctccgcctttggagatgctgggacccagaaggacgttcgtgctgtcagccttgcagccttctcctactcattccagctccaatacccagcggctgccagaccgagtgaccggcgtggacacagaccctcacttcatcatccacgtgccccagaaagaggacaccctgtgcttcaacatcaatgaggagcctggtgttatcctgagcctggtacaggaccccaacacaggcttctcagtgaatggacagctcattggcaacaaggccaggagccctgggcagcatgacggcacgtacttcgggcggctgggaatcgcaaaccctgccacggactttcagttggaagtgactcctcagaacattacgctgaaccccggctttggtgggcctgtgttttcctggagggaccaagctgtgctgcggcaggacggggtggtggtgaccatcaacaagaagaggaacctggtggtgtctgtggacgacggtggcacctttgaggttgttttgcaccgagtgtggaaggggagctcggtccaccaggacttcctgggcttctatgtgctggacagtcatcggatgtcagcccggacgcacgggctgctggggcaatttttccaccccatcggttttgaagtgtctgacatccacccaggctcngaccccacaaagccagatgccacgatggtggggtttgcaaaaagactacagcaaggacccgtggcatggggccgaggtgtcctgctggttcattcacaacaatggggctggactcatcgatggtgcctacactgattatatcgtccccgacatcttctgagccctctggccagcacgcctgtcctcccccggggccaaggcagaggaggaggacgacatcctgacctgctgctgaggctgtacctccttgactaagctggttccttgtgtcaaagcacctcatgccttccattaaagagaggccgtgtccaaaaaaaaaa

SEQ ID NO: 74554 - DNA, 2920 bp, Homo sapiens
  misc_feature (2571)..(2571): n is a, c, g, or t
acagggcagcaggagccttagagcatggacggtgccatggggcctcgggggctgctgttgtgcatgtacctggtatctctcctcatcctgcaggccatgcctgccctgggctcggctacaggcaggtccaagagcagcgagaagcgacaggctgtggacaccgctgtcgatggcgtgttcatccggagtttgaaagtcaactgcaaagtcacctctcgcttcgcccactatgttgtcaccagccaagtggtcaacactgccaatgaagccagggaagtggccttcgacctggaaatccccaagacagcattcatcagtgactttgccgttacagcagatggaaacgcatttatcggagacataaaggacaaggtgactgcatggaagcagtaccggaaagcagctatctcaggagagaatgccggccttgtcagggcctcggggagaactatggagcaattcaccatccacctcaccgtcaatccccagagcaaggtcacgtttcagctgacttatgaggaagtgctgaagagaaaccatatgcagtatgaaattgtcatcaaagtcaagcccaagcagctggtgcatcattttgagattgatgtggacatcttcgagccccaggggatcagcaagctggatgcccaggcctctttcctgccgaaggaactggcagcccaaactatcaagaagtccttctcaggaaaaaagggtcatgtgctgttccgtcccaccgtgagccagcagcagtcctgccccacatgctctacatccttactgaacgggcacttcaaggtgacctacgatgtcactcgagacgagatctgcgacctcctggtggccaataaccactttgcccacttctttgccccccaaaacctgacaaacatgaacaagaacgtggtttttgtgattgacatcagtggctccatgagaggccagaaagtgaagcagaccaaggaggcactccttaaaattctgggggacatgcagccaggggactactttgacctggttctttttgggactcgagtacaatcgtggaagggctcgctggtgcaagcatctgaggccaacctacaagcagctcaagactttgtgcggggcttttccctggatgaggccacaaacctgaatggaggtttgctccggggaattgagatcttgaaccaagttcaggaaagcctcccagaactcagcaaccatgcctcaatactcatcatgttgacagatggcgatcccacagagggggtgacggaccgttcccaaatcctcaagaacgtccgcaacgccatccggggcaggttcccgctctacaacctgggtttcggccacaatgtggactttaactttctggaggtcatgtccatggagaacaacggacgggcccagagaatctacgaggaccatgatgccacccagcagctgcagggtttctacagccaggtagccaaacccctgctggtggatgtggatttgcagtacccccaggatgctgtcttggccctgacccagaaccaccataaacagtactacgaaggctcagagattgtggtggccgggcgcattgctgacaacaaacagagcagcttcaaggctgatgtgcaggcccatggggagggacaagaattcagtataacctgcctagtggatgaggaggagatgaagaaactgctccgagagcgtggccacatgctggagaaccacgtcgagcgcctctgggcctacctcaccatccaggagctgctggccaagcggatgaaggtggacagggaggagagggccaacctgtcatcccaggccctgcagatgtcgctggactatgggtttgtgaccccactgacctccatgagcatcaggggcatggcggaccaggacggcctgaagcccaccatcgacaagccctcagaggattctccgcctttggagatgctgggacccagaaggacgttcgtgctgtcagccttgcagccttctcctactcattccagctccaatacccagcggctgccagaccgagtgaccggcgtggacacagaccctcacttcatcatccacgtgccccagaaagaggacaccctgtgcttcaacatcaatgaggagcctggtgttatcctgagcctggtacaggaccccaacacaggcttctcagtgaatggacagctcattggcaacaaggccaggagccctgggcagcatgacggcacgtacttcgggcggctgggaatcgcaaaccctgccacggactttcagttggaagtgactcctcagaacattacgctgaaccccggctttggtgggcctgtgttttcctggagggaccaagctgtgctgcggcaggacggggtggtggtgaccatcaacaagaagaggaacctggtggtgtctgtggacgacggtggcacctttgaggttgttttgcaccgagtgtggaaggggagctcggtccaccaggacttcctgggcttctatgtgctggacagtcatcggatgtcagcccggacgcacgggctgctggggcaatttttccaccccatcggttttgaagtgtctgacatccacccaggctcngaccccacaaagccagatgccacgatggtggtgaggaaccgccggctcacggtcaccaggggtttgcaaaaagactacagcaaggacccgtggcatggggccgaggtgtcctgctggttcattcacaacaatggggctggactcatcgatggtgcctacactgattatatcgtccccgacatcttctgagccctctggccagcacgcctgtcctcccccggggccaaggcagaggaggaggacgacatcctgacctgctgctgaggctgtacctccttgactaagctggttccttgtgtcaaagcacctcatgccttccattaaagagaggccgtgtccaaaaaaaaaa

SEQ ID NO: 74555 - DNA, 584 bp, Homo sapiens
aagacactgagtgatttgctgaaaatcacacatctagatgcaaagccagaatgcgagcagtgaccaccacacttgacaaatccgttgttgcacacatttgtactcttcaatcaacaaaacctgatgcaaaaaacagaaaagggggagatgtacatgcattttccctcactgcaaaaaaaacacaacttgtttaactacaggtgtgttcctggtggtctttgaatgaagacattgacagaaagtaacatagcatgctggttaaagactgtttttattcgaatcctggctttgccaatcaacagctgcataaattaaactctcgacctcagctcccttatttgtaaaacaagaataacaaaaagacatttttataaggttgggttgaaggttaaatgaaataacagaagattatctcttcactaattttagctgtagaaaacagaagccaatcgaaagagctcccagtccaaagctggaacaacttgaacaacaaaataaataatgtagcattggattacaaaccaaccataaaacaaatatccatgagtctatactgatgtcaataaatgaataaatgtgggaaa

SEQ ID NO: 74556 - DNA, 517 bp, Homo sapiens
tgggggaagctgagcgctgagaccaagggctaaagctgggagactgaatgcagaccgccggggcattattcatttctccagctctgatccgctgttgtaccaggggtctaatcaggcctgtgtctgcctccttcttgaatagcccagtgaattcatctaaacagccttcctacagcaacttcccactccaggtggccagacgggagttccagaccagtgttgtctcccgggacattgacacagcagccaagtttattggtgctggggcagccacagttggtgtggctggttcaggggctggcattggaaccgtgtttggcagcttgatcattggctatgccaggaacccgtctctcaagcagcagctcttctcctatgccattcttggctttgccctgtctgaggccatggggcttttctgtttgatggtcgccttcctcatcctcttcgccatgtgaggctccatgggggggtcaccggcctgttgctaatgaaatccaacaccattcttgggctg

SEQ ID NO: 74557 - DNA, 529 bp, Homo sapiens
gagccgggcgagcgctgtgggccaagcaggggttgcagggtagtaggagtgcagactgaatgcagaccgccggggcattattcatttctccagctctgatccgctgttgtaccaggggtctaatcaggcctgtgtctgcctccttcttgaatagcccagtgaattcatctaaacagccttcctacagcaacttcccactccaggtggccagacgggagttccagaccagtgttgtctcccgggacattgacacagcagccaagtttattggtgctggggcagccacagttggtgtggctggttcaggggctggcattggaaccgtgtttggcagcttgatcattggctatgccaggaacccgtctctcaagcagcagctcttctcctatgccattcttggctttgccctgtctgaggccatggggcttttctgtttgatggtcgccttcctcatcctcttcgccatgtgaggctccatgggggggtcaccggcctgttgctaatgaaatccaacaccattcttgggctg

SEQ ID NO: 74558 - DNA, 2927 bp, Homo sapiens
  misc_feature (2918)..(2918): n is a, c, g, or t
gactgcacactgttcttgacacagtggaatagttaggctgtcagaactttggaagctcaggcaaaaatgggattgatctgtttatgctgaattagagagtttcacatctttccccctaaagtttgggaaaacaattaactagaggtgtacatagtttgttagattaattttagcgcatggtaatatttgatgcagttgtctctccttaagtattgtgattttcttcctttattaagagggttgtgggtcattccatgcttctcttaaggtatctttttactctgttttactgttatattttagaagatagttttaagaaacataaaaaccatgcttgttatcttaacgtagtagtagtgtacataatagtaaaaagggcaagccagccccctctgccctcgaaaaactgtattctccaactcccactacattttctcatattgaatctgttccacctgtgatttattgttttcctgaactttgggagttttaagcaatgatacagttgaagggactgtttataattttcacatgtttaagttgtgaggctttaaaacttaaatataaggctttgtctaggaagaaaatgatctttaccttcaataaatttataatgtagcactaatccagtatagattggagactgaatgcattcttactcttagggttcatacctctaattcatgtggttaagacagtgttgtggtgaagtaatagggccccttgaaagaatctacagaaacataaattatactgagttgtgctgtactggtttgtgagaacatcagtgtattaaggagaatggtagtttaatttgaatatttaaagaaagtaatttgaatggttctagtactagggccattattaactagtaacatagattagtgacttcaactgggtgtccttattatctgatttgtctgaagtgaaaactgttaaggtgctcttttaaaatgtatttggaaacaccatagttagggtaaatacaatgtcacaattcactcttgcatattatttgcttagccaaatttatgaattctaagttaggccaaattgaaggtttggagttttacattgtgggtgagtctaaattcatgcgtttggcaagcacaaaggacatgggaaaagaatctggtatttgaggcaggcttgagtttatatgaagcaaactcagttcctcttcatgtcctatgtatttagagaggacagttttccctcagtttttttccccttccttacccctacccccatcaaatacagcccaaccaaataactgtgttcttaatttaaaggaaaatggcagacttgatacctgctgaatatttcgtgtagacagagtatgacaatgaatgagatccccagtcattgcccttgtaagcctgggaacccagtttagtgggagagactaatgtaaacagctttaatcaaaagtatatcaattggccgggtgctgtggctcacacctataatgccggcactttgggaggccaaggtgggtggatcacttgaggtcaggagtttgagaccaccctggccaacatggtgaaaccctctccctatttaaagaaaaaaaagcaaggcatatcaatttatggttatcaaataggtttttttttttttttttgagactgagtgtcgctctatagcccaggctggagtgtagtgctcactgcgacttccgcctcctgggttcaagtgattctcgtgcctcagtctcccgagtagctgggattgtaggcgcctgccaccacgcccagctaatttttgtatttgtagtagagatggggtttcatcatgttggcgaagctggtcttgaacacctgacctcaagtgatctgccttagcctcactgcttgcccctaagtggtgggattgcaggtgtgagccactgtgctggcctcaaatagtttttatcaaagctacttcaattagtggttagcaaggcttaaagactaattcagtgctttattttgacacttgttcgcaacatgttgctttttttcctgtgtcctatgggacctagtcatctgtatgttagattcacagaggaattaaagagataaacatgcatgtgctaaattgatttctgtcttgctttgttatcctataataatgttataaaataacattattataaatttcccaagagttgaattaataccaacaactggtaactcgtttttatgtaaacagcatacttgagaccagaaatcttctggatcactttgtggatctctgcctgccattctcattggtcctctgttcatcccttttctagagcttctccttaccttggcttctcttctgccacattggcctgcctgacctgtcctcaggccctgtcactgccctagattacgtttcccatgtcttcacttccaaatctggacctctcgtttagaccttctctcctgactgccagatggcatgtcccactgtcctccggtgtacatctccaaattgtcccacaggcatttatctcagatgaagtttcaggttggactcattcttctgccccaacagcagaatgactcattgagccattgagccattcagcacattctctatatggcagattcggtgctgtctctggaaatacataaacatagagcgattcctttttctgttgaggcaaaatatggatttggttaatttctattcacgtcatgaatgtggtatgtggaaggtcttctgagagcagaaagggatgtttcacagcacagcccggctgtgtggtgctcagggcaggcctctgaaggaggtgagcctgggctcttggcctaatgtttcagctctcactttccagtcctgagctgttgttgccagtccatctttcatgagaccattggagtgatctttctggtcttgtcacttcatggtttaaagttccctgggcctacacagtgaagtccaattcngcatggtat

SEQ ID NO: 74559 - DNA, 2590 bp, Homo sapiens
  misc_feature (2581)..(2581): n is a, c, g, or t
gactgcacactgttcttgacacagtggaatagttaggctgtcagaactttggaagctcaggcaaaaatgggattgatctgtttatgctgaattagagagtttcacatctttccccctaaagtttgggaaaacaattaactagaggtgtacatagtttgttagattaattttagcgcatggtaatatttgatgcagttgtctctccttaagtattgtgattttcttcctttattaagagggttgtgggtcattccatgcttctcttaaggtatctttttactctgttttactgttatattttagaagatagttttaagaaacataaaaaccatgcttgttatcttaacgtagtagtagtgtacataatagtaaaaagggcaagccagccccctctgccctcgaaaaactgtattctccaactcccactacattttctcatattgaatctgttccacctgtgatttattgttttcctgaactttgggagttttaagcaatgatacagttgaagggactgtttataattttcacatgtttaagttgtgaggctttaaaacttaaatataaggctttgtctaggaagaaaatgatctttaccttcaataaatttataatgtagcactaatccagtatagattggagactgaatgcattcttactcttagggttcatacctctaattcatgtggttaagacagtgttgtggtgaagtaatagggccccttgaaagaatctacagaaacataaattatactgagttgtgctgtactggtttgtgagaacatcagtgtattaaggagaatggtagtttaatttgaatatttaaagaaagtaatttgaatggttctagtactagggccattattaactagtaacatagattagtgacttcaactgggtgtccttattatctgatttgtctgaagtgaaaactgttaaggtgctcttttaaaatgtatttggaaacaccatagttagggtaaatacaatgtcacaattcactcttgcatattatttgcttagccaaatttatgaattctaagttaggccaaattgaaggtttggagttttacattgtgggtgagtctaaattcatgcgtttggcaagcacaaaggacatgggaaaagaatctggtatttgaggcaggcttgagtttatatgaagcaaactcagttcctcttcatgtcctatgtatttagagaggacagttttccctcagtttttttccccttccttacccctacccccatcaaatacagcccaaccaaataactgtgttcttaatttaaaggaaaatggcagacttgatacctgctgaatatttcgtgtagacagagtatgacaatgaatgagatccccagtcattgcccttgtaagcctgggaacccagtttagtgggagagactaatgtaaacagctttaatcaaaagtatatcaattggccgggtgctgtggctcacacctataatgccggcactttgggaggcctcaagtgatctgccttagcctcactgcttgcccctaagtggtgggattgcaggtgtgagccactgtgctggcctcaaatagtttttatcaaagctacttcaattagtggttagcaaggcttaaagactaattcagtgctttattttgacacttgttcgcaacatgttgctttttttcctgtgtcctatgggacctagtcatctgtatgttagattcacagaggaattaaagagataaacatgcatgtgctaaattgatttctgtcttgctttgttatcctataataatgttataaaataacattattataaatttcccaagagttgaattaataccaacaactggtaactcgtttttatgtaaacagcatacttgagaccagaaatcttctggatcactttgtggatctctgcctgccattctcattggtcctctgttcatcccttttctagagcttctccttaccttggcttctcttctgccacattggcctgcctgacctgtcctcaggccctgtcactgccctagattacgtttcccatgtcttcacttccaaatctggacctctcgtttagaccttctctcctgactgccagatggcatgtcccactgtcctccggtgtacatctccaaattgtcccacaggcatttatctcagatgaagtttcaggttggactcattcttctgccccaacagcagaatgactcattgagccattgagccattcagcacattctctatatggcagattcggtgctgtctctggaaatacataaacatagagcgattcctttttctgttgaggcaaaatatggatttggttaatttctattcacgtcatgaatgtggtatgtggaaggtcttctgagagcagaaagggatgtttcacagcacagcccggctgtgtggtgctcagggcaggcctctgaaggaggtgagcctgggctcttggcctaatgtttcagctctcactttccagtcctgagctgttgttgccagtccatctttcatgagaccattggagtgatctttctggtcttgtcacttcatggtttaaagttccctgggcctacacagtgaagtccaattcngcatggtat

SEQ ID NO: 74560 - DNA, 2703 bp, Homo sapiens
  misc_feature (2694)..(2694): n is a, c, g, or t
gagactgcctcgccaaatggcgaatttcttatgcttctcttaaggtatctttttactctgttttactgttatattttagaagatagttttaagaaacataaaaaccatgcttgttatcttaacgtagtagtagtgtacataatagtaaaaagggcaagccagccccctctgccctcgaaaaactgtattctccaactcccactacattttctcatattgaatctgttccacctgtgatttattgttttcctgaactttgggagttttaagcaatgatacagttgaagggactgtttataattttcacatgtttaagttgtgaggctttaaaacttaaatataaggctttgtctaggaagaaaatgatctttaccttcaataaatttataatgtagcactaatccagtatagattggagactgaatgcattcttactcttagggttcatacctctaattcatgtggttaagacagtgttgtggtgaagtaatagggccccttgaaagaatctacagaaacataaattatactgagttgtgctgtactggtttgtgagaacatcagtgtattaaggagaatggtagtttaatttgaatatttaaagaaagtaatttgaatggttctagtactagggccattattaactagtaacatagattagtgacttcaactgggtgtccttattatctgatttgtctgaagtgaaaactgttaaggtgctcttttaaaatgtatttggaaacaccatagttagggtaaatacaatgtcacaattcactcttgcatattatttgcttagccaaatttatgaattctaagttaggccaaattgaaggtttggagttttacattgtgggtgagtctaaattcatgcgtttggcaagcacaaaggacatgggaaaagaatctggtatttgaggcaggcttgagtttatatgaagcaaactcagttcctcttcatgtcctatgtatttagagaggacagttttccctcagtttttttccccttccttacccctacccccatcaaatacagcccaaccaaataactgtgttcttaatttaaaggaaaatggcagacttgatacctgctgaatatttcgtgtagacagagtatgacaatgaatgagatccccagtcattgcccttgtaagcctgggaacccagtttagtgggagagactaatgtaaacagctttaatcaaaagtatatcaattggccgggtgctgtggctcacacctataatgccggcactttgggaggccaaggtgggtggatcacttgaggtcaggagtttgagaccaccctggccaacatggtgaaaccctctccctatttaaagaaaaaaaagcaaggcatatcaatttatggttatcaaataggtttttttttttttttttgagactgagtgtcgctctatagcccaggctggagtgtagtgctcactgcgacttccgcctcctgggttcaagtgattctcgtgcctcagtctcccgagtagctgggattgtaggcgcctgccaccacgcccagctaatttttgtatttgtagtagagatggggtttcatcatgttggcgaagctggtcttgaacacctgacctcaagtgatctgccttagcctcactgcttgcccctaagtggtgggattgcaggtgtgagccactgtgctggcctcaaatagtttttatcaaagctacttcaattagtggttagcaaggcttaaagactaattcagtgctttattttgacacttgttcgcaacatgttgctttttttcctgtgtcctatgggacctagtcatctgtatgttagattcacagaggaattaaagagataaacatgcatgtgctaaattgatttctgtcttgctttgttatcctataataatgttataaaataacattattataaatttcccaagagttgaattaataccaacaactggtaactcgtttttatgtaaacagcatacttgagaccagaaatcttctggatcactttgtggatctctgcctgccattctcattggtcctctgttcatcccttttctagagcttctccttaccttggcttctcttctgccacattggcctgcctgacctgtcctcaggccctgtcactgccctagattacgtttcccatgtcttcacttccaaatctggacctctcgtttagaccttctctcctgactgccagatggcatgtcccactgtcctccggtgtacatctccaaattgtcccacaggcatttatctcagatgaagtttcaggttggactcattcttctgccccaacagcagaatgactcattgagccattgagccattcagcacattctctatatggcagattcggtgctgtctctggaaatacataaacatagagcgattcctttttctgttgaggcaaaatatggatttggttaatttctattcacgtcatgaatgtggtatgtggaaggtcttctgagagcagaaagggatgtttcacagcacagcccggctgtgtggtgctcagggcaggcctctgaaggaggtgagcctgggctcttggcctaatgtttcagctctcactttccagtcctgagctgttgttgccagtccatctttcatgagaccattggagtgatctttctggtcttgtcacttcatggtttaaagttccctgggcctacacagtgaagtccaattcngcatggtat

SEQ ID NO: 74561 - DNA, 1381 bp, Homo sapiens
gactgcacactgttcttgacacagtggaatagttaggctgtcagaactttggaagctcaggcaaaaatgggattgatctgtttatgctgaattagagagtttcacatctttccccctaaagtttgggaaaacaattaactagaggtgtacatagtttgttagattaattttagcgcatggtaatatttgatgcagttgtctctccttaagtattgtgattttcttcctttattaagagggttgtgggtcattccatgcttctcttaaggtatctttttactctgttttactgttatattttagaagatagttttaagaaacataaaaaccatgcttgttatcttaacgtagtagtagtgtacataatagtaaaaagggcaagccagccccctctgccctcgaaaaactgtattctccaactcccactacattttctcatattgaatctgttccacctgtgatttattgttttcctgaactttgggagttttaagcaatgatacagttgaagggactgtttataattttcacatgtttaagttgtgaggctttaaaacttaaatataaggctttgtctaggaagaaaatgatctttaccttcaataaatttataatgtagcactaatccagtatagattggagactgaatgcattcttactcttagggttcatacctctaattcatgtggttaagacagtgttgtggtgaagtaatagggccccttgaaagaatctacagaaacataaattatactgagttgtgctgtactggtttgtgagaacatcagtgtattaaggagaatggtagtttaatttgaatatttaaagaaagtaatttgaatggttctagtactagggccattattaactagtaacatagattagtgacttcaactgggtgtccttattatctgatttgtctgaagtgaaaactgttaaggtgctcttttaaaatgtatttggaaacaccatagttagggtaaatacaatgtcacaattcactcttgcatattatttgcttagccaaatttatgaattctaagttaggccaaattgaaggtttggagttttacattgtgggtgagtctaaattcatgcgtttggcaagcacaaaggacatgggaaaagaatctggtatttgaggcaggcttgagtttatatgaagcaaactcagttcctcttcatgtcctatgtatttagagaggacagttttccctcagttttttcccttctttcctaaccattaattggcacaatacggtgttcttaaggacaggcggccgttccgtgagtttggtgcggctttaagggtcccctgggcgtgccggcctttgggcacgttcgttcatgcgggggggccatcgccgggggggctcgtcgc

SEQ ID NO: 74562 - DNA, 1822 bp, Homo sapiens
  misc_feature (1813)..(1813): n is a, c, g, or t
gactgcacactgttcttgacacagtggaatagttaggctgtcagaactttggaagctcaggcaaaaatgggattgatctgtttatgctgaattagagagtttcacatctttccccctaaagtttgggaaaacaattaactagaggtgtacatagtttgttagattaattttagcgcatggtaatatttgatgcagttgtctctccttaagtattgtgattttcttcctttattaagagggttgtgggtcattccatgcttctcttaaggtatctttttactctgttttactgttatattttagaagatagttttaagaaacataaaaaccatgcttgttatcttaacgtagtagtagtgtacataatagtaaaaagggcaagccagccccctctgccctcgaaaaactgtattctccaactcccactacattttctcatattgaatctgttccacctgtgatttattgttttcctgaactttgggagttttaagcaatgatacagttgaagggactgtttataattttcacatgtttaagttgtgaggctttaaaacttaaatataaggctttgtctaggaagaaaatgatctttaccttcaataaatttataatgtagcactaatccagtatagattggagactgaatgcattcttactcttagggttcatacctctaattcatgtggttaagacagtgttgtggtgaagtaatagggccccttgaaagaatctacagaaacataaattatactgagttgtgctgtactggtttgtgagccactgtgctggcctcaaatagtttttatcaaagctacttcaattagtggttagcaaggcttaaagactaattcagtgctttattttgacacttgttcgcaacatgttgctttttttcctgtgtcctatgggacctagtcatctgtatgttagattcacagaggaattaaagagataaacatgcatgtgctaaattgatttctgtcttgctttgttatcctataataatgttataaaataacattattataaatttcccaagagttgaattaataccaacaactggtaactcgtttttatgtaaacagcatacttgagaccagaaatcttctggatcactttgtggatctctgcctgccattctcattggtcctctgttcatcccttttctagagcttctccttaccttggcttctcttctgccacattggcctgcctgacctgtcctcaggccctgtcactgccctagattacgtttcccatgtcttcacttccaaatctggacctctcgtttagaccttctctcctgactgccagatggcatgtcccactgtcctccggtgtacatctccaaattgtcccacaggcatttatctcagatgaagtttcaggttggactcattcttctgccccaacagcagaatgactcattgagccattgagccattcagcacattctctatatggcagattcggtgctgtctctggaaatacataaacatagagcgattcctttttctgttgaggcaaaatatggatttggttaatttctattcacgtcatgaatgtggtatgtggaaggtcttctgagagcagaaagggatgtttcacagcacagcccggctgtgtggtgctcagggcaggcctctgaaggaggtgagcctgggctcttggcctaatgtttcagctctcactttccagtcctgagctgttgttgccagtccatctttcatgagaccattggagtgatctttctggtcttgtcacttcatggtttaaagttccctgggcctacacagtgaagtccaattcngcatggtat

SEQ ID NO: 74563 - DNA, 398 bp, Homo sapiens
ccagatagagtttctgtttttcagttttacacgtgccacatcagggaaagttaggttatgattaaagcaagagatgatagatgaacaaacaaagaaacaacaacaaaaagcccatgcaagaggcaggaaaagaggctgactggttaaagaacaggccagattggacaatactgatcaagaggggttcacatttgaaagaacagtgctttattcctctactgactagaactaaagggattttggccgggtacggtggctcacacctgtaatcccaacactctgggaagccaaggtgggcgggtcacgaggtcaggagttcgagaccagcctgaccaacatggtgaaaccccatctctaccaaaaatacaaaaactttgccgagcgtgggccgggcgtgg

SEQ ID NO: 74564 - DNA, 321 bp, Homo sapiens
tccctgagaggaactctggtgcctgctgttaaaaaaataatttcctctctttcactacatgttatggttataagtgtaactgataaaataattagcacagtaattatctttattaactcttcctgttgttttttttttctaagtaaagccttatcctttggtcagtgcagttaatagatgagtcttaattgatgttggcttcctgctgtgaaacataagagttgtgaaatcttggcatcattatgacacctaatcacattttcattttattatggacaagaggaaaatgagttatgattaagctagaacctctctgctaaa

SEQ ID NO: 74565 - DNA, 329 bp, Homo sapiens
atccaccatgcctggcctatagtatgttttaatcatgaagtttgagagtctctggttcccctgggtcctgaggaggggaggacagagatgctcaggacagggtgagagggagccattcacagcaggctgggtgctgagtagatctggtgcttatgtggggaccttcctcctcctccccagtctgccaaaatctcctgtttcccagaaatctctcccaggtgagtgttcaggagaaattgaggtacccaggaggtgagggagcaggctgaagggttcttgggagctttacagtaaacaggaggccctttccctgagatgccccccttcct

SEQ ID NO: 74566 - DNA, 1080 bp, Homo sapiens
tcactgtttacctcaaaactatatacacttataattcgtcaattaattaaaaacaaatgaattcagaatgaatcaaagacctaaatgttagagccaaaacgataaaactcttagaaggaaacagatataaatctttgtgaacttcaattagtcaatattttcatacatgtaacacaaaaagcacacattataaaagaaaatagaagtaaattggactttgtcaaatttaaaaacttgtgctttagaagacagcatcaagaaacttaaaagacaattggagaaaatttttacaaattatgtctggtaagggatttgtatctacagtatgtaaggaattcttacaactcaataataaaaagaaagcccacttgaaaaatggacaaagaatcggcatagacacttctctaaagaagatacacaaatggccagtaagcatacaaaaagatgctcaacatcattattcatcaaggaaatgcaagtcagtaccataatgaatactattatcacactctccataatgactaaaataaaaagacagtaactaatgttggtgaggatatggggaaactggaaccttcatgcattgctggtgtggttgtaaaatgatgcaaaccttgaacaagtttggcacttcctcaaactattaaacattgagttatatgacccagcaattcagcttgtaggtatatatcctaataactgaaaacttacatccacacaaaacatgtacgcaaagtttatagcaatgttatatagccaaaaaaggaacaaataaaatttctagcaactgatgaatagataagaaaatgtcacacacgaaaggccacatattatataattccattctatttatattaaatgtccagaagagacagattgtggagacaaaaagattagtggttctggggagctgggggaaatgagaatgatggctcatggatacaggctttcattttgaggtaatgaacatgttctaaaattagacagcagtgatgattgcacacctctgtaaatgtagtaaaaatcactcagttgtataaggggtgggtttcatgatacatgaagtacagtaaagctttt

SEQ ID NO: 74567 - DNA, 295 bp, Homo sapiens
catgagaccagatgcttgggaggctgaggtgataggatcgcttgagcctgggaggctgaggctgtagtgagccatggtcataccattgcactccagcctgagcgacaaagtgagaccctgtctcaaaaacaaaaacaaaaaaaaatcaaaagaacaaattaaataattgttatgaagttgaacttctaaaacttgttcactgaaatgttttgacccgcattaatgctttatgtcccacatttatattgaaaatccacatgcaaataaaaatggaaaaaccaccaatacctcattt

SEQ ID NO: 74568 - DNA, 483 bp, Homo sapiens
atttcaagtatacatcgacggatgtgcataggttttatgcaaatactatgctaatttctatcagggacttgagcatccatgaattttggtatcactggtcctggaaccagtcccctgtggatacctagggacaactgtatgcaggaaggttattataggacagtcaacaagggaaaacagtgcaaactgattatttcagaaaaggtacatggaatcaggatacagagaaacatcagtctcttgagcctacaatgaaaagcaactccttttatctaggcctactcctaatatttgtgggaaaaaaaacaaatggagacccagaaaccagacatttaaatattttaccatcttaaactaaacttaaaaactgttaaatataatgtcctcttctgctttgacaaatagagcttcatggtggcaaaatgtttaaatatgtaaagctatactttttacttgactgaaaacaaaatatcaagactgctg

SEQ ID NO: 74569 - DNA, 321 bp, Homo sapiens
tctttcttctgtttttttgttttgttttgttttgtgtgtgtgtgtgtgtgtttgtgtgtttggaaaaaatgtgaaaaatagatatatcagaataaagtcttcgtgtaatattatgttaaattatttaataatcagaaaataaaataaaatattttattaaaaatatatatgtataatagttgtatgacaaaataaatctttggccaaatggctttcttataattttgagtagtttgataaaataaaatcatgttaacctacaatagggaaaataataaattgaaaataataacttgaaaattattttatacctgaaaatta

SEQ ID NO: 74570 - DNA, 513 bp, Homo sapiens
  misc_feature (53)..(53): n is a, c, g, or t
cccggccgcgcgacacggctgccgagaagaccgacagaaggggactctgggcncccagatcgtataaatctttcgcctttcactaaagatttccgtggagaggaacaactctgagtcttaagctaattttttgaggccttgttccgacaaggctatataaaactgttaaaaaatcagattgacttcatttgggtgtttcttacagatatcgtttaagttttcggttctgcttgtaaacgctttaatcgctcatgcgtttaaactttgtgtaagtgcaagcgttctttttctagtgaagcttcttccgacaagttagaagtatttacttcagtgtcattaatgtgaaagattcttaaaagtgttctggctgggcgcggtggcttatgccggtaatcccactgcattgggtaaaccaaggtgagcggatcacttgaggtcaggagttcgagaccagcctgggccaacgtggtgaaacccacgttgtacattgttttcttagtcttctgaatcctg

SEQ ID NO: 74571 - DNA, 641 bp, Homo sapiens
gtttggtatatgacctttattgagcttatgcaccagagtggaaataatgcctgtacaaaaccaaatgtttgttactataacttctgcaacactgttaaaatccagtttttaaaaaactcaatcaaaacccactactttggaatcaatagcttctttgaagccatagtaacaattaaatatggttaagactagaatgcagaaattggtcagttggaaagctaattaaacttccaacttgctcagacacaattacaaaaagacaaaattgggctgggggtggtggcttacgcctgtaatcccagcactttgggaggccgaggcaggcagatcacctgaggtcaggagttcgaggccagcctgaccaacatgatgaaacccgtctctactaaaaatacaaaagttagccgggcatggtggcaggcacctgtaaacccagatacttaggaggctgagccaggagaatagcttgaacccaggaggcggttgcagtgagctgagatcatgccattgcactccagcctgggcaacaagagcaaaactctgtctaaaaaaaaaagaaagaaaaagatgaaattatgtttttcacagagatacagcctactggaatcaccacgctggacagctggtaaggtacttagagt

SEQ ID NO: 74572 - DNA, 535 bp, Homo sapiens
taaagatttagatctgggtgtggtggctcatgcctgtaatcccagcactttgggaggccaagtggggaggatcacttgaggccagagttcaagaccagcctgagcaacatagtgattggtattaggtcttcttcacatgtttggtaaaaattcagcaatgaaaccagtaagccccaggctattcttctcaatatctacaaacaaaacaaaaaagttagccaggtcttcgatgtgtgcctgtagtcctagctacttgggagtctgaggtggggggattgcttaagccctggaggttgaggctgcagtgagtcgtgattgctctgctacactccagccggggtgatggagccaagaccttgtctcaaaaaaaaaaaaagactgagtacttaaatttctatatctttttccatcttgaaaggaatattttccaactggtttaatactgttgtttaataagaataagatatatccttaaattaaacaacagtattaaccagattttgagatgcaatgttagccacatttatttcccttt

SEQ ID NO: 74573 - DNA, 422 bp, Homo sapiens
gttttgtttaatctgtatgtttttgtaatctctttttaaaagaatcaatataaataaatagtaataaataataaataggattgaagcttcttaacagagaaaggaagtattattaatatttacttattattaatgttacttactattaaggttatcaaatccatctctcccttctccagcccctactatgtataaagaatgtaggagagagattcatttcaggattattggaattgggggtagaaaaacatagatgaggtaatctgagaacattattttcctcagtaattgcaatatcttttcaacctaatcgtatacttaaattactgacaagaagcaaaatggacttcatgtcttatcttttccatgttcaccttcctaatcctgtaatggcataaacagagaaattccaatcatgtagc

SEQ ID NO: 74574 - DNA, 310 bp, Homo sapiens
tttaaagtaaaaattaactaatgtggaaaagatttcactgtttgagtgtagcagtaattgttggtaaaattccatgtaagagaacactggtacacaagacaaaccatcaaatttgtgattttttttttttgggaaaaccatattatatgataaattaaaattttgaatagtttttgtttactgacctgggactaagtatcctgggttttgcaaaatatggaggatctgtttaccttatcgctaatgggtacagcagagagtggctttcagttattttcaaagtgaactgaagagcctaaccgccctcttt

SEQ ID NO: 74575 - DNA, 760 bp, Homo sapiens
atagcagcatgagaatggactaatacattatctcactgaatataattgctgtaatcccttagtgtaaatctagtaacaatcgtgttttcacagttccctctcataatcatttaattaatttgtttgaattgaaattcataaaagatacagagattgagattcattgacacgtcccttaagtctcttagtttaaaagctctcctaatatatcccacatccccttgtattttatgttgaaatacattttgactccattgaaagaacaaaatcatttgtcctatataattgtacaggtctacagtttgattattgcatccttctgggtatcatttaacttgcttctctgtgtttcttgtacttcctgggaaattattaattatatctagaggcttgattagattcaggtggaattttttaaagatttattccccgggtgactgtgaaccttcccatcagaaggtacatgtctgattttctctccttttttggtgctaacagcccagtgaatataaaattcactcctgtcttttttattgtttttttttgctggaattattctaaaaagagaaatatttttcattacatatttgattaccatgaattatgattgtatagaaaaataaagtaacttactatttcccctttatagtagtattcaaaatagtaaagtggtggtgtatcactttacaaaatctcacaaatcaccactaaagaacttatttatgtaaccaaataccatctgttccccaaaaatctatgg

SEQ ID NO: 74576 - DNA, 355 bp, Homo sapiens
tctttgggttgtaatctattttcatacttatcaggcctagcatatccccagcctacgtgcactgaaatgtaaccctagttattggcctgacttatgggggatgaagcagcagcagctcttgagggcaattcctgttgccttaaggagacagagggctctgtagtgcattcctgtagtggggaagcaaatagggaaagtactatttgaaagagttgggtaacatcttcaggcacaaatggttcaggtgagtctgtaaagccaggcttttcaagggcttccttcccaggtgttcccatttcgtgtttcagatttcaaggttttctacatcaggttgaatccttagcataacagatct

SEQ ID NO: 74577 - DNA, 415 bp, Homo sapiens
taaatatgagcaaaactagaaaccatttaaaatggtgggattctcaagctcgtgctggtgtctcttgcagatagctaaatggtagatgaaatagtgaatgaattgtgagtctctgatttggtctctcctacccaccatcaaggcttatccagagattttcaaatagcttttgcgtaagggagacaataattaagctaattattttccttactgccttatgaaaatataaattaaaacagatgtcacttgctgtcttccatggcatgaacctctgtggacaggagactctacactagactagtaatttagggtctgtttttccccccaagttcagacttaatcagatcagttgcagtgagccgagattgcaccactgatactcacttttttgaggacggggagttgaaaacccttt

SEQ ID NO: 74578 - DNA, 370 bp, Homo sapiens
aagtgaaaaaataatttttattctattttcagtaaacgcgaaattattttctacaaaaattacttaatattggcatcctccactcatgcctgtaaaataaaggtaggtcatcactaaattttaactaatttgacaattgcaaatgtatgtataatatacttatgtactgttggtttgttcatacagttagtccaacttagtccttgtttatctttatatgaaactatggtgccaagaaaaccacgttttgtccccattatgtttaaaaagacaagaattagagaagttgcagagaaaagcacctaaaagctatttggactggtaccctgaatatgaaaaatattgttgaggtgaactttagtgatgtcat

SEQ ID NO: 74579 - DNA, 811 bp, Homo sapiens
ttaggttggtgcaaaagtgcaaaagccacaattacttttgcaccaacttaatataaaataagattgcaataatttctaaaataaagatatttctatcacaaggactagacaaattagtttacagtttacaagctaaagcaaatttagaatgctaaggatgactagtttttcattattctttgccctcagatgaatttttttttctctgtcttggtttctaaaatttccaggttcaccaccaaccctctccttactgcccccaacatatacaaattttgcctacatttatcctctatgtatgtgaatacattcatgtaggctagaaatgccttatactctgccgctggcctggaaagtagtcttcctacaaggggcctttgcacatctctgatttcttccattatgacttggtgctaatttttaaatccaactctcagagtttatggggatccttggtggcaactttaccaccaacaccacccacacacatccccgactcctggtctgtgcctgtgccattttctcagtctttaaacccttttctgtcccctccacctttgaaatccttacttggcaatcacatcctttttcaaatgcctactacctcaattaaacttttattatctccctaagtgaaactttccaatgtatatgatacatattagaaatgaaatcaaagttccccttttctagtcagttccccaaatggctgagccaattctgtactcttcaaattactcttgcttttgcaaggatttttaaattgctttggaagtattcatatttccaaactgtttttaacttctagaaa

SEQ ID NO: 74580 - DNA, 509 bp, Homo sapiens
catagctcactgctgcctcaagctcttgggctccaaagatcctcctacctcagcctccagagctgggggtctacaggcgcgtaccaccatgcccagctactattcttattattcccaaatgccaccccaccatatttctaaaaactcccaaagaaagattctactttgcccagtttgtcctcaattgagcagttttgtctaagcccagagtttctgctgggccagagtatggatgagctgtctctccctggctggtgcccatgcctgcctgtagcctgggagggggagtggcgcccagggtcaggtggaacaaaacatgactgcctagggctgcctctgtctccatctcactgatcgcaaatcacagctcagacagccagctcttaagtgagacctgagtgccagagaggggtggatacaaggccaacagttactaaatgaatgaaaattgtgattccgatgaagcctgccagagaaataaagcattttttaaaagatggaaaaaaggc

SEQ ID NO: 74581 - DNA, 1561 bp, Homo sapiens
ctcctgacctcgagtgatctgcccgtcttgacctctcaaaagtgctgagattacaggtgtgagccaccatgcctggccagaaaaactttggataaagtcaaggtattatataatttgggggaggatgaacgggggtttgtagtactctcgaatattctctaacatcagtgacgtgagtgacccttatatgaatcttcctcagtttcaccagctctaggccccacagggcaaggggacagttatagaaagaagggaccatggacacacaggactaattgcacacccttcctggctcttgttagttcttggggccaggacagctcacaggtgtcagaaagttccagtgagccccagtgaaaagtgggctgaaataattgccagtgattggctcccccactgtgtgtgtgcacgggcgtgtgtgcccaggtgcggtagggagtttcatcgcatctaggagcttcatagtagccataagatcatattgtatttactctgactaaaggccagtgtgggatcaaagactcccttaaaggttcagacacacttacaaattcaccagacacttattttatttgcctgaataatactccctgagcttgctttttctgccagagagaatattctaaatcaggatcactttagaagatttggaagccacatctctatagctgtgtagtgtgtcagatccatccaaatatttaaagcttttttttttttttttgagatatggtcttactgtgtcacccaggctagagtgcagtgacgtaatcatagctcactgcagccttgaactcctgggctcaaatgatcctctcacttcagcctcctgagtagctgggactgcaggtgtttaccaccatacccgactaattttttatttttaaatttgttttgtgaagtcaggttcttactgtgttgccaggctggtctggaacttctggcctcaagcagtcgtcctgcctctgctccccaaagtgctgggcctgagacaccacacccagcctaaactaaaagccatttttagtaactcccaccaatgtggttactgttacaaagttgtatggtttctgggtcatgtttggtatcagaatgtgtatgtatatccttataaatatggaatgtagaactgataatagtttacctatcagatttgcaaaaataaggaaagatttttagcagcttgtaacaaacatatacatacttggataaataatttagaattttaacccatggctcatatgctcttacaatattctctttgagggtaaaacatactttattcttaaacttaaagaacctttgataagccgtgaattatgatctcagtgactacatttctttttaggagttatatgtgggggaaggaaagaagtagctagcagggttaacatggaaagcaggagattatagacaagcatcatttgagcctttggatactacaaataatcttcaaaaatgacaggttttttggctttttgtttttcctttcctttagtgctagttgcagaatcctatcatattgtggttagatttcaataaagaatgtttaagattaggacta

SEQ ID NO: 74582 - DNA, 601 bp, Homo sapiens
ttccccagggaccacatccagcttttcttccctcccaagagaccagcaaggctcagtataaatagcagccaccgctccctggcaggagggacccgcagctcagctacagcacagatcagcaccatgaagcttctcacgggcctggttttctgctccttggtcctgggtgtcagcagccgaagcttcttttcgttccttggcgaggcttttgatggggctcgggacatgtggagagcctactctgacatgagagaagccaattacatcggctcagacaaatacttccatgctcgggggaactatgatgctgccaaaaggggacctgggggtgtctgggctgcagaagcgatcagcgatgccagagagaatatccagagattctttggccatggtgcggaggactcgctggccgatcaggctgccaatgaatggggcaggagtggcaaagaccccaatcacttccgacctgctggcctgcctgagaaatactgagcttcctcttcactctgctctcaggagatctggctgtgaggccctcagggcagggatacaaagcggggagagggtacacaatgggtatctaataaatacttaagaggtg

SEQ ID NO: 74583 - DNA, 883 bp, Homo sapiens
  misc_feature (849)..(849): n is a, c, g, or t
  misc_feature (853)..(854): n is a, c, g, or t
  misc_feature (856)..(856): n is a, c, g, or t
  misc_feature (867)..(867): n is a, c, g, or t
  misc_feature (870)..(871): n is a, c, g, or t
ttccccagggaccacatccagcttttcttccctcccaagagaccagcaaggctcagtataaatagcagccaccgctccctggcaggagggacccgcagctcagctacagcacagatcagcaccatgaagcttctcacgggcctggttttctgctccttggtcctgggtgtcagcagccgaagcttcttttcgttccttggcgaggcttttgatggggctcgggacatgtggagagcctactctgacatgagagaagccaattacatcggctcagacaaatacttccatgctcgggggaactatgatgctgccaaaaggggacctgggggtgtctgggctgcagaagcgatcagcgatgccagagagaatatccagagattctttggccatggtgcggaggactcgctggccgatcaggctgccaatgaatggggcaggagtggcaaagaccccaatcacttccgacctgctggcctgcctgagaaatactgagcttcctcttcactctgctctcaggagatctggctgtgaggccctcagggcagggatacaaagcggggagagggtacacaatgggtatctaataaatacttaagaggtgaaaaaaaaaaaaacaaaaaaaaaaaaaaactttttggggcggcttgggccttgaaaaaggtttttaaaaccttcggtgggggccgggggccccagaggggtaggcgaaccgtggccaaaaggcgggtcccaaggagaaaccggggccaagacaaaggggcggggattccccccatataaaaaacgcccggggggacaccgagggtctcggaacaaatcccagagggggtccgagagggcaacaggggnccanncngggggtccagngannccatataatttg

SEQ ID NO: 74584 - DNA, 554 bp, Homo sapiens
aagcagtggtatcaacgcagagtggccattacgtccgggagggacccgcagctcagctacagcacagatcagcaccatgaagcttctcacgggcctggttttctgctccttggtcctgggtgtcagcagccgaagcttcttttcgttccttggcgaggcttttgatggggctcgggacatgtggagagcctactctgacatgagagaagccaattacatcggctcagacaaatacttccatgctcgggggaactatgatgctgccaaaaggggacctgggggtgtctgggctgcagaagcgatcagcgatgccagagagaatatccagagattctttggccatggtgcggaggactcgctggccgatcaggctgccaatgaatggggcaggagtggcaaagaccccaatcacttccgacctgctggcctgcctgagaaatactgagcttcctcttcactctgctctcaggagatctggctgtgaggccctcagggcagggatacaaagcggggagagggtacacaatgggtatctaataaatacttaagaggtg

SEQ ID NO: 74585 - DNA, 748 bp, Homo sapiens
ttccccagggaccacatccagcttttcttccctcccaagagaccagcaaggctcagtataaatagcagccaccgctccctggcaggagggacccgcagctcagctacagcacagatcaggtgaggagcacaccaaggagtgatttttaaaacttactctgttttctctttcccaacaagattatcatttcctttaaaaaaaatagttatcctggggcatacagccataccattctgaaggtgtcttatctcctctgatctagagagcaccatgaagcttctcacgggcctggttttctgctccttggtcctgggtgtcagcagccgaagcttcttttcgttccttggcgaggcttttgatggggctcgggacatgtggagagcctactctgacatgagagaagccaattacatcggctcagacaaatacttccatgctcgggggaactatgatgctgccaaaaggggacctgggggtgtctgggctgcagaagcgatcagcgatgccagagagaatatccagagattctttggccatggtgcggaggactcgctggccgatcaggctgccaatgaatggggcaggagtggcaaagaccccaatcacttccgacctgctggcctgcctgagaaatactgagcttcctcttcactctgctctcaggagatctggctgtgaggccctcagggcagggatacaaagcggggagagggtacacaatgggtatctaataaatacttaagaggtg

SEQ ID NO: 74586 - DNA, 662 bp, Homo sapiens
ttccccagggaccacatccagcttttcttccctcccaagagaccagcaaggctcagtataaatagcagccaccgctccctggcaggagggacccgcagctcagctacagcacagatcagttatcctggggcatacagccataccattctgaaggtgtcttatctcctctgatctagagagcaccatgaagcttctcacgggcctggttttctgctccttggtcctgggtgtcagcagccgaagcttcttttcgttccttggcgaggcttttgatggggctcgggacatgtggagagcctactctgacatgagagaagccaattacatcggctcagacaaatacttccatgctcgggggaactatgatgctgccaaaaggggacctgggggtgtctgggctgcagaagcgatcagcgatgccagagagaatatccagagattctttggccatggtgcggaggactcgctggccgatcaggctgccaatgaatggggcaggagtggcaaagaccccaatcacttccgacctgctggcctgcctgagaaatactgagcttcctcttcactctgctctcaggagatctggctgtgaggccctcagggcagggatacaaagcggggagagggtacacaatgggtatctaataaatacttaagaggtg

SEQ ID NO: 74587 - DNA, 865 bp, Homo sapiens
  misc_feature (631)..(631): n is a, c, g, or t
  misc_feature (638)..(638): n is a, c, g, or t
  misc_feature (642)..(642): n is a, c, g, or t
  misc_feature (648)..(648): n is a, c, g, or t
ttccccagggaccacatccagcttttcttccctcccaagagaccagcaaggctcagtataaatagcagccaccgctccctggcaggagggacccgcagctcagctacagcacagatcagcaccatgaagcttctcacgggcctggttttctgctccttggtcctgggtgtcagcagccgaagcttcttttcgttccttggcgaggcttttgatggggctcgggacatgtggagagcctactctgacatgagagaagccaattacatcggctcagacaaatacttccatgctcgggggaactatgatgctgccaaaaggggacctgggggtgtctgggctgcagaagcgatcagcgatgccagagagaatatccagagattctttggccatggtgcggaggactcgctggccgatcaggctgccaatgaatggggcaggagtggcaaagaccccaatcacttccgacctgctggcctgcctgagaaatactgagcttcctcttcactctgctctcaggagatctggctgtgaggccctcagggcagggatacaaattagtgaggtctatgtccagagaagctgagatatggcatataataggcatctaataaatgcttaagaaggtggaaanaccaccnccanccaccncacaacacaacacaccacacacaacaccctcgggccgcccccgccccgttaagaaagccctcttgaccagacaaaccatggatgtggagcacgggccccacggagtggcgcagcgaaagcgtcgcccacgagcgggacaccagggacaacaagccggcggatgaagacacgcgtgggggataatctcacccgtttaaaaagcacccgcggggacacc

SEQ ID NO: 74588 - DNA, 693 bp, Homo sapiens
ttccccagggaccacatccagcttttcttccctcccaagagaccagcaaggctcagtataaatagcagccaccgctccctggcaggagggacccgcagctcagctacagcacagatcagttatcctggggcatacagccataccattctgaaggtgtcttatctcctctgatctagagagcaccatgaagcttctcacgggcctggttttctgctccttggtcctgggtgtcagcagccgaagcttcttttcgttccttggcgaggcttttgatggggctcgggacatgtggagagcctactctgacatgagagaagccaattacatcggctcagacaaatacttccatgctcgggggaactatgatgctgccaaaaggggacctgggggtgtctgggctgcagaagcgatcagcgatgccagagagaatatccagagattctttggccatggtgcggaggactcgctggccgatcaggctgccaatgaatggggcaggagtggcaaagaccccaatcacttccgacctgctggcctgcctgagaaatactgagcttcctcttcactctgctctcaggagatctggctgtgaggccctcagggcagggatacaaagcggggagagggtacacaatgggtatctaataaatacttaagaggtgccaaaaaattgggacgaagcatccagaaaca

SEQ ID NO: 74589 - DNA, 879 bp, Homo sapiens
aagcagtggtatcaacgcagagtggccattacgtccgggagggacccgcagctcagctacagcacagatcagcaccatgaagcttctcacgggcctggttttctgctccttggtcctgggtgtcagcagccgaagcttcttttcgttccttggcgaggcttttgatggggctcgggacatgtggagagcctactctgacatgagagaagccaattacatcggctcagacaaatacttccatgctcgggggaactatgatgctgccaaaaggggacctgggggtgtctgggctgcagaagcgatcagcgatgccagagagaatatccagagattctttggccatggtgcggaggactcgctggccgatcaggctgccaatgaatggggcaggagtggcaaagaccccaatcacttccgacctgctggcctgcctgagaaatactgagcttcctcttcactctgctctcaggagatctggctgtgaggccctcagggcagggatacaaagcggggagagggtacacaatgggtatctaataaatacttaagaggtgatcgctaaacaacaggagaatggacgggtacctttttgggaccgtgcatctggcccctggaaaagggttttcaaagaccgatcgttgtggggaccgggggctcccctcaggaggcagagcaaacaggtgcaaagagcaggtatgctgaaggaaaacacaccgtggtattaagcaataggcggtggagacttcctgcccgaatttaaacatccgcccgggggagtaacgcggacgctgtctgacaactatctccgaagggctcctagggggccattaacgggagcctttgcacgcggggccccggcgggtcgcgtttaagataccg

SEQ ID NO: 74590 - DNA, 749 bp, Homo sapiens
ttccccagggaccacatccagcttttcttccctcccaagagaccagcaaggctcagtataaatagcagccaccgctccctggcaggagggacccgcagctcagctacagcacagatcagcaccatgaagcttctcacgggcctggttttctgctccttggtcctgggtgtcagcagccgaagcttcttttcgttccttggcgaggcttttgatggggctcgggacatgtggagagcctactctgacatgagagaagccaattacatcggctcagacaaatacttccatgctcgggggaactatgatgctgccaaaaggggacctgggggtgtctgggctgcagaagcgatcaggcgatgccagagagaatatccagagattctttggcctgcctcagccttccgagtagatggtgtcaggcctctgagcccaagctaagccatcatatcccctgtgatctgcacgtatacatccagatggcctgaagtaactgaataatcacaaaaggagtgaaaatggcctgttcctgccttaactgatgacattccaccacaaaagaagtgaaaatggccagtccctgccttaactgatgacattacctcgtgaaattccttctgctggcctgcctgagaaatactgagcttcctcttcactctgctctcaggagatctggctgtgaggccctcagggcagggatacaaagcggggagagggtacacaatgggtatctaataaatacttaagaggtg

SEQ ID NO: 74591 - DNA, 701 bp, Homo sapiens
ttccccagggaccacatccagcttttcttccctcccaagagaccagcaaggctcagtataaatagcagccaccgctccctggcaggagggacccgcagctcagctacagcacagatcagcaccatgaagcttctcacgggcctggttttctgctccttggtcctgggtgtcagcagccgaagcttcttttcgttccttggcgaggcttttgatggggctcgggacatgtggagagcctactctgacatgagagaagccaattacatcggctcagacaaatacttccatgctcgggggaactatgatgctgccaaaaggggacctgggggtgtctgggctgcagaagcgatcaggcgatgccagagcagtgatgtggaagatgaagtggaggatgagagatacgatgaggaagaggaggctgaaagggatcggttaaatatcaagtcaccattttcactgagccacgttcctcatgggaagaaaaagctgcatggtgaatataagaactgaattcttcatgtgctgcatgaagagctaatttaaaaaagcaaagtaagactaattatttaaaataaaaatgccacaaatttcattttctccttctaagtattacaatggagtttattctctgcctaaaaagtggaagaaattgagtgaatgataattttgtaatttaggataagatccaagttattttcccc

SEQ ID NO: 74592 - DNA, 605 bp, Homo sapiens
ttccccagggaccacatccagcttttcttccctcccaagagaccagcaaggctcagtataaatagcagccaccgctccctggcaggagggacccgcagctcagctacagcacagatcagcaccatgaagcttctcacgggcctggttttctgctccttggtcctgggtgtcagcagccgaagcttcttttcgttccttggcgaggcttttgatggggctcgggacatgtggagagcctactctgacatgagagaagccaattacatcggctcagacaaatacttccatgctcgggggaactatgatgctgccaaaaggggacctgggggtgtctgggctgcagaagcgatcaggcctggtttctcagtacttccagaccgtgactgactatggcaaggacctgatggagaaggtcaagagcccagagcttcaggccgaggccaagtcttactttgaaaagtcaaaggagcagctgacacccctgatcaagaaggctggaacggaactggttaacttcttgagctatttcgtggaacttggaacacagcctgccacccagtgaagtgtccagaccattgtcttccaaccccagctggcctctagaa

SEQ ID NO: 74593 - DNA, 419 bp, Homo sapiens
ttccccagggaccacatccagcttttcttccctcccaagagaccagcaaggctcagtataaatagcagccaccgctccctggcaggagggacccgcagctcagctacagcacagatcagcaccatgaagcttctcacgggcctggttttctgctccttggtcctgggtgtcagcagccgaagcttcttttcgttccttggcgaggcttttgatggggctcgggacatgtggagagcctactctgacatgagagaagccaattacatcggctcagacaaatacttccatgctcgggggaactatgatgctgccaaaaggggacctgggggtgtctgggctgcagaagcgatcagctcagggcagggatacaaagcggggagagggtacacaatgggtatctaataaatacttaagaggtg

SEQ ID NO: 74594 - DNA, 897 bp, Homo sapiens
ttccccagggaccacatccagcttttcttccctcccaagagaccagcaaggctcagtataaatagcagccaccgctccctggcaggagggacccgcagctcagctacagcacagatcaggtgaggagcacaccaaggagtgatttttaaaacttactctgttttctctttcccaacaagattatcatttcctttaaaaaaaatagttatcctggggcatacagccataccattctgaaggtgtcttatctcctctgatctagagaggtaagcagggtcgggcctggtagtacttggatgggagaacacctgggaataccaggtgctaaaggctttaagaataaaaaataatgatcctgctttgtgtttatcccatgttgagttctgtgcggggcagagggaacacacggtaaatgcgttatggggaattataggctacttgagggagtgacagtctggtggtaactcctgccttcctccatcagtgccacgttggcatcctcttatgcagtcaggcttcagggctgatgggttcagaaccgagggcttctggctctgagtgaggtcctgctgcaaggtttcctagatgagccactgagactctaataagatccagtggaaataaccaggctctcgtcggaatataagtcccaagggaagctgtgccagtcttgtgggcgactgcctgacttactcctttcatttcagcaccatgaagcttctcacgggcctggttttctgctccttggtcctgggtgtcagcagccgaagcttcttttcgttccttggcgaggcttttgatggttatgaatctcaggcacaccttggcatcacctgaaatacccatgccttcaactccccagcagagtctgcagaaactggcctggggtgtggcctg

SEQ ID NO: 74595 - DNA, 916 bp, Homo sapiens
ttccccagggaccacatccagcttttcttccctcccaagagaccagcaaggctcagtataaatagcagccaccgctccctggcaggagggacccgcagctcagctacagcacagatcagcaccatgaagcttctcacgggcctggttttctgctccttggtcctgggtgtcagcagccgaagcttcttttcgttccttggcgaggcttttgatggggctcgggacatgtggagagcctactctgacatgagagaagccaattacatcggctcagacaaatctcgacctcccggggctcaagagatcctcccacttcagcctcttgaataactgggactgcagatgtgcgccatgacacttgcctaatttttatattttttgtagagatggggtttcgccgtgtcacccaggctggtcttgaactcctgggctcaagtgatctgcctgcctcagcctcccaaagtgctgggattacaggcatgagtcactgagcccagcctactgttatatttatttttgtgttggtttgaggctgcccagattcacattgtttctggggtcgtctgtgagggtgtttccagaggagattaacatttgaatttggacttaataaagtagattgctatttctcaatgcaactgggcatcacccaatctgttgaaggcttgaataggaaccaaaaatagaggacggaccagattttgcctcccttttcccctgcctcactgcttgagttggacatctcctctcatcttctcttgcctcaaaattgcatttacatgatcaggttgctctggttctcaggcctttgaacctcagactgaatacccctttcctaagttctagcttgcagggcgatcgggggacttctcggccccattttctgtgagccaatccttcataataattcttctac

SEQ ID NO: 74596 - DNA, 679 bp, Homo sapiens
  misc_feature (284)..(284): n is a, c, g, or t
  misc_feature (298)..(298): n is a, c, g, or t
  misc_feature (300)..(301): n is a, c, g, or t
  misc_feature (313)..(313): n is a, c, g, or t
  misc_feature (323)..(323): n is a, c, g, or t
ttccccagggaccacatccagcttttcttccctcccaagagaccagcaaggctcagtataaatagcagccaccgctccctggcaggagggacccgcagctcagctacagcacagatcagcaccatgaagcttctcacgggcctggttttctgctccttggtcctgggtgtcagcagccgaagcttcttttcgttccttggcgaggcttttgatggggctcgggacatgtggagagcctactctgacatgagagaagccaattacatcggctcagacaaataaanaaacaaaaaaaaanannaaaaaaaaaaanaaaaaaaaanaaaaaaaaaaaaaaaaacaaaaaaaaaaaaaaaaacaacatgaggggggaggggcgcgcggcgaccagaatgcccaacaaacgatgtgggcgggcgggcgcgcgcggcagcaagagaagacaaaaagaagagcacagaaggggtgatcacacgcaagacaaggaaccgagggacgagagcagggaggggggacaccaacacacacacagaaaaaaagcgcgccggcgagaggacaaaagaaaggtctattcacacaaccacaagacaaggagagacgtacggaggaaaaagcagagcgaaagaaaaagaaagagcggacaaacagacaaagcatacacacaaaaacaaccccgaag

SEQ ID NO: 74597 - DNA, 1029 bp, Homo sapiens
  misc_feature (634)..(634): n is a, c, g, or t
  misc_feature (648)..(648): n is a, c, g, or t
  misc_feature (650)..(651): n is a, c, g, or t
  misc_feature (663)..(663): n is a, c, g, or t
  misc_feature (673)..(673): n is a, c, g, or t
ttccccagggaccacatccagcttttcttccctcccaagagaccagcaaggctcagtataaatagcagccaccgctccctggcaggagggacccgcagctcagctacagcacagatcagcaccatgaagcttctcacgggcctggttttctgctccttggtcctgggtgtcagcagccgaagcttcttttcgttccttggcgaggcttttgatggggctcgggacatgtggagagcctactctgacatgagagaagccaattacatcggctcagacaaatacttccatgctcgggggaactatgatgctgccaaaaggggacctgggggtgtctgggctgcagaagcgatcagcgatgccagagagaatatccagagattctttggccatggtgcggaggactcgctggccgatcaggctgccaatgaatggggcaggagtggcaaagaccccaatcacttccgacctgctggcctgcctgagaaatactgagcttcctcttcactctgctctcaggagatctggctgtgaggccctcagggcagggatacaaagcggggagagggtacacaatgggtatctaataaatacttaagaggtgaaaaaaaaaaaaacaaaaaaaaaaaaaaaaaanaaacaaaaaaaaanannaaaaaaaaaaanaaaaaaaaanaaaaaaaaaaaaaaaaacaaaaaaaaaaaaaaaaacaacatgaggggggaggggcgcgcggcgaccagaatgcccaacaaacgatgtgggcgggcgggcgcgcgcggcagcaagagaagacaaaaagaagagcacagaaggggtgatcacacgcaagacaaggaaccgagggacgagagcagggaggggggacaccaacacacacacagaaaaaaagcgcgccggcgagaggacaaaagaaaggtctattcacacaaccacaagacaaggagagacgtacggaggaaaaagcagagcgaaagaaaaagaaagagcggacaaacagacaaagcatacacacaaaaacaaccccgaag

SEQ ID NO: 74598 - DNA, 1189 bp, Homo sapiens
ttccccagggaccacatccagcttttcttccctcccaagagaccagcaaggctcagtataaatagcagccaccgctccctggcaggagggacccgcagctcagctacagcacagatcaggtgaggagcacaccaaggagtgatttttaaaacttactctgttttctctttcccaacaagattatcatttcctttaaaaaaaatagttatcctggggcatacagccataccattctgaaggtgtcttatctcctctgatctagagaggtaagcagggtcgggcctggtagtacttggatgggagaacacctgggaataccaggtgctaaaggctttaagaataaaaaataatgatcctgctttgtgtttatcccatgttgagttctgtgcggggcagagggaacacacggtaaatgcgttatggggaattataggctacttgagggagtgacagtctggtggtaactcctgccttcctccatcagtgccacgttggcatcctcttatgcagtcaggcttcagggctgatgggttcagaaccgagggcttctggctctgagtgaggtcctgctgcaaggtttcctagatgagccactgagactctaataagatccagtggaaataaccaggctctcgtcggaatataagtcccaagggaagctgtgccagtcttgtgggcgactgcctgacttactcctttcatttcagcaccatgaagcttctcacgggcctggttttctgctccttggtcctgggtgtcagcagccgaagcttcttttcgttccttggcgaggcttttgatggggctcgggacatgtggagagcctactctgacatgagagaagccaattacatcggctcagacaaatacttccatgctcgggggaactatgatgctgccaaaaggggacctgggggtgtctgggctgcagaagcgatcagcgatgccagagagaatatccagagattctttggccatggtgcggaggactcgctggccgatcaggctgccaatgaatggggcaggagtggcaaagaccccaatcacttccgacctgctggcctgcctgagaaatactgagcttcctcttcactctgctctcaggagatctggctgtgaggccctcagggcagggatacaaagcggggagagggtacacaatgggtatctaataaatacttaagaggtg

SEQ ID NO: 74599 - DNA, 1176 bp, Homo sapiens
  misc_feature (781)..(781): n is a, c, g, or t
  misc_feature (795)..(795): n is a, c, g, or t
  misc_feature (797)..(798): n is a, c, g, or t
  misc_feature (810)..(810): n is a, c, g, or t
  misc_feature (820)..(820): n is a, c, g, or t
ttccccagggaccacatccagcttttcttccctcccaagagaccagcaaggctcagtataaatagcagccaccgctccctggcaggagggacccgcagctcagctacagcacagatcaggtgaggagcacaccaaggagtgatttttaaaacttactctgttttctctttcccaacaagattatcatttcctttaaaaaaaatagttatcctggggcatacagccataccattctgaaggtgtcttatctcctctgatctagagagcaccatgaagcttctcacgggcctggttttctgctccttggtcctgggtgtcagcagccgaagcttcttttcgttccttggcgaggcttttgatggggctcgggacatgtggagagcctactctgacatgagagaagccaattacatcggctcagacaaatacttccatgctcgggggaactatgatgctgccaaaaggggacctgggggtgtctgggctgcagaagcgatcagcgatgccagagagaatatccagagattctttggccatggtgcggaggactcgctggccgatcaggctgccaatgaatggggcaggagtggcaaagaccccaatcacttccgacctgctggcctgcctgagaaatactgagcttcctcttcactctgctctcaggagatctggctgtgaggccctcagggcagggatacaaagcggggagagggtacacaatgggtatctaataaatacttaagaggtgaaaaaaaaaaaaacaaaaaaaaaaaaaaaaaanaaacaaaaaaaaanannaaaaaaaaaaanaaaaaaaaanaaaaaaaaaaaaaaaaacaaaaaaaaaaaaaaaaacaacatgaggggggaggggcgcgcggcgaccagaatgcccaacaaacgatgtgggcgggcgggcgcgcgcggcagcaagagaagacaaaaagaagagcacagaaggggtgatcacacgcaagacaaggaaccgagggacgagagcagggaggggggacaccaacacacacacagaaaaaaagcgcgccggcgagaggacaaaagaaaggtctattcacacaaccacaagacaaggagagacgtacggaggaaaaagcagagcgaaagaaaaagaaagagcggacaaacagacaaagcatacacacaaaaacaaccccgaag

SEQ ID NO: 74600 - DNA, 499 bp, Homo sapiens
tccttcacgggggcccctggggttttttcctgggctcccctttggggtcccctgggggtgtggttccaacgcagccgaagcttcttttcgttccttggcgaggcttttgatggggctcgggacatgtggagagcctactctgacatgagagaagccaattacatcggctcagacaaatacttccatgctcgggggaactatgatgctgccaaaaggggacctgggggtgtctgggctgcagaagcgatcagcgatgccagagagaatatccagagattctttggccatggtgcggaggactcgctggccgatcaggctgccaatgaatggggcaggagtggcaaagaccccaatcacttccgacctgctggcctgcctgagaaatactgagcttcctcttcactctgctctcaggagatctggctgtgaggccctcagggcagggatacaaagcggggagagggtacacaatgggtatctaataaatacttaagaggtg

SEQ ID NO: 74601 - DNA, 906 bp, Homo sapiens
  misc_feature (872)..(872): n is a, c, g, or t
  misc_feature (876)..(877): n is a, c, g, or t
  misc_feature (879)..(879): n is a, c, g, or t
  misc_feature (890)..(890): n is a, c, g, or t
  misc_feature (893)..(894): n is a, c, g, or t
ttccccagggaccacatccagcttttcttccctcccaagagaccagcaaggctcagtataaatagcagccaccgctccctggcaggagggacccgcagctcagctacagcacagatcagcaccatgaagcttctcacgggcctggttttctgctccttggtcctgggtgtcagcagccgaagcttcttttcgttccttggcgaggcttttgatggggctcgggacatgtggagagcctactctgacatgagagaagccaattacatcggctcagacaaatacttccatgctcgggggaactatgatgctgccaaaaggggacctgggggtgtctgggctgcagaagcgatcagcgatgccagagagaatatccagagattctttggccatggtgcggaggactcgctggccgatcaggctgccaatgaatggtcgctggtcccctagcactgggcatgctccctgcggccctgttcactagctgtcctctgcctggaacagatctgtcacctctcacttcctcttcactctgctctcaggagatctggctgtgaggccctcagggcagggatacaaagcggggagagggtacacaatgggtatctaataaatacttaagaggtgaaaaaaaaaaaaacaaaaaaaaaaaaaaactttttggggcggcttgggccttgaaaaaggtttttaaaaccttcggtgggggccgggggccccagaggggtaggcgaaccgtggccaaaaggcgggtcccaaggagaaaccggggccaagacaaaggggcggggattccccccatataaaaaacgcccggggggacaccgagggtctcggaacaaatcccagagggggtccgagagggcaacaggggnccanncngggggtccagngannccatataatttg

SEQ ID NO: 74602 - DNA, 1305 bp, Homo sapiens
ttccccagggaccacatccagcttttcttccctcccaagagaccagcaaggctcagtataaatagcagccaccgctccctggcaggagggacccgcagctcagctacagcacagatcaggtgaggagcacaccaaggagtgatttttaaaacttactctgttttctctttcccaacaagattatcatttcctttaaaaaaaatagttatcctggggcatacagccataccattctgaaggtgtcttatctcctctgatctagagaggtaagcagggtcgggcctggtagtacttggatgggagaacacctgggaataccaggtgctaaaggctttaagaataaaaaataatgatcctgctttgtgtttatcccatgttgagttctgtgcggggcagagggaacacacggtaaatgcgttatggggaattataggctacttgagggagtgacagtctggtggtaactcctgccttcctccatcagtgccacgttggcatcctcttatgcagtcaggcttcagggctgatgggttcagaaccgagggcttctggctctgagtgaggtcctgctgcaaggtttcctagatgagccactgagactctaataagatccagtggaaataaccaggctctcgtcggaatataagtcccaagggaagctgtgccagtcttgtgggcgactgcctgacttactcctttcatttcagcaccatgaagcttctcacgggcctggttttctgctccttggtcctgggtgtcagcagccgaagcttcttttcgttccttggcgaggcttttgatggggctcgggacatgtggagagcctactctgacatgagagaagccaattacatcggctcagacaaatacttccatgctcgggggaactatgatgctgccaaaaggggacctgggggtgtctgggctgcagaagcgatcagcagtacaggctagataacccaccaatttccccactgtcctctgatcccctcgtgacagaacctttcagcataacgcctcacatcccaagtctatacccttactgaagaatgctgctctgagcttctgcccccagaatcattccaacgaccacactgcaaagcctatgacagcatcaaatttcaggacctgcagggggcaggagtggcaaagaccccaatcacttccgacctgctggcctgcctgagaaatactgagcttcctcttcactctgctctcaggagatctggctgtgaggccctcagggcagggatacaaagcggggagagggtacacaatgggtatctaataaatacttaagaggtg

SEQ ID NO: 74603 - DNA, 1002 bp, Homo sapiens
  misc_feature (944)..(945): n is a, c, g, or t
ttccccagggaccacatccagcttttcttccctcccaagagaccagcaaggctcagtataaatagcagccaccgctccctggcaggagggacccgcagctcagctacagcacagatcaggtgaggagcacaccaaggagtgatttttaaaacttactctgttttctctttcccaacaagattatcatttcctttaaaaaaaatagttatcctggggcatacagccataccattctgaaggtgtcttatctcctctgatctagagaggtaagcagggtcgggcctggtagtacttggatgggagaacacctgggaataccaggtgctaaaggctttaagaataaaaaataatgatcctgctttgtgtttatcccatgttgagttctgtgcggggcagagggaacacacggtaaatgcgttatggggaattataggctacttgagggagtgacagtctggtggtaactcctgccttcctccatcagtgccacgttggcatcctcttatgcagtcaggcttcagggctgatgggttcagaaccgagggcttctggctctgagtgaggtcctgctgcaaggtttcctagatgagccactgagactctaataagatccagtggaaataaccaggctctcgtcggaatataagtcccaagggaagctgtgccagtcttgtgggcgactgcctgacttactcctttcatttcagcaccatgaagcttctcacgggcctggttttctgctccttggtcctgggtgtcagcagccgaagcttcttttcgttccttggcgaggcttttgatggggctcgggacatgtggagagcctactctgacatgagagaagccaattacatcggctcagacaaatacttccatgctcgggggaactatgatgctgccaaaaggggacctgggggtgtctgggctgcagaagcgatcagggnncaacttcccggcttccagaccctaccagcactaccctaaccctcagccgacagtttt

SEQ ID NO: 74604 - DNA, 693 bp, Homo sapiens
ggtccttgaggacatttaatatcaggacaaagagcctatgaatatatcactgatgtatataaaccctaaggcgttaataaaagctaactgtttagtgttatccatttaagggaacaggaggaattgcataacttttagattagtcatagtggtgctcctaagggatatgctgttgtatatttgtatagccagggcacttagccttccaaaccaatttatataccatgttcttcaactgtgggtgagatttagcctcaagatttgatttactatatgtaagtacattacttgatttctataaagaatctttagtggaagaggttattctgaattatttatcaatatgattaataccagttagaaattattaatgatcttcctttatactatacataggataacttttaacttgtcgctacagttgttgctctgaggatcttaattttgttactttctaggctacatgaagctatctttttaaaaagtgtactcttcattttcactgttattgtgtacttagcataaaaaactcaaatctaggccaggtgcagtggctcatgcctgtaatcccagcactttgggaggctgaagcatgcggatcacttgagcccaggagttcaagaccagcctgggcaacatggctaatgaacactaagcatagttttgatgtctttcatattaaagactttctca

SEQ ID NO: 74605 - DNA, 520 bp, Homo sapiens
atcctagcagctgagctctgccttcctggggaagtgaagatgagcaaaccattctcacttgcccctttgggtatggactagggaagtagggagagctggccagtcagcacaagggaagactgaagcaggcaagctgagagcatggaagtctccacaaaagagaaacaaaaagtcagaatgcctactccctgcagccacctttatttctgccagcttctggctccatttcaggtcatgcatagcacatgggtttatgcacaaagacctatttttggtatcttccttaaagcaatcaagcaagctgatcccagtaaaggggtaaacccagcaactaagttcacttcttgaccgctccattttcgtatctgtaaggtaatgctaatactatctttttgggaaggttatgaggattaaaaagtcatttgatctctaccaaatgctcagcaaatgcttcatggaagacaagccagctgctgctcttctgtgccctgcagttttcctcccacactctgcctcagca

SEQ ID NO: 74606 - DNA, 722 bp, Homo sapiens
tgccaagcttgtgctcccttgtatccagcacctgggagctaaggcggcggatccctgagcccaggagtttgagacagcccgggcaacagggtgagacgccatccctacctgtgatacgttgtactagctgcattgttggcatgtgcctgcagtcccagctacttgggaggccgaggcgggagtattgcttgaacccgtgaggcggaggttgcagtgagccgagatcacaccactgtactccagataaggagagactcatttctgatgactacctggatccagctatgcctgaagctaatatcccccaggactttttagttatgacttttctttaagtcagttgagtttctataacttgcaaccaagatttctgcctaatacttgctccagctccccttgtcaacctggggacctccactcatccagagatcactggcccccaaggccaagttggctgccctttgtgttcccagatgccctgtgttcccctctagcatagcccttaatatgctgtgttacgatgatcttattccctgtctcttcttttagactagaaactgcttgagggcaggaattgggtcttatgatactgcatcctggtccctagcataggactgtgcttatgttttaaaaactgcttggtgattgaatacattaatgaataaatgaataaaaatgggtatggtctggtagggaccattgctgggatttcacaggaaaga

SEQ ID NO: 74607 - DNA, 1323 bp, Homo sapiens
tatgctgcttcatctgtctaggaatatcagaacgcagttctgtaaatgttcaactcttcagtgcaatgaccccattagccactaggtggagtcagcttcttttttctagcaaggtagaccagccctgggactttactgtttgatttaatgggaagagaacagggtgacttcacgagcccctgtatatgctatttcagttaaccctcaggacaactggcaaagacttgatttcacaggagaaagtcagggacaaagtcttgcagagcttacacaaccaagaagtagccttggagagagatttgatcttagcacttctgctcattcccaaggccgatttccccttccctcaggacatttccctcaggaggccctctctgtttgagggctgtaacttagtcacctgtctagaagtacacctgatgtcaggccagctccacagcccttcttttccttttctcctttgggtgacaaacctgctccattctcagatcctgtggttccgagggactggccctgctctctgattccaggagtgagcctgtgacccgactgagtaatcacagtcatagtcttcagctgttagtgtccagcatgtaaggacagcctgcttcagaactaagccaacacagaggaggccgggctcggtggctcacacctgtaaccccagtactttgggaggccaaagcaggcagattacttgaagtcaggagttcaaggccagctggccaacatgatgaaaccctgtctctactaaaaatacaaaaattagtcaggcgtggtggcgcacgtctgtactcccaattagctggaattacaggcacccgccaccacgcccagctaatttttgtacttttaatagatacagggtttcaccaggttgaccaggctgatctcgaactcccaacctcaggcgattgacctgcctcagcctcccaaagtgctgggattacaggcgtgagccaccacgcccgtctggctaatattttttattagggtctcactccgttgcccaggctggtctcaaactcctaggctcaaggaatcctcctcgctcagcgcctgtaatcccagcagtttgggaggctgaggtgggtggatcatttgaggtcaggagtttgagaccatcctggccaatatggtgaaaccccgtctctactaaaaatacaaaaattagctgggcatggtgacaggtgcctgtaatcccagctacttgggaggctgaggctggagaatcgcttgaacccaggaggcggaggttgcagtgagccgagatcacgccactgtactccagcttgggcgacagagcgagactctcaagaaaaa

SEQ ID NO: 74608 - DNA, 1365 bp, Homo sapiens
tatgctgcttcatctgtctaggaatatcagaacgcagttctgtaaatgttcaactcttcagtgcaatgaccccattagccactaggtggagtcagcttcttttttctagcaaggtagaccagccctgggactttactgtttgatttaatgggaagagaacagggtgacttcacgagcccctgtatatgctatttcagttaaccctcaggacaactggcaaagacttgatttcacaggagaaagtcagggacaaagtcttgcagagcttacacaaccaagaagtagccttggagagagatttgatcttagcacttctgctcattcccaaggccgatttccccttccctcaggacatttccctcaggaggccctctctgtttgagggctgtaacttagtcacctgtctagaagtacacctgatgtcaggccagctccacagcccttcttttccttttctcctttgggtgacaaacctgctccattctcagatcctgtggttccgagggactggccctgctctctgattccaggagtgagcctgtgacccgactgagtaatcacagtcatagtcttcagctgttagtgtccagcatgtaaggacagcctgcttcagaactaagccaacacagaggaggccgggctcggtggctcacacctgtaaccccagtactttgggaggccaaagcaggcagattacttgaagtcaggagttcaaggccagctggccaacatgatgaaaccctgtctctactaaaaatacaaaaattagtcaggcgtggtggcgcacgtctgtagtcccagctacttgggaggccgaggcgggagtattgcttgaacccgtgaggcggaggttgcagtgagccgagatcacaccactgtactccagataaggagagactcatttctgatgactacctggatccagctatgcctgaagctaatatcccccaggactttttagttatgacttttctttaagtcagttgagtttctataacttgcaaccaagatttctgcctaatacttgctccagctccccttgtcaacctggggacctccactcatccagagatcactggcccccaaggccaagttggctgccctttgtgttcccagatgccctgtgttcccctctagcatagcccttaatatgctgtgttacgatgatcttattccctgtctcttcttttagactagaaactgcttgagggcaggaattgggtcttatgatactgcatcctggtccctagcataggactgtgcttatgttttaaaaactgcttggtgattgaatacattaatgaataaatgaataaaaatgggtatggtctggtagggaccattgctgggatttcacaggaaaga

SEQ ID NO: 74609 - DNA, 279 bp, Homo sapiens
ataatctaattgataagaattatagcataagtgcatgtatgtgtatgagaacagtcactctggcatcgcctgcaacagcaaataaatgagtggcaaacaagctctcgcggagggtatttaaatattttatgtgactaagaagaatgagatacgtccatttgctgtgataagaaaagatattccacagtttcgtatttgttaagtattttcagcaaatcatggaacacgatgcaacacccgattccatgtttgaaaacagaacagaacaaaattcaacaa

SEQ ID NO: 74610 - DNA, 539 bp, Homo sapiens
ttgaatcaatcagcccagatggacatgaatatatttatgtggacccgatgcagctgccttatgactcaagatgggagtttccaagagatggactagtgcttggtcgggtcttggggtctggagcgtttgggaaggtggttgaaggaacagcctatggattaagccggtcccaacctgtcatgaaagttgcagtgaagatgctaaaacgtaagtgctccttcctggggattttttgagcacggggattttttgagcatggggatattaagggaatttctcaaaatcatgcagctagtaaataagacatttaggactaggtcctgattattttgactccaggttttatgtgtatttagattaggtttatttagattgctcttgctgcctgtatgttggaaaattaagagcttgttatttccagtgacttctttttactagaaagaccaggaattagttattagcactgaggcccaagtagctatttgcttcttttagacttttggtaaatagaatgatatcccatcccaggattagtcata

SEQ ID NO: 74611 - DNA, 208 bp, Homo sapiens
ttctttccatagtgactagtaatatcaacaggtgtcaaggtctaaacagaaattgcatttaaaaaaaaaaaaagtgtgtcagccaggcgttgtggctcatcatacctgtaaacccaacactttgggaggctgaggcagggggatcacatgagcccaggagttcaagacccgcctgggcaacatagtgagacccgtccctacaaaaaaa

SEQ ID NO: 74612 - DNA, 473 bp, Homo sapiens
caaacttctgatctcaggtgatctgcccaccttggccttgatggttttttttttttaattttggaaaaatctccaccattatctcttcatttatttttttctgcctcatcttctgtcttcttttttggggtctccatgtaaacataagttagaatttttgctgctgtttgacatgtctcatgctctattcttattttttttttcattttgtgcttcagtttggaaaatttctgttgacctgactcttgaggcgctgatcataaacaagataactgggaaaacaatatgtttgtaaaacaatttcttgagatgtgaaatagtatctatattataccaagagtagtcccagctacttgagaggctgaggtaggaggattgctttagcttgggaggtggaggttgccatgagccaggatcatgccactgcactctagcctgggtgacagagggtgacctcatctcaaaaaaaaaaa

SEQ ID NO: 74613 - DNA, 348 bp, Homo sapiens
ggataagtttgtcatttagcccatggtgggggtaagagtcccactttctaaattggtgatttctgtcacatgtctaaggtagaaccagctgcaggcagtggggacttggggactagaacaggcagggaggtggagagctattctggtgggatgtcctaggggctgatgaaagtgagccttgacagcagctttgttctaaaggagcttaaagagaaagcagtggccgggcgcagtggctcacgcctgtaatcccagcactttgggaggccgaggcgggtggatcacgaggtcaggagatcgagactatcctggctaatgtggtgaaaccccgtctctactaaaaataca

SEQ ID NO: 74614 - DNA, 377 bp, Homo sapiens
attaaaaataataataaacagtatcttggcaaaatttgcttccaggaggatgtggcatccaaaacatacattcaataagctattgaatagccaatggcacagttcaattctcacccttgatataagaaatctaccaaatcagaagtattttttgatatattacatatttagactccatgtttaaagaaaggaagatagtataaagtaggtggtaataaataatcatttaatgaatgctcttaggtggcaggataactctttgcttaaccaactcaaccattcaattattttgagtgtggaagaaccattcggaggaacaagggaaacctaacatcaaatttcagttaaggtagtggttacttgagctctagaaaata

SEQ ID NO: 74615 - DNA, 6206 bp, Homo sapiens
agaatcgttagcaactgagcatatttctataaaccaataaaggtttttctgttttgttcatctgttacccttatgctgttgccactttcacatgcagtgtctgtaggcggagagtatgagataacagcatttcacaaatgaaagtgagtggaaaagggctgcttcccctttaaggcagtctcagctccagctccctcccctttcctgattgacaaacctacccgaagtcacatgatctgcctctatttgaaggtcacaaaaagctgcttcctttagagacagagagggagagagagagcaagagggagagtgtgtgagagagagttagttcaagccaaaatggccgacagagtctctgctggtttctgaatatttaaaatacaaaaaaacagatagacaaaaagaattcattttttggaccttttttcatttccatttctaccttgtatgcctcaatttgctggatttaagcactgctgcactttatgagagagaaggagcaagaaagggaagaacagttaatggaagacaagaaaaggaagaaagaggataaaaagaaaaaagaagccactcagaaggtcacggaacaaaaaaccaaagtgcccgaagtgacgaaaccaagtttaagccaaccaacggccgccagcccaattggcagctctccatcgccaccagtcaatggtggcaacaatgccaaaagggtggcagtgccgaacggacaaccgccaagcgccgcccgctacatgcctcgggaggtgccgccgcgattccgttgccagcaggaccacaaagtgttactaaaacgtgggcagccccctccaccgtcctgcatgctccttgggggtggggcagggcctcctccctgcacagcacctggagcaaacccaaacaacgcacaagtgacaggagcgctgctgcagagtgagagtgggactgcgccagactcaacccttggaggtgctgctgcttcaaattatgcaaattccacttggggctcgggagcctcctccaacaacggcacctcccccaacccaattcacatctgggacaaggtgattgtagacgggtctgacatggaagagtggccttgtattgccagcaaagacactgaatcttcttccgaaaacaccaccgataacaacagtgcctcgaaccctggctctgagaagagcactctgccaggaagcaccactagtaacaaaggaaaagggagccagtgccagtctgcaagttctgggaacgaatgtaatcttggggtctggaaatctgaccctaaggctaaatctgttcaatcttccaactctactacagagaacaacaatggactaggaaattggaggaatgtgagtggtcaggatagaattggacctggctctggcttcagcaactttaacccaaatagcaacccatctgcctggccagcactggtccaagaaggaacttctaggaaaggggcattggaaacagataatagtaattccagtgcacaggttagcacagtaggtcagacatccagggaacagcagtcaaagatggaaaatgcgggtgttaattttgttgtctctggcagagaacaggctcaaattcataacactgatggaccaaaaaatggaaacactaactccttgaacttaagttcaccaaaccccatggagaataagggaatgccctttggaatgggcttggggaacacctccaggagcactgatgccccttcacaaagcactggagatcgaaagactgggagtgttggatcttggggtgcagctagggggccttctggaactgacacagtctctggacaaagcaattctggaaacaatgggaacaatggaaaagagagagaggactcctggaaaggagcttctgttcagaaatcaactgggtcaaaaaatgactcttgggacaacaataacaggtctacgggtgggtcctggaactttggcccccaggactctaatgacaacaaatggggtgaagggaacaaaatgacatctggggtctctcagggagaatggaaacagccgactgggtctgatgagttgaaaattggagaatggagtggtccaaaccaaccaaattctagcactggagcatgggacaatcaaaagggccaccccctccctgaaaaccaaggcaatgcccaggctccctgttggggaagatcttccagctccacaggaagtgaagttggaggtcaaagcactggaagcaaccacaaagcaggaagtagtgacagtcataactctggccgtcggtcgtacaggcccacacatcctgattgtcaggctgtcttgcagactcttttgagccgaactgatttggaccccagggtgctctcaaacactggctggggccaaactcaaattaagcaggacacagtgtgggacattgaagaggtgccaaggcctgaggggaaatctgacaaaggaactgaggggtgggagagcgctgccacacagaccaagaactcagggggctggggagatgcacccagccaaagcaatcaaatgaagtctggatggggggagctctcagcctctacagagtggaaagaccccaagaacacaggaggctggaatgactacaagaacaacaactcttccaactggggaggaggacgacctgatgaaaagacaccttcctcttggaatgagaatcccagcaaggatcaggggtggggaggtggacgccagcccaatcaaggatggtcttctggaaagaatggttggggggaggaagtcgatcagacaaaaaacagcaattgggaaagttctgcaagtaaacctgtgtctgggtggggtgaaggagggcagaatgaaatcgggacttggggtaatggtggcaatgcaagcctagcttcaaaaggtgggtgggaggattgcaaaagatccccagcatggaatgagacgggccgacagcccaattcctggaataaacaacaccaacagcagcagcccccacagcagccgccgccaccacaaccagaggcttctggttcgtggggaggcccacccccaccacctccaggcaacgttcgaccttccaattccagctggagcagcgggccacagcctgcaacacctaaggatgaggaacccagtggttgggaagagccatccccacagtcaattagtcggaaaatggacattgatgatggcacttcagcatggggagaccctaacagttataactacaagaatgtgaatctgtgggataagaattcccaagggggcccagcacctcgagaaccaaacctgcccaccccaatgaccagtaaatcggcatcagattccaaatctatgcaagacggctggggggagagtgacgggccagtcacaggagctcgccatcccagctgggaagaggaggaggatggaggagtctggaacaccactggctctcagggcagtgcttcctcccacaactcagcaagctggggacaaggaggaaagaaacaaatgaagtgctcactcaaaggaggaaacaatgattcatggatgaatcctcttgccaaacagttttcaaatatgggattgctgagtcagactgaagataatccaagcagcaaaatggatttgtctgtaggaagcctttcagataaaaaatttgatgtggacaagcgagcgatgaatctcggggattttaatgatatcatgaggaaggatcgatctgggttccgtccacctaattccaaagacatgggaaccacagatagtgggccttattttgagaagggcggtagtcatggtttgtttggaaacagcacagcacaatcgagaggtctgcacacacccgtgcagccactaaattcttctcccagtctccgggcgcaagtgcctccccagtttatttccccccaggtttctgcctcaatgctcaagcagtttcccaacagtggcctgagtccaggtcttttcaatgtggggccccagttatctcctcaacaaattgccatgctgagccagcttccacaaattccccagtttcagttggcatgtcagcttctcttgcagcagcagcaacagcagcagttgttacagaaccagagaaagatttctcaagctgtacgccaacagcaagagcagcagctggctcgaatggtgagtgcactgcagcagcagcagcagcagcagcagaggcagccaggcatgaagcactcgccctctcatcctgttgggcccaagccgcatctggacaacatggtacccaacgcattgaatgtggggctcccagaccttcaaaccaaagggccaatacctggatatggttctggcttcagctctggcggcatggactatggcatggttggtgggaaggaggctggaaccgagtctcgctttaaacagtggacctccatgatggaggggctgccctctgtagccacacaggaagccaatatgcacaaaaatggcgctatagtggcccctggtaaaacccggggagggtcaccgtacaaccagtttgatatcatccctggtgacacactgggtggccatacgggtcctgctggtgatagctggttacctgccaaatctccaccaacaaataaaatcggaagtaaatccagcaatgccagttggcctccagaattccaaccaggagtgccatggaaaggtatccaaaacattgaccctgaatctgacccctatgtcaccccaggaagtgtgctggggggtacagccacatctcccattgtagatactgaccaccaactgctgcgggataacaccacagggtctaattcttccctcaacacctcgctgccttcacctggtgcctggccctacagtgcctctgacaactcctttaccaacgttcatagcacttcagcaaagttccctgattacaaatcaacatggtccccagatcccataggacacaaccccactcatctctccaacaagatgtggaaaaaccatatttcctccaggaacactacaccgctgccccgcccacctcctggtctgaccaaccccaaaccatcatctccctggagcagcacagcaccccgatcagtcagggggtgggggacacaggactcacggctcgcctcggcctctacctggagtgatggtggctcagttcgtcctagttactggctggttcttcacaatctcaccccacagattgatgggtcaaccttgagaacgatctgcatgcagcatggcccactgctgacattccatctgaatctaacccagggcactgccctgatccgatacagcaccaaacaggaggcggccaaggcccaaactgcactgcacatgtgtgtgttgggaaacactaccatccttgctgagtttgccactgatgatgaagtcagccgctttctggcacaagctcagccccctacacctgcagcaaccccaagtgcgccagctgcggggtggcagtcgctggagaccggccagaaccagtcagatcccgtgggacctgctctgaatctttttggtgggtccactgggctcgggcagtggagcagcagcgctggtggcagcagcggggccgatcttgctggcgcttcattgtgggggcccccaaactattcttctagcttatggggagtcccaacggtggaagatccccataggatgggcagccctgctcctttactacctggtgaccttctgggaggagggtcggattcaatctgaacttagaactttcaactctgacctcgtgaccttttttggaacagcagcagcactaacttgaccttttcgttttttttttcaacttgcaataaatacatttttaaaaggaaaaaagaaaacggagagaaaaaaaggtgggtcattgacagactgtctgagcacatagttgcctcccttataacttcagttttttcgtttggaatatgaatccaaaaagagaacatatcactcttgaaatacttgaatcatgaacgccaacctagaaagacaatgtgaagcaagtacacataccatttaaatttaaacacaaaaaaattaaaaaaattagtttctagtttttcacttttttcatgttatatggaagttgttgctaagaaacatatatactgaaaaaaaatagctttttaactttgtttgcactgggtgtgtttccgtccttaggtctaccatgtttgggagggagggaaattcaaaagaattgttgggggaggggggagggaagacttgacggagcctcactttaaaaacaaaaacacaaaaaacctaaaa

SEQ ID NO: 74616 - DNA, 1104 bp, Homo sapiens
agaatcgttagcaactgagcatatttctataaaccaataaaggtttttctgttttgttcatctgttacccttatgctgttgccactttcacatgcagtgtctgtaggcggagagtatgagataacagcatttcacaaatgaaagtgagtggaaaagggctgcttcccctttaaggcagtctcagctccagctccctcccctttcctgattgacaaacctacccgaagtcacatgatctgcctctatttgaaggtcacaaaaagctgcttcctttagagacagagagggagagagagagcaagagggagagtgtgtgagagagagttagttcaagccaaaatggccgacagagtctctgctggtttctgaatatttaaaatacaaaaaaacagatagacaaaaagaattcattttttggaccttttttcatttccatttctaccttgtatgcctcaatttgctggatttaagcactgctgcactttatgaggttggtaaatattttcaattttttttaaccaattgatttatatggatcttgtctaaccgttttcactggtggtgttgcaaatcgacatttgtctagcatggagactggcttcagacatttcgtggatctgtgtaaatcagacccgtgatgtactttggttcggcattttagaaatggaaaagacgtggtaaaatatttagattttgaagtgatttaattgcacttttaatgtatatgcagattttcatcatcgtttctatcttgcaataaatgaagctgcgagtaattggaaatttgctatttagaaagaggtttttaaaaaacacagacctccccctccccccttaaatctgctgcaaaaatttgcataaatataaatgggtttgcattctttcgggctgctaaggccgacaaaggatctgggagggcaagccctagaacgggaaaggctttttctatctttttattttttaaactgggccctccttcctagagagatgtaaaacctaaagtaagacctaatacattttaaacatcaggttgggggcgggtgaacaccaggaggtttggggtttgtagattcccctgcttgaaaacctcccaagcaatatgtg

SEQ ID NO: 74617 - DNA, 348 bp, Homo sapiens
tgctgcatctgcaaggaattattattctgatgattgttttatatagctgttgcaaagagttaattcattctttccttaaagattccaaatctatgcaagacggctggggggagagtgacgggccagtcacaggagctcgccatcccagctgggaagaggaggaggatggaggagtctggaacaccactggctctcagggcagtgcttcctcccacaactcagcaagctggggacaaggaggaaagaaacaaatgaaggtagcctgcttagaaatgttcgcacttgctcattcgctctgagaaggcagaactgaggttttgttttgtttgtttttgttttgagacagag

SEQ ID NO: 74618 - DNA, 6131 bp, Homo sapiens
ttgtttattttgtttttagtttttggggtccccgtgctgctgcaaggcgaaacgggagggagtgacccctgcgcccctcagtcccccctacgacgtcgcctccatagtctgcggagaagcggagactgcgcgcctcgcctcacagcgaaacgccgcgcactcggagccggcacggctcggcgggttgtggttttttgcactgaatgtaacctagactcatcttcacgggcttgtgttgccccaggtactgtcaaaggcagtatttttgtgtttctgcagagttttgcacaaaatctgttcccatgcaaaccaatgagggagaagtatcggaagaaagcagttccaaggtggaacaggaggattttgtaatggaagggcatggcaagactccacctcctggtgaagaaagcaaacaagagaaggagcaagaaagggaagaacagttaatggaagacaagaaaaggaagaaagaggataaaaagaaaaaagaagccactcagaaggtcacggaacaaaaaaccaaagtgcccgaagtgacgaaaccaagtttaagccaaccaacggccgccagcccaattggcagctctccatcgccaccagtcaatggtggcaacaatgccaaaagggtggcagtgccgaacggacaaccgccaagcgccgcccgctacatgcctcgggaggtgccgccgcgattccgttgccagcaggaccacaaagtgttactaaaacgtgggcagccccctccaccgtcctgcatgctccttgggggtggggcagggcctcctccctgcacagcacctggagcaaacccaaacaacgcacaagtgacaggagcgctgctgcagagtgagagtgggactgcgccagactcaacccttggaggtgctgctgcttcaaattatgcaaattccacttggggctcgggagcctcctccaacaacggcacctcccccaacccaattcacatctgggacaaggtgattgtagacgggtctgacatggaagagtggccttgtattgccagcaaagacactgaatcttcttccgaaaacaccaccgataacaacagtgcctcgaaccctggctctgagaagagcactctgccaggaagcaccactagtaacaaaggaaaagggagccagtgccagtctgcaagttctgggaacgaatgtaatcttggggtctggaaatctgaccctaaggctaaatctgttcaatcttccaactctactacagagaacaacaatggactaggaaattggaggaatgtgagtggtcaggatagaattggacctggctctggcttcagcaactttaacccaaatagcaacccatctgcctggccagcactggtccaagaaggaacttctaggaaaggggcattggaaacagataatagtaattccagtgcacaggttagcacagtaggtcagacatccagggaacagcagtcaaagatggaaaatgcgggtgttaattttgttgtctctggcagagaacaggctcaaattcataacactgatggaccaaaaaatggaaacactaactccttgaacttaagttcaccaaaccccatggagaataagggaatgccctttggaatgggcttggggaacacctccaggagcactgatgccccttcacaaagcactggagatcgaaagactgggagtgttggatcttggggtgcagctagggggccttctggaactgacacagtctctggacaaagcaattctggaaacaatgggaacaatggaaaagagagagaggactcctggaaaggagcttctgttcagaaatcaactgggtcaaaaaatgactcttgggacaacaataacaggtctacgggtgggtcctggaactttggcccccaggactctaatgacaacaaatggggtgaagggaacaaaatgacatctggggtctctcagggagaatggaaacagccgactgggtctgatgagttgaaaattggagaatggagtggtccaaaccaaccaaattctagcactggagcatgggacaatcaaaagggccaccccctccctgaaaaccaaggcaatgcccaggctccctgttggggaagatcttccagctccacaggaagtgaagttggaggtcaaagcactggaagcaaccacaaagcaggaagtagtgacagtcataactctggccgtcggtcgtacaggcccacacatcctgattgtcaggctgtcttgcagactcttttgagccgaactgatttggaccccagggtgctctcaaacactggctggggccaaactcaaattaagcaggacacagtgtgggacattgaagaggtgccaaggcctgaggggaaatctgacaaaggaactgaggggtgggagagcgctgccacacagaccaagaactcagggggctggggagatgcacccagccaaagcaatcaaatgaagtctggatggggggagctctcagcctctacagagtggaaagaccccaagaacacaggaggctggaatgactacaagaacaacaactcttccaactggggaggaggacgacctgatgaaaagacaccttcctcttggaatgagaatcccagcaaggatcaggggtggggaggtggacgccagcccaatcaaggatggtcttctggaaagaatggttggggggaggaagtcgatcagacaaaaaacagcaattgggaaagttctgcaagtaaacctgtgtctgggtggggtgaaggagggcagaatgaaatcgggacttggggtaatggtggcaatgcaagcctagcttcaaaaggtgggtgggaggattgcaaaagatccccagcatggaatgagacgggccgacagcccaattcctggaataaacaacaccaacagcagcagcccccacagcagccgccgccaccacaaccagaggcttctggttcgtggggaggcccacccccaccacctccaggcaacgttcgaccttccaattccagctggagcagcgggccacagcctgcaacacctaaggatgaggaacccagtggttgggaagagccatccccacagtcaattagtcggaaaatggacattgatgatggcacttcagcatggggagaccctaacagttataactacaagaatgtgaatctgtgggataagaattcccaagggggcccagcacctcgagaaccaaacctgcccaccccaatgaccagtaaatcggcatcagattccaaatctatgcaagacggctggggggagagtgacgggccagtcacaggagctcgccatcccagctgggaagaggaggaggatggaggagtctggaacaccactggctctcagggcagtgcttcctcccacaactcagcaagctggggacaaggaggaaagaaacaaatgaagtgctcactcaaaggaggaaacaatgattcatggatgaatcctcttgccaaacagttttcaaatatgggattgctgagtcagactgaagataatccaagcagcaaaatggatttgtctgtaggaagcctttcagataaaaaatttgatgtggacaagcgagcgatgaatctcggggattttaatgatatcatgaggaaggatcgatctgggttccgtccacctaattccaaagacatgggaaccacagatagtgggccttattttgagaagggcggtagtcatggtttgtttggaaacagcacagcacaatcgagaggtctgcacacacccgtgcagccactaaattcttctcccagtctccgggcgcaagtgcctccccagtttatttccccccaggtttctgcctcaatgctcaagcagtttcccaacagtggcctgagtccaggtcttttcaatgtggggccccagttatctcctcaacaaattgccatgctgagccagcttccacaaattccccagtttcagttggcatgtcagcttctcttgcagcagcagcaacagcagcagttgttacagaaccagagaaagatttctcaagctgtacgccaacagcaagagcagcagctggctcgaatggtgagtgcactgcagcagcagcagcagcagcagcagaggcagccaggcatgaagcactcgccctctcatcctgttgggcccaagccgcatctggacaacatggtacccaacgcattgaatgtggggctcccagaccttcaaaccaaagggccaatacctggatatggttctggcttcagctctggcggcatggactatggcatggttggtgggaaggaggctggaaccgagtctcgctttaaacagtggacctccatgatggaggggctgccctctgtagccacacaggaagccaatatgcacaaaaatggcgctatagtggcccctggtaaaacccggggagggtcaccgtacaaccagtttgatatcatccctggtgacacactgggtggccatacgggtcctgctggtgatagctggttacctgccaaatctccaccaacaaataaaatcggaagtaaatccagcaatgccagttggcctccagaattccaaccaggagtgccatggaaaggtatccaaaacattgaccctgaatctgacccctatgtcaccccaggaagtgtgctggggggtacagccacatctcccattgtagatactgaccaccaactgctgcgggataacaccacagggtctaattcttccctcaacacctcgctgccttcacctggtgcctggccctacagtgcctctgacaactcctttaccaacgttcatagcacttcagcaaagttccctgattacaaatcaacatggtccccagatcccataggacacaaccccactcatctctccaacaagatgtggaaaaaccatatttcctccaggaacactacaccgctgccccgcccacctcctggtctgaccaaccccaaaccatcatctccctggagcagcacagcaccccgatcagtcagggggtgggggacacaggactcacggctcgcctcggcctctacctggagtgatggtggctcagttcgtcctagttactggctggttcttcacaatctcaccccacagattgatgggtcaaccttgagaacgatctgcatgcagcatggcccactgctgacattccatctgaatctaacccagggcactgccctgatccgatacagcaccaaacaggaggcggccaaggcccaaactgcactgcacatgtgtgtgttgggaaacactaccatccttgctgagtttgccactgatgatgaagtcagccgctttctggcacaagctcagccccctacacctgcagcaaccccaagtgcgccagctgcggggtggcagtcgctggagaccggccagaaccagtcagatcccgtgggacctgctctgaatctttttggtgggtccactgggctcgggcagtggagcagcagcgctggtggcagcagcggggccgatcttgctggcgcttcattgtgggggcccccaaactattcttctagcttatggggagtcccaacggtggaagatccccataggatgggcagccctgctcctttactacctggtgaccttctgggaggagggtcggattcaatctgaacttagaactttcaactctgacctcgtgaccttttttggaacagcagcagcactaacttgaccttttcgttttttttttcaacttgcaataaatacatttttaaaaggaaaaaagaaaacggagagaaaaaaaggtgggtcattgacagactgtctgagcacatagttgcctcccttataacttcagttttttcgtttggaatatgaatccaaaaagagaacatatcactcttgaaatacttgaatcatgaacgccaacctagaaagacaatgtgaagcaagtacacataccatttaaatttaaacacaaaaaaattaaaaaaattagtttctagtttttcacttttttcatgttatatggaagttgttgctaagaaacatatatactgaaaaaaaatagctttttaactttgtttgcactgggtgtgtttccgtccttaggtctaccatgtttgggagggagggaaattcaaaagaattgttgggggaggggggagggaagacttgacggagcctcactttaaaaacaaaaacacaaaaaacctaaaa

SEQ ID NO: 74619 - DNA, 6066 bp, Homo sapiens
cccggcccgcggaggcgcgtccgcccctggctggcggtggcagagggaggcgtcaggcctcggatcctcgggtccctgcgcagcgtcccggcctgtgtgcaggacctgcgtgacaagggttgtggttttttgcactgaatgtaacctagactcatcttcacgggcttgtgttgccccaggtactgtcaaaggcagtatttttgtgtttctgcagagttttgcacaaaatctgttcccatgcaaaccaatgagggagaagtatcggaagaaagcagttccaaggtggaacaggaggattttgtaatggaagggcatggcaagactccacctcctggtgaagaaagcaaacaagagaaggagcaagaaagggaagaacagttaatggaagacaagaaaaggaagaaagaggataaaaagaaaaaagaagccactcagaaggtcacggaacaaaaaaccaaagtgcccgaagtgacgaaaccaagtttaagccaaccaacggccgccagcccaattggcagctctccatcgccaccagtcaatggtggcaacaatgccaaaagggtggcagtgccgaacggacaaccgccaagcgccgcccgctacatgcctcgggaggtgccgccgcgattccgttgccagcaggaccacaaagtgttactaaaacgtgggcagccccctccaccgtcctgcatgctccttgggggtggggcagggcctcctccctgcacagcacctggagcaaacccaaacaacgcacaagtgacaggagcgctgctgcagagtgagagtgggactgcgccagactcaacccttggaggtgctgctgcttcaaattatgcaaattccacttggggctcgggagcctcctccaacaacggcacctcccccaacccaattcacatctgggacaaggtgattgtagacgggtctgacatggaagagtggccttgtattgccagcaaagacactgaatcttcttccgaaaacaccaccgataacaacagtgcctcgaaccctggctctgagaagagcactctgccaggaagcaccactagtaacaaaggaaaagggagccagtgccagtctgcaagttctgggaacgaatgtaatcttggggtctggaaatctgaccctaaggctaaatctgttcaatcttccaactctactacagagaacaacaatggactaggaaattggaggaatgtgagtggtcaggatagaattggacctggctctggcttcagcaactttaacccaaatagcaacccatctgcctggccagcactggtccaagaaggaacttctaggaaaggggcattggaaacagataatagtaattccagtgcacaggttagcacagtaggtcagacatccagggaacagcagtcaaagatggaaaatgcgggtgttaattttgttgtctctggcagagaacaggctcaaattcataacactgatggaccaaaaaatggaaacactaactccttgaacttaagttcaccaaaccccatggagaataagggaatgccctttggaatgggcttggggaacacctccaggagcactgatgccccttcacaaagcactggagatcgaaagactgggagtgttggatcttggggtgcagctagggggccttctggaactgacacagtctctggacaaagcaattctggaaacaatgggaacaatggaaaagagagagaggactcctggaaaggagcttctgttcagaaatcaactgggtcaaaaaatgactcttgggacaacaataacaggtctacgggtgggtcctggaactttggcccccaggactctaatgacaacaaatggggtgaagggaacaaaatgacatctggggtctctcagggagaatggaaacagccgactgggtctgatgagttgaaaattggagaatggagtggtccaaaccaaccaaattctagcactggagcatgggacaatcaaaagggccaccccctccctgaaaaccaaggcaatgcccaggctccctgttggggaagatcttccagctccacaggaagtgaagttggaggtcaaagcactggaagcaaccacaaagcaggaagtagtgacagtcataactctggccgtcggtcgtacaggcccacacatcctgattgtcaggctgtcttgcagactcttttgagccgaactgatttggaccccagggtgctctcaaacactggctggggccaaactcaaattaagcaggacacagtgtgggacattgaagaggtgccaaggcctgaggggaaatctgacaaaggaactgaggggtgggagagcgctgccacacagaccaagaactcagggggctggggagatgcacccagccaaagcaatcaaatgaagtctggatggggggagctctcagcctctacagagtggaaagaccccaagaacacaggaggctggaatgactacaagaacaacaactcttccaactggggaggaggacgacctgatgaaaagacaccttcctcttggaatgagaatcccagcaaggatcaggggtggggaggtggacgccagcccaatcaaggatggtcttctggaaagaatggttggggggaggaagtcgatcagacaaaaaacagcaattgggaaagttctgcaagtaaacctgtgtctgggtggggtgaaggagggcagaatgaaatcgggacttggggtaatggtggcaatgcaagcctagcttcaaaaggtgggtgggaggattgcaaaagatccccagcatggaatgagacgggccgacagcccaattcctggaataaacaacaccaacagcagcagcccccacagcagccgccgccaccacaaccagaggcttctggttcgtggggaggcccacccccaccacctccaggcaacgttcgaccttccaattccagctggagcagcgggccacagcctgcaacacctaaggatgaggaacccagtggttgggaagagccatccccacagtcaattagtcggaaaatggacattgatgatggcacttcagcatggggagaccctaacagttataactacaagaatgtgaatctgtgggataagaattcccaagggggcccagcacctcgagaaccaaacctgcccaccccaatgaccagtaaatcggcatcagattccaaatctatgcaagacggctggggggagagtgacgggccagtcacaggagctcgccatcccagctgggaagaggaggaggatggaggagtctggaacaccactggctctcagggcagtgcttcctcccacaactcagcaagctggggacaaggaggaaagaaacaaatgaagtgctcactcaaaggaggaaacaatgattcatggatgaatcctcttgccaaacagttttcaaatatgggattgctgagtcagactgaagataatccaagcagcaaaatggatttgtctgtaggaagcctttcagataaaaaatttgatgtggacaagcgagcgatgaatctcggggattttaatgatatcatgaggaaggatcgatctgggttccgtccacctaattccaaagacatgggaaccacagatagtgggccttattttgagaagggcggtagtcatggtttgtttggaaacagcacagcacaatcgagaggtctgcacacacccgtgcagccactaaattcttctcccagtctccgggcgcaagtgcctccccagtttatttccccccaggtttctgcctcaatgctcaagcagtttcccaacagtggcctgagtccaggtcttttcaatgtggggccccagttatctcctcaacaaattgccatgctgagccagcttccacaaattccccagtttcagttggcatgtcagcttctcttgcagcagcagcaacagcagcagttgttacagaaccagagaaagatttctcaagctgtacgccaacagcaagagcagcagctggctcgaatggtgagtgcactgcagcagcagcagcagcagcagcagaggcagccaggcatgaagcactcgccctctcatcctgttgggcccaagccgcatctggacaacatggtacccaacgcattgaatgtggggctcccagaccttcaaaccaaagggccaatacctggatatggttctggcttcagctctggcggcatggactatggcatggttggtgggaaggaggctggaaccgagtctcgctttaaacagtggacctccatgatggaggggctgccctctgtagccacacaggaagccaatatgcacaaaaatggcgctatagtggcccctggtaaaacccggggagggtcaccgtacaaccagtttgatatcatccctggtgacacactgggtggccatacgggtcctgctggtgatagctggttacctgccaaatctccaccaacaaataaaatcggaagtaaatccagcaatgccagttggcctccagaattccaaccaggagtgccatggaaaggtatccaaaacattgaccctgaatctgacccctatgtcaccccaggaagtgtgctggggggtacagccacatctcccattgtagatactgaccaccaactgctgcgggataacaccacagggtctaattcttccctcaacacctcgctgccttcacctggtgcctggccctacagtgcctctgacaactcctttaccaacgttcatagcacttcagcaaagttccctgattacaaatcaacatggtccccagatcccataggacacaaccccactcatctctccaacaagatgtggaaaaaccatatttcctccaggaacactacaccgctgccccgcccacctcctggtctgaccaaccccaaaccatcatctccctggagcagcacagcaccccgatcagtcagggggtgggggacacaggactcacggctcgcctcggcctctacctggagtgatggtggctcagttcgtcctagttactggctggttcttcacaatctcaccccacagattgatgggtcaaccttgagaacgatctgcatgcagcatggcccactgctgacattccatctgaatctaacccagggcactgccctgatccgatacagcaccaaacaggaggcggccaaggcccaaactgcactgcacatgtgtgtgttgggaaacactaccatccttgctgagtttgccactgatgatgaagtcagccgctttctggcacaagctcagccccctacacctgcagcaaccccaagtgcgccagctgcggggtggcagtcgctggagaccggccagaaccagtcagatcccgtgggacctgctctgaatctttttggtgggtccactgggctcgggcagtggagcagcagcgctggtggcagcagcggggccgatcttgctggcgcttcattgtgggggcccccaaactattcttctagcttatggggagtcccaacggtggaagatccccataggatgggcagccctgctcctttactacctggtgaccttctgggaggagggtcggattcaatctgaacttagaactttcaactctgacctcgtgaccttttttggaacagcagcagcactaacttgaccttttcgttttttttttcaacttgcaataaatacatttttaaaaggaaaaaagaaaacggagagaaaaaaaggtgggtcattgacagactgtctgagcacatagttgcctcccttataacttcagttttttcgtttggaatatgaatccaaaaagagaacatatcactcttgaaatacttgaatcatgaacgccaacctagaaagacaatgtgaagcaagtacacataccatttaaatttaaacacaaaaaaattaaaaaaattagtttctagtttttcacttttttcatgttatatggaagttgttgctaagaaacatatatactgaaaaaaaatagctttttaactttgtttgcactgggtgtgtttccgtccttaggtctaccatgtttgggagggagggaaattcaaaagaattgttgggggaggggggagggaagacttgacggagcctcactttaaaaacaaaaacacaaaaaacctaaaa

SEQ ID NO: 74620 - DNA, 5954 bp, Homo sapiens
ttgtttattttgtttttagtttttggggtccccgtgctgctgcaaggcgaaacgggagggagtgacccctgcgcccctcagtcccccctacgacgtcgcctccatagtctgcggagaagcggagactgcgcgcctcgcctcacagcgaaacgccgcgcactcggagccggcacggctcggcgggttgtggttttttgcactgaatgtaacctagactcatcttcacgggcttgtgttgccccaggtactgtcaaaggcagtatttttgtgtttctgcagagttttgcacaaaatctgttcccatgcaaaccaatgagggagaagtatcggaagaaagcagttccaaggtggaacaggaggattttgtaatggaagggcatggcaagactccacctcctggtgaagaaagcaaacaagagaaggagcaagaaagggaagaacagttaatggaagacaagaaaaggaagaaagaggataaaaagaaaaaagaagccactcagaaggtcacggaacaaaaaaccaaagtgcccgaagtgacgaaaccaagtttaagccaaccaacggccgccagcccaattggcagctctccatcgccaccagtcaatggtggcaacaatgccaaaagggtggcagtgccgaacggacaaccgccaagcgccgcccgctacatgcctcgggaggtgccgccgcgattccgttgccagcaggaccacaaagtgttactaaaacgtgggcagccccctccaccgtcctgcatgctccttgggggtggggcagggcctcctccctgcacagcacctggagcaaacccaaacaacgcacaagtgacaggagcgctgctgcagagtgagagtgggactgcgccagactcaacccttggaggtgctgctgcttcaaattatgcaaattccacttggggctcgggagcctcctccaacaacggcacctcccccaacccaattcacatctgggacaaggtgattgtagacgggtctgacatggaagagtggccttgtattgccagcaaagacactgaatcttcttccgaaaacaccaccgataacaacagtgcctcgaaccctggctctgagaagagcactctgccaggaagcaccactagtaacaaaggaaaagggagccagtgccagtctgcaagttctgggaacgaatgtaatcttggggtctggaaatctgaccctaaggctaaatctgttcaatcttccaactctactacagagaacaacaatggactaggaaattggaggaatgtgagtggtcaggatagaattggacctggctctggcttcagcaactttaacccaaatagcaacccatctgcctggccagcactggtccaagaaggaacttctaggaaaggggcattggaaacagataatagtaattccagtgcacaggttagcacagtaggtcagacatccagggaacagcagtcaaagatggaaaatgcgggtgttaattttgttgtctctggcagagaacaggctcaaattcataacactgatggaccaaaaaatggaaacactaactccttgaacttaagttcaccaaaccccatggagaataagggaatgccctttggaatgggcttggggaacacctccaggagcactgatgccccttcacaaagcactggagatcgaaagactgggagtgttggatcttggggtgcagctagggggccttctggaactgacacagtctctggacaaagcaattctggaaacaatgggaacaatggaaaagagagagaggactcctggaaaggagcttctgttcagaaatcaactgggtcaaaaaatgactcttgggacaacaataacaggtctacgggtgggtcctggaactttggcccccaggactctaatgacaacaaatggggtgaagggaacaaaatgacatctggggtctctcagggagaatggaaacagccgactgggtctgatgagttgaaaattggagaatggagtggtccaaaccaaccaaattctagcactggagcatgggacaatcaaaagggccaccccctccctgaaaaccaaggcaatgcccaggctccctgttggggaagatcttccagctccacaggaagtgaagttggaggtcaaagcactggaagcaaccacaaagcaggaagtagtgacagtcataactctggccgtcggtcgtacaggcccacacatcctgattgtcaggctgtcttgcagactcttttgagccgaactgatttggaccccagggtgctctcaaacactggctggggccaaactcaaattaagcaggacacagtgtgggacattgaagaggtgccaaggcctgaggggaaatctgacaaaggaactgaggggtgggagagcgctgccacacagaccaagaactcagggggctggggagatgcacccagccaaagcaatcaaatgaagtctggatggggggagctctcagcctctacagagtggaaagaccccaagaacacaggaggctggaatgactacaagaacaacaactcttccaactggggaggaggacgacctgatgaaaagacaccttcctcttggaatgagaatcccagcaaggatcaggggtggggaggtggacgccagcccaatcaaggatggtcttctggaaagaatggttggggggaggaagtcgatcagacaaaaaacagcaattgggaaagttctgcaagtaaacctgtgtctgggtggggtgaaggagggcagaatgaaatcgggacttggggtaatggtggcaatgcaagcctagcttcaaaaggtgggtgggaggattgcaaaagatccccagcatggaatgagacgggccgacagcccaattcctggaataaacaacaccaacagcagcagcccccacagcagccgccgccaccacaaccagaggcttctggttcgtggggaggcccacccccaccacctccaggcaacgttcgaccttccaattccagctggagcagcgggccacagcctgcaacacctaaggatgaggaacccagtggttgggaagagccatccccacagtcaattagtcggaaaatggacattgatgatggcacttcagcatggggagaccctaacagttataactacaagaatgtgaatctgtgggataagaattcccaagggggcccagcacctcgagaaccaaacctgcccaccccaatgaccagtaaatcggcatcagattccaaatctatgcaagacggctggggggagagtgacgggccagtcacaggagctcgccatcccagctgggaagaggaggaggatggaggagtctggaacaccactggctctcagggcagtgcttcctcccacaactcagcaagctggggacaaggaggaaagaaacaaatgaagtgctcactcaaaggaggaaacaatgattcatggatgaatcctcttgccaaacagttttcaaatatgggattgctgagtcagactgaagataatccaagcagcaaaatggatttgtctgtaggaagcctttcagataaaaaatttgatgtggacaagcgagcgatgaatctcggggattttaatgatatcatgaggaaggatcgatctgggttccgtccacctaattccaaagacatgggaaccacagatagtgggccttattttgagaagggcggtagtcatggtttgtttggaaacagcacagcacaatcgagaggtctgcacacacccgtgcagccactaaattcttctcccagtctccgggcgcaagtgcctccccagtttatttccccccaggtttctgcctcaatgctcaagcagtttcccaacagtggcctgagtccaggtcttttcaatgtggggccccagttatctcctcaacaaattgccatgctgagccagcttccacaaattccccagtttcagttggcatgtcagcttctcttgcagcagcagcaacagcagcagttgttacagaaccagagaaagatttctcaagctgtacgccaacagcaagagcagcagctggctcgaatggtgagtgcactgcagcagcagcagcagcagcagcagaggcagccaggcatgaagcactcgccctctcatcctgttgggcccaagccgcatctggacaacatggtacccaacgcattgaatgtggggctcccagaccttcaaaccaaagggccaatacctggatatggttctggcttcagctctggcggcatggactatggcatggttggtgggaaggaggctggaaccgagtctcgctttaaacagtggacctccatgatggaggggctgccctctgtagccacacaggaagccaatatgcacaaaaatgaattccaaccaggagtgccatggaaaggtatccaaaacattgaccctgaatctgacccctatgtcaccccaggaagtgtgctggggggtacagccacatctcccattgtagatactgaccaccaactgctgcgggataacaccacagggtctaattcttccctcaacacctcgctgccttcacctggtgcctggccctacagtgcctctgacaactcctttaccaacgttcatagcacttcagcaaagttccctgattacaaatcaacatggtccccagatcccataggacacaaccccactcatctctccaacaagatgtggaaaaaccatatttcctccaggaacactacaccgctgccccgcccacctcctggtctgaccaaccccaaaccatcatctccctggagcagcacagcaccccgatcagtcagggggtgggggacacaggactcacggctcgcctcggcctctacctggagtgatggtggctcagttcgtcctagttactggctggttcttcacaatctcaccccacagattgatgggtcaaccttgagaacgatctgcatgcagcatggcccactgctgacattccatctgaatctaacccagggcactgccctgatccgatacagcaccaaacaggaggcggccaaggcccaaactgcactgcacatgtgtgtgttgggaaacactaccatccttgctgagtttgccactgatgatgaagtcagccgctttctggcacaagctcagccccctacacctgcagcaaccccaagtgcgccagctgcggggtggcagtcgctggagaccggccagaaccagtcagatcccgtgggacctgctctgaatctttttggtgggtccactgggctcgggcagtggagcagcagcgctggtggcagcagcggggccgatcttgctggcgcttcattgtgggggcccccaaactattcttctagcttatggggagtcccaacggtggaagatccccataggatgggcagccctgctcctttactacctggtgaccttctgggaggagggtcggattcaatctgaacttagaactttcaactctgacctcgtgaccttttttggaacagcagcagcactaacttgaccttttcgttttttttttcaacttgcaataaatacatttttaaaaggaaaaaagaaaacggagagaaaaaaaggtgggtcattgacagactgtctgagcacatagttgcctcccttataacttcagttttttcgtttggaatatgaatccaaaaagagaacatatcactcttgaaatacttgaatcatgaacgccaacctagaaagacaatgtgaagcaagtacacataccatttaaatttaaacacaaaaaaattaaaaaaattagtttctagtttttcacttttttcatgttatatggaagttgttgctaagaaacatatatactgaaaaaaaatagctttttaactttgtttgcactgggtgtgtttccgtccttaggtctaccatgtttgggagggagggaaattcaaaagaattgttgggggaggggggagggaagacttgacggagcctcactttaaaaacaaaaacacaaaaaacctaaaa

SEQ ID NO: 74621 - DNA, 2521 bp, Homo sapiens
ccttggagcaatcggcacagggctcaacccccaaaacttcgctgctagacaaggcggtagtcatggtttgtttggaaacagcacagcacaatcgagaggtctgcacacacccgtgcagccactaaattcttctcccagtctccgggcgcaagtgcctccccagtttatttccccccaggtttctgcctcaatgctcaagcagtttcccaacagtggcctgagtccaggtcttttcaatgtggggccccagttatctcctcaacaaattgccatgctgagccagcttccacaaattccccagtttcagttggcatgtcagcttctcttgcagcagcagcaacagcagcagttgttacagaaccagagaaagatttctcaagctgtacgccaacagcaagagcagcagctggctcgaatggtgagtgcactgcagcagcagcagcagcagcagcagaggcagccaggcatgaagcactcgccctctcatcctgttgggcccaagccgcatctggacaacatggtacccaacgcattgaatgtggggctcccagaccttcaaaccaaagggccaatacctggatatggttctggcttcagctctggcggcatggactatggcatggttggtgggaaggaggctggaaccgagtctcgctttaaacagtggacctccatgatggaggggctgccctctgtagccacacaggaagccaatatgcacaaaaatggcgctatagtggcccctggtaaaacccggggagggtcaccgtacaaccagtttgatatcatccctggtgacacactgggtggccatacgggtcctgctggtgatagctggttacctgccaaatctccaccaacaaataaaatcggaagtaaatccagcaatgccagttggcctccagaattccaaccaggagtgccatggaaaggtatccaaaacattgaccctgaatctgacccctatgtcaccccaggaagtgtgctggggggtacagccacatctcccattgtagatactgaccaccaactgctgcgggataacaccacagggtctaattcttccctcaacacctcgctgccttcacctggtgcctggccctacagtgcctctgacaactcctttaccaacgttcatagcacttcagcaaagttccctgattacaaatcaacatggtccccagatcccataggacacaaccccactcatctctccaacaagatgtggaaaaaccatatttcctccaggaacactacaccgctgccccgcccacctcctggtctgaccaaccccaaaccatcatctccctggagcagcacagcaccccgatcagtcagggggtgggggacacaggactcacggctcgcctcggcctctacctggagtgatggtggctcagttcgtcctagttactggctggttcttcacaatctcaccccacagattgatgggtcaaccttgagaacgatctgcatgcagcatggcccactgctgacattccatctgaatctaacccagggcactgccctgatccgatacagcaccaaacaggaggcggccaaggcccaaactgcactgcacatgtgtgtgttgggaaacactaccatccttgctgagtttgccactgatgatgaagtcagccgctttctggcacaagctcagccccctacacctgcagcaaccccaagtgcgccagctgcggggtggcagtcgctggagaccggccagaaccagtcagatcccgtgggacctgctctgaatctttttggtgggtccactgggctcgggcagtggagcagcagcgctggtggcagcagcggggccgatcttgctggcgcttcattgtgggggcccccaaactattcttctagcttatggggagtcccaacggtggaagatccccataggatgggcagccctgctcctttactacctggtgaccttctgggaggagggtcggattcaatctgaacttagaactttcaactctgacctcgtgaccttttttggaacagcagcagcactaacttgaccttttcgttttttttttcaacttgcaataaatacatttttaaaaggaaaaaagaaaacggagagaaaaaaaggtgggtcattgacagactgtctgagcacatagttgcctcccttataacttcagttttttcgtttggaatatgaatccaaaaagagaacatatcactcttgaaatacttgaatcatgaacgccaacctagaaagacaatgtgaagcaagtacacataccatttaaatttaaacacaaaaaaattaaaaaaattagtttctagtttttcacttttttcatgttatatggaagttgttgctaagaaacatatatactgaaaaaaaatagctttttaactttgtttgcactgggtgtgtttccgtccttaggtctaccatgtttgggagggagggaaattcaaaagaattgttgggggaggggggagggaagacttgacggagcctcactttaaaaacaaaaacacaaaaaacctaaaa

SEQ ID NO: 74622 - DNA, 2996 bp, Homo sapiens
tgctgcatctgcaaggaattattattctgatgattgttttatatagctgttgcaaagagttaattcattctttccttaaagattccaaatctatgcaagacggctggggggagagtgacgggccagtcacaggagctcgccatcccagctgggaagaggaggaggatggaggagtctggaacaccactggctctcagggcagtgcttcctcccacaactcagcaagctggggacaaggaggaaagaaacaaatgaagtgctcactcaaaggaggaaacaatgattcatggatgaatcctcttgccaaacagttttcaaatatgggattgctgagtcagactgaagataatccaagcagcaaaatggatttgtctgtaggaagcctttcagataaaaaatttgatgtggacaagcgagcgatgaatctcggggattttaatgatatcatgaggaaggatcgatctgggttccgtccacctaattccaaagacatgggaaccacagatagtgggccttattttgagaagggcggtagtcatggtttgtttggaaacagcacagcacaatcgagaggtctgcacacacccgtgcagccactaaattcttctcccagtctccgggcgcaagtgcctccccagtttatttccccccaggtttctgcctcaatgctcaagcagtttcccaacagtggcctgagtccaggtcttttcaatgtggggccccagttatctcctcaacaaattgccatgctgagccagcttccacaaattccccagtttcagttggcatgtcagcttctcttgcagcagcagcaacagcagcagttgttacagaaccagagaaagatttctcaagctgtacgccaacagcaagagcagcagctggctcgaatggtgagtgcactgcagcagcagcagcagcagcagcagaggcagccaggcatgaagcactcgccctctcatcctgttgggcccaagccgcatctggacaacatggtacccaacgcattgaatgtggggctcccagaccttcaaaccaaagggccaatacctggatatggttctggcttcagctctggcggcatggactatggcatggttggtgggaaggaggctggaaccgagtctcgctttaaacagtggacctccatgatggaggggctgccctctgtagccacacaggaagccaatatgcacaaaaatggcgctatagtggcccctggtaaaacccggggagggtcaccgtacaaccagtttgatatcatccctggtgacacactgggtggccatacgggtcctgctggtgatagctggttacctgccaaatctccaccaacaaataaaatcggaagtaaatccagcaatgccagttggcctccagaattccaaccaggagtgccatggaaaggtatccaaaacattgaccctgaatctgacccctatgtcaccccaggaagtgtgctggggggtacagccacatctcccattgtagatactgaccaccaactgctgcgggataacaccacagggtctaattcttccctcaacacctcgctgccttcacctggtgcctggccctacagtgcctctgacaactcctttaccaacgttcatagcacttcagcaaagttccctgattacaaatcaacatggtccccagatcccataggacacaaccccactcatctctccaacaagatgtggaaaaaccatatttcctccaggaacactacaccgctgccccgcccacctcctggtctgaccaaccccaaaccatcatctccctggagcagcacagcaccccgatcagtcagggggtgggggacacaggactcacggctcgcctcggcctctacctggagtgatggtggctcagttcgtcctagttactggctggttcttcacaatctcaccccacagattgatgggtcaaccttgagaacgatctgcatgcagcatggcccactgctgacattccatctgaatctaacccagggcactgccctgatccgatacagcaccaaacaggaggcggccaaggcccaaactgcactgcacatgtgtgtgttgggaaacactaccatccttgctgagtttgccactgatgatgaagtcagccgctttctggcacaagctcagccccctacacctgcagcaaccccaagtgcgccagctgcggggtggcagtcgctggagaccggccagaaccagtcagatcccgtgggacctgctctgaatctttttggtgggtccactgggctcgggcagtggagcagcagcgctggtggcagcagcggggccgatcttgctggcgcttcattgtgggggcccccaaactattcttctagcttatggggagtcccaacggtggaagatccccataggatgggcagccctgctcctttactacctggtgaccttctgggaggagggtcggattcaatctgaacttagaactttcaactctgacctcgtgaccttttttggaacagcagcagcactaacttgaccttttcgttttttttttcaacttgcaataaatacatttttaaaaggaaaaaagaaaacggagagaaaaaaaggtgggtcattgacagactgtctgagcacatagttgcctcccttataacttcagttttttcgtttggaatatgaatccaaaaagagaacatatcactcttgaaatacttgaatcatgaacgccaacctagaaagacaatgtgaagcaagtacacataccatttaaatttaaacacaaaaaaattaaaaaaattagtttctagtttttcacttttttcatgttatatggaagttgttgctaagaaacatatatactgaaaaaaaatagctttttaactttgtttgcactgggtgtgtttccgtccttaggtctaccatgtttgggagggagggaaattcaaaagaattgttgggggaggggggagggaagacttgacggagcctcactttaaaaacaaaaacacaaaaaacctaaaa

SEQ ID NO: 74623 - DNA, 5772 bp, Homo sapiens
ttgtttattttgtttttagtttttggggtccccgtgctgctgcaaggcgaaacgggagggagtgacccctgcgcccctcagtcccccctacgacgtcgcctccatagtctgcggagaagcggagactgcgcgcctcgcctcacagcgaaacgccgcgcactcggagccggcacggctcggcgggttgtggttttttgcactgaatgtaacctagactcatcttcacgggcttgtgttgccccaggtactgtcaaaggcagtatttttgtgtttctgcagagttttgcacaaaatctgttcccatgcaaaccaatgagggagaagtatcggaagaaagcagttccaaggtggaacaggaggattttgtaatggaagggcatggcaagactccacctcctggtgaagaaagcaaacaagagaaggagcaagaaagggaagaacagttaatggaagacaagaaaaggaagaaagaggataaaaagaaaaaagaagccactcagaaggtcacggaacaaaaaaccaaagtgcccgaagtgacgaaaccaagtttaagccaaccaacggccgccagcccaattggcagctctccatcgccaccagtcaatggtggcaacaatgccaaaagggtggcagtgccgaacggacaaccgccaagcgccgcccgctacatgcctcgggaggtgccgccgcgattccgttgccagcaggaccacaaagtgttactaaaacgtgggcagccccctccaccgtcctgcatgctccttgggggtggggcagggcctcctccctgcacagcacctggagcaaacccaaacaacgcacaagtgacaggagcgctgctgcagagtgagagtgggactgcgccagactcaacccttggaggtgctgctgcttcaaattatgcaaattccacttggggctcgggagcctcctccaacaacggcacctcccccaacccaattcacatctgggacaaggtgattgtagacgggtctgacatggaagagtggccttgtattgccagcaaagacactgaatcttcttccgaaaacaccaccgataacaacagtgcctcgaaccctggctctgagaagagcactctgccaggaagcaccactagtaacaaaggaaaagggagccagtgccagtctgcaagttctgggaacgaatgtaatcttggggtctggaaatctgaccctaaggctaaatctgttcaatcttccaactctactacagagaacaacaatggactaggaaattggaggaatgtgagtggtcaggatagaattggacctggctctggcttcagcaactttaacccaaatagcaacccatctgcctggccagcactggtccaagaaggaacttctaggaaaggggcattggaaacagataatagtaattccagtgcacaggttagcacagtaggtcagacatccagggaacagcagtcaaagatggaaaatgcgggtgttaattttgttgtctctggcagagaacaggctcaaattcataacactgatggaccaaaaaatggaaacactaactccttgaacttaagttcaccaaaccccatggagaataagggaatgccctttggaatgggcttggggaacacctccaggagcactgatgccccttcacaaagcactggagatcgaaagactgggagtgttggatcttggggtgcagctagggggccttctggaactgacacagtctctggacaaagcaattctggaaacaatgggaacaatggaaaagagagagaggactcctggaaaggagcttctgttcagaaatcaactgggtcaaaaaatgactcttgggacaacaataacaggtctacgggtgggtcctggaactttggcccccaggactctaatgacaacaaatggggtgaagggaacaaaatgacatctggggtctctcagggagaatggaaacagccgactgggtctgatgagttgaaaattggagaatggagtggtccaaaccaaccaaattctagcactggagcatgggacaatcaaaagggccaccccctccctgaaaaccaaggcaatgcccaggctccctgttggggaagatcttccagctccacaggaagtgaagttggaggtcaaagcactggaagcaaccacaaagcaggaagtagtgacagtcataactctggccgtcggtcgtacaggcccacacatcctgattgtcaggctgtcttgcagactcttttgagccgaactgatttggaccccagggtgctctcaaacactggctggggccaaactcaaattaagcaggacacagtgtgggacattgaagaggtgccaaggcctgaggggaaatctgacaaaggaactgaggggtgggagagcgctgccacacagaccaagaactcagggggctggggagatgcacccagccaaagcaatcaaatgaagtctggatggggggagctctcagcctctacagagtggaaagaccccaagaacacaggaggctggaatgactacaagaacaacaactcttccaactggggaggaggacgacctgatgaaaagacaccttcctcttggaatgagaatcccagcaaggatcaggggtggggaggtggacgccagcccaatcaaggatggtcttctggaaagaatggttggggggaggaagtcgatcagacaaaaaacagcaattgggaaagttctgcaagtaaacctgtgtctgggtggggtgaaggagggcagaatgaaatcgggacttggggtaatggtggcaatgcaagcctagcttcaaaaggtgggtgggaggattgcaaaagatccccagcatggaatgagacgggccgacagcccaattcctggaataaacaacaccaacagcagcagcccccacagcagccgccgccaccacaaccagaggcttctggttcgtggggaggcccacccccaccacctccaggcaacgttcgaccttccaattccagctggagcagcgggccacagcctgcaacacctaaggatgaggaacccagtggttgggaagagccatccccacagtcaattagtcggaaaatggacattgatgatggcacttcagcatggggagaccctaacagttataactacaagaatgtgaatctgtgggataagaattcccaagggggcccagcacctcgagaaccaaacctgcccaccccaatgaccagtaaatcggcatcagattccaaatctatgcaagacggctggggggagagtgacgggccagtcacaggagctcgccatcccagctgggaagaggaggaggatggaggagtctggaacaccactggctctcagggcagtgcttcctcccacaactcagcaagctggggacaaggaggaaagaaacaaatgaagtgctcactcaaaggaggaaacaatgattcatggatgaatcctcttgccaaacagttttcaaatatgggattgctgagtcagactgaagataatccaagcagcaaaatggatttgtctgtaggaagcctttcagataaaaaatttgatgtggacaagcgagcgatgaatctcggggattttaatgatatcatgaggaaggatcgatctgggttccgtccacctaattccaaagacatgggaaccacagatagtgggccttattttgagaagggcggtagtcatggtttgtttggaaacagcacagcacaatcgagaggtctgcacacacccgtgcagccactaaattcttctcccagtctccgggcgcaagtgcctccccagtttatttccccccaggtttctgcctcaatgctcaagcagtttcccaacagtggcctgagtccaggtcttttcaatgtggggccccagttatctcctcaacaaattgccatgctgagccagcttccacaaattccccagtttcagttggcatgtcagcttctcttgcagcagcagcaacagcagcagttgttacagaaccagagaaagatttctcaagctgtacgccaacagcaagagcagcagctggctcgaatggtgagtgcactgcagcagcagcagcagcagcagcagaggcagccaggcatgaagcactcgccctctcatcctgttgggcccaagccgcatctggacaacatggtacccaacgcattgaatgtggggctcccagaccttcaaaccaaagggccaatacctggatatggttctggcttcagctctggcggcatggactatggcatggttgctggggggtacagccacatctcccattgtagatactgaccaccaactgctgcgggataacaccacagggtctaattcttccctcaacacctcgctgccttcacctggtgcctggccctacagtgcctctgacaactcctttaccaacgttcatagcacttcagcaaagttccctgattacaaatcaacatggtccccagatcccataggacacaaccccactcatctctccaacaagatgtggaaaaaccatatttcctccaggaacactacaccgctgccccgcccacctcctggtctgaccaaccccaaaccatcatctccctggagcagcacagcaccccgatcagtcagggggtgggggacacaggactcacggctcgcctcggcctctacctggagtgatggtggctcagttcgtcctagttactggctggttcttcacaatctcaccccacagattgatgggtcaaccttgagaacgatctgcatgcagcatggcccactgctgacattccatctgaatctaacccagggcactgccctgatccgatacagcaccaaacaggaggcggccaaggcccaaactgcactgcacatgtgtgtgttgggaaacactaccatccttgctgagtttgccactgatgatgaagtcagccgctttctggcacaagctcagccccctacacctgcagcaaccccaagtgcgccagctgcggggtggcagtcgctggagaccggccagaaccagtcagatcccgtgggacctgctctgaatctttttggtgggtccactgggctcgggcagtggagcagcagcgctggtggcagcagcggggccgatcttgctggcgcttcattgtgggggcccccaaactattcttctagcttatggggagtcccaacggtggaagatccccataggatgggcagccctgctcctttactacctggtgaccttctgggaggagggtcggattcaatctgaacttagaactttcaactctgacctcgtgaccttttttggaacagcagcagcactaacttgaccttttcgttttttttttcaacttgcaataaatacatttttaaaaggaaaaaagaaaacggagagaaaaaaaggtgggtcattgacagactgtctgagcacatagttgcctcccttataacttcagttttttcgtttggaatatgaatccaaaaagagaacatatcactcttgaaatacttgaatcatgaacgccaacctagaaagacaatgtgaagcaagtacacataccatttaaatttaaacacaaaaaaattaaaaaaattagtttctagtttttcacttttttcatgttatatggaagttgttgctaagaaacatatatactgaaaaaaaatagctttttaactttgtttgcactgggtgtgtttccgtccttaggtctaccatgtttgggagggagggaaattcaaaagaattgttgggggaggggggagggaagacttgacggagcctcactttaaaaacaaaaacacaaaaaacctaaaa

SEQ ID NO: 74624 - DNA, 1427 bp, Homo sapiens
  misc_feature (6)..(6): n is a, c, g, or t
aagttngaaggtgcagtcaccaatagtggagtagggaagagacttgcacttcagcaaagttccctgattacaaatcaacatggtccccagatcccataggacacaaccccactcatctctccaacaagatgtggaaaaaccatatttcctccaggaacactacaccgctgccccgcccacctcctggtctgaccaaccccaaaccatcatctccctggagcagcacagcaccccgatcagtcagggggtgggggacacaggactcacggctcgcctcggcctctacctggagtgatggtggctcagttcgtcctagttactggctggttcttcacaatctcaccccacagattgatgggtcaaccttgagaacgatctgcatgcagcatggcccactgctgacattccatctgaatctaacccagggcactgccctgatccgatacagcaccaaacaggaggcggccaaggcccaaactgcactgcacatgtgtgtgttgggaaacactaccatccttgctgagtttgccactgatgatgaagtcagccgctttctggcacaagctcagccccctacacctgcagcaaccccaagtgcgccagctgcggggtggcagtcgctggagaccggccagaaccagtcagatcccgtgggacctgctctgaatctttttggtgggtccactgggctcgggcagtggagcagcagcgctggtggcagcagcggggccgatcttgctggcgcttcattgtgggggcccccaaactattcttctagcttatggggagtcccaacggtggaagatccccataggatgggcagccctgctcctttactacctggtgaccttctgggaggagggtcggattcaatctgaacttagaactttcaactctgacctcgtgaccttttttggaacagcagcagcactaacttgaccttttcgttttttttttcaacttgcaataaatacatttttaaaaggaaaaaagaaaacggagagaaaaaaaggtgggtcattgacagactgtctgagcacatagttgcctcccttataacttcagttttttcgtttggaatatgaatccaaaaagagaacatatcactcttgaaatacttgaatcatgaacgccaacctagaaagacaatgtgaagcaagtacacataccatttaaatttaaacacaaaaaaattaaaaaaattagtttctagtttttcacttttttcatgttatatggaagttgttgctaagaaacatatatactgaaaaaaaatagctttttaactttgtttgcactgggtgtgtttccgtccttaggtctaccatgtttgggagggagggaaattcaaaagaattgttgggggaggggggagggaagacttgacggagcctcactttaaaaacaaaaacacaaaaaacctaaaa

SEQ ID NO: 74625 - DNA, 5691 bp, Homo sapiens
ttgtttattttgtttttagtttttggggtccccgtgctgctgcaaggcgaaacgggagggagtgacccctgcgcccctcagtcccccctacgacgtcgcctccatagtctgcggagaagcggagactgcgcgcctcgcctcacagcgaaacgccgcgcactcggagccggcacggctcggcgggttgtggttttttgcactgaatgtaacctagactcatcttcacgggcttgtgttgccccaggtactgtcaaaggcagtatttttgtgtttctgcagagttttgcacaaaatctgttcccatgcaaaccaatgagggagaagtatcggaagaaagcagttccaaggtggaacaggaggattttgtaatggaagggcatggcaagactccacctcctggtgaagaaagcaaacaagagaaggagcaagaaagggaagaacagttaatggaagacaagaaaaggaagaaagaggataaaaagaaaaaagaagccactcagaaggtcacggaacaaaaaaccaaagtgcccgaagtgacgaaaccaagtttaagccaaccaacggccgccagcccaattggcagctctccatcgccaccagtcaatggtggcaacaatgccaaaagggtggcagtgccgaacggacaaccgccaagcgccgcccgctacatgcctcgggaggtgccgccgcgattccgttgccagcaggaccacaaagtgttactaaaacgtgggcagccccctccaccgtcctgcatgctccttgggggtggggcagggcctcctccctgcacagcacctggagcaaacccaaacaacgcacaagtgacaggagcgctgctgcagagtgagagtgggactgcgccagactcaacccttggaggtgctgctgcttcaaattatgcaaattccacttggggctcgggagcctcctccaacaacggcacctcccccaacccaattcacatctgggacaaggtgattgtagacgggtctgacatggaagagtggccttgtattgccagcaaagacactgaatcttcttccgaaaacaccaccgataacaacagtgcctcgaaccctggctctgagaagagcactctgccaggaagcaccactagtaacaaaggaaaagggagccagtgccagtctgcaagttctgggaacgaatgtaatcttggggtctggaaatctgaccctaaggctaaatctgttcaatcttccaactctactacagagaacaacaatggactaggaaattggaggaatgtgagtggtcaggatagaattggacctggctctggcttcagcaactttaacccaaatagcaacccatctgcctggccagcactggtccaagaaggaacttctaggaaaggggcattggaaacagataatagtaattccagtgcacaggttagcacagtaggtcagacatccagggaacagcagtcaaagatggaaaatgcgggtgttaattttgttgtctctggcagagaacaggctcaaattcataacactgatggaccaaaaaatggaaacactaactccttgaacttaagttcaccaaaccccatggagaataagggaatgccctttggaatgggcttggggaacacctccaggagcactgatgccccttcacaaagcactggagatcgaaagactgggagtgttggatcttggggtgcagctagggggccttctggaactgacacagtctctggacaaagcaattctggaaacaatgggaacaatggaaaagagagagaggactcctggaaaggagcttctgttcagaaatcaactgggtcaaaaaatgactcttgggacaacaataacaggtctacgggtgggtcctggaactttggcccccaggactctaatgacaacaaatggggtgaagggaacaaaatgacatctggggtctctcagggagaatggaaacagccgactgggtctgatgagttgaaaattggagaatggagtggtccaaaccaaccaaattctagcactggagcatgggacaatcaaaagggccaccccctccctgaaaaccaaggcaatgcccaggctccctgttggggaagatcttccagctccacaggaagtgaagttggaggtcaaagcactggaagcaaccacaaagcaggaagtagtgacagtcataactctggccgtcggtcgtacaggcccacacatcctgattgtcaggctgtcttgcagactcttttgagccgaactgatttggaccccagggtgctctcaaacactggctggggccaaactcaaattaagcaggacacagtgtgggacattgaagaggtgccaaggcctgaggggaaatctgacaaaggaactgaggggtgggagagcgctgccacacagaccaagaactcagggggctggggagatgcacccagccaaagcaatcaaatgaagtctggatggggggagctctcagcctctacagagtggaaagaccccaagaacacaggaggctggaatgactacaagaacaacaactcttccaactggggaggaggacgacctgatgaaaagacaccttcctcttggaatgagaatcccagcaaggatcaggggtggggaggtggacgccagcccaatcaaggatggtcttctggaaagaatggttggggggaggaagtcgatcagacaaaaaacagcaattgggaaagttctgcaagtaaacctgtgtctgggtggggtgaaggagggcagaatgaaatcgggacttggggtaatggtggcaatgcaagcctagcttcaaaaggtgggtgggaggattgcaaaagatccccagcatggaatgagacgggccgacagcccaattcctggaataaacaacaccaacagcagcagcccccacagcagccgccgccaccacaaccagaggcttctggttcgtggggaggcccacccccaccacctccaggcaacgttcgaccttccaattccagctggagcagcgggccacagcctgcaacacctaaggatgaggaacccagtggttgggaagagccatccccacagtcaattagtcggaaaatggacattgatgatggcacttcagcatggggagaccctaacagttataactacaagaatgtgaatctgtgggataagaattcccaagggggcccagcacctcgagaaccaaacctgcccaccccaatgaccagtaaatcggcatcagattccaaatctatgcaagacggctggggggagagtgacgggccagtcacaggagctcgccatcccagctgggaagaggaggaggatggaggagtctggaacaccactggctctcagggcagtgcttcctcccacaactcagcaagctggggacaaggaggaaagaaacaaatgaagtgctcactcaaaggaggaaacaatgattcatggatgaatcctcttgccaaacagttttcaaatatgggattgctgagtcagactgaagataatccaagcagcaaaatggatttgtctgtaggaagcctttcagataaaaaatttgatgtggacaagcgagcgatgaatctcggggattttaatgatatcatgaggaaggatcgatctgggttccgtccacctaattccaaagacatgggaaccacagatagtgggccttattttgagaagggcggtagtcatggtttgtttggaaacagcacagcacaatcgagaggtctgcacacacccgtgcagccactaaattcttctcccagtctccgggcgcaagtgcctccccagtttatttccccccaggtttctgcctcaatgctcaagcagtttcccaacagtggcctgagtccaggtcttttcaatgtggggccccagttatctcctcaacaaattgccatgctgagccagcttccacaaattccccagtttcagttggcatgtcagcttctcttgcagcagcagcaacagcagcagttgttacagaaccagagaaagatttctcaagctgtacgccaacagcaagagcagcagctggctcgaatggtgagtgcactgcagcagcagcagcagcagcagcagaggcagccaggcatgaagcactcgccctctcatcctgttgggcccaagccgcatctggacaacatggtacccaacgcattgaatgtggggctcccagaccttcaaaccaaagggccaatacctggatatggttctggcttcagctctggcggcatggactatggcatggttggtgggaaggaggctggaaccgagtctcgctttaaacagtggacctccatgatggaggggctgccctctgtagccacacaggaagccaatatgcacaaaaatggcgctatagtggcccctggtaaaacccggggagggtcaccgtacaaccagtttgatatcatccctggtgacacactgggtggccatacgggtcctgctggtgatagctggttacctgccaaatctccaccaacaaataaaatcggaagtaaatccagcaatgccagttggcctccagaattccaaccaggagtgccatggaaaggtatccaaaacattgaccctgaatctgacccctatgtcaccccaggaagtgtgctggggggtacagccacatctcccattgtagatactgaccaccaactgctgcgggataacaccacagggtctaattcttccctcaacacctcgctgccttcacctggtgcctggccctacagtgcctctgacaactcctttaccaacgttcatagcacttcagcaaagttccctgattacaaatcaacatggtccccagatcccataggacacaaccccactcatctctccaacaagatgtggaaaaaccatatttcctccaggaacactacaccgctgccccgcccacctcctggtctgaccaaccccaaaccatcatctccctggagcagcacagcaccccgatcagtcagggggtgggggacacaggactcacggctcgcctcggcctctacctggagtgatggtggctcagttcgtcctagttactggctggttcttcacaatctcaccccacagattgatgggtcaaccttgagaacgatctgcatgcagcatggcccactgctgacattccatctgaatctaacccagggcactgccctgatccgatacagcaccaaacaggaggcggccaaggcccaaactgcactgcacatgtgtgtgttgggaaacactaccatccttgctgagtttgccactgatgatgaagtcagccgctttctggcacaagctcagccccctacacctgcagcaaccccaagtgcgccagctgcggggtggcagtcgctggagaccggccagaaccagtcagatcccgtgggacctgctctgaatctttttggtgggtccactgggctcgggcagtggagcagcagcgctggtggcagcagcggggccgatcttgctggcgcttcattgtgggggcccccaaactattcttctagcttatggggagtcccaacggtggaagatccccataggatgggcagccctgctcctttactacctggtgaccttctgggaggagggtcggattcaatctgaacttagaactttcaactctgacctcgtgaccttttttggaacagcagcagcactaacttgaccttttcgttttttttttcaacttgcaataaatacatttttaaaagga

SEQ ID NO: 74626 - DNA, 3257 bp, Homo sapiens
ttgtttattttgtttttagtttttggggtccccgtgctgctgcaaggcgaaacgggagggagtgacccctgcgcccctcagtcccccctacgacgtcgcctccatagtctgcggagaagcggagactgcgcgcctcgcctcacagcgaaacgccgcgcactcggagccggcacggctcggcgggttgtggttttttgcactgaatgtaacctagactcatcttcacgggcttgtgttgccccaggtactgtcaaaggcagtatttttgtgtttctgcagagttttgcacaaaatctgttcccatgcaaaccaatgagggagaagtatcggaagaaagcagttccaaggtggaacaggaggattttgtaatggaagggcatggcaagactccacctcctggtgaagaaagcaaacaagagaaggagcaagaaagggaagaacagttaatggaagacaagaaaaggaagaaagaggataaaaagaaaaaagaagccactcagaaggtcacggaacaaaaaaccaaagtgcccgaagtgacgaaaccaagtttaagccaaccaacggccgccagcccaattggcagctctccatcgccaccagtcaatggtggcaacaatgccaaaagggtggcagtgccgaacggacaaccgccaagcgccgcccgctacatgcctcgggaggtgccgccgcgattccgttgccagcaggaccacaaagtgttactaaaacgtgggcagccccctccaccgtcctgcatgctccttgggggtggggcagggcctcctccctgcacagcacctggagcaaacccaaacaacgcacaagtgacaggagcgctgctgcagagtgagagtgggactgcgccagactcaacccttggaggtgctgctgcttcaaattatgcaaattccacttggggctcgggagcctcctccaacaacggcacctcccccaacccaattcacatctgggacaaggtgattgtagacgggtctgacatggaagagtggccttgtattgccagcaaagacactgaatcttcttccgaaaacaccaccgataacaacagtgcctcgaaccctggctctgagaagagcactctgccaggaagcaccactagtaacaaaggaaaagggagccagtgccagtctgcaagttctgggaacgaatgtaatcttggggtctggaaatctgaccctaaggctaaatctgttcaatcttccaactctactacagagaacaacaatggactaggaaattggaggaatgtgagtggtcaggatagaattggacctggctctggcttcagcaactttaacccaaatagcaacccatctgcctggccagcactggtccaagaaggaacttctaggaaaggggcattggaaacagataatagtaattccagtgcacaggttagcacagtaggtcagacatccagggaacagcagtcaaagatggaaaatgcgggtgttaattttgttgtctctggcagagaacaggctcaaattcataacactgatggaccaaaaaatggaaacactaactccttgaacttaagttcaccaaaccccatggagaataagggaatgccctttggaatgggcttggggaacacctccaggagcactgatgccccttcacaaagcactggagatcgaaagactgggagtgttggatcttggggtgcagctagggggccttctggaactgacacagtctctggacaaagcaattctggaaacaatgggaacaatggaaaagagagagaggactcctggaaaggagcttctgttcagaaatcaactgggtcaaaaaatgactcttgggacaacaataacaggtctacgggtgggtcctggaactttggcccccaggactctaatgacaacaaatggggtgaagggaacaaaatgacatctggggtctctcagggagaatggaaacagccgactgggtctgatgagttgaaaattggagaatggagtggtccaaaccaaccaaattctagcactggagcatgggacaatcaaaagggccaccccctccctgaaaaccaaggcaatgcccaggctccctgttggggaagatcttccagctccacaggaagtgaagttggaggtcaaagcactggaagcaaccacaaagcaggaagtagtgacagtcataactctggccgtcggtcgtacaggcccacacatcctgattgtcaggctgtcttgcagactcttttgagccgaactgatttggaccccagggtgctctcaaacactggctggggccaaactcaaattaagcaggacacagtgtgggacattgaagaggtgccaaggcctgaggggaaatctgacaaaggaactgaggggtgggagagcgctgccacacagaccaagaactcagggggctggggagatgcacccagccaaagcaatcaaatgaagtctggatggggggagctctcagcctctacagagtggaaagaccccaagaacacaggaggctggaatgactacaagaacaacaactcttccaactggggaggaggacgacctgatgaaaagacaccttcctcttggaatgagaatcccagcaaggatcaggggtggggaggtggacgccagcccaatcaaggatggtcttctggaaagaatggttggggggaggaagtcgatcagacaaaaaacagcaattgggaaagttctgcaagtaaacctgtgtctgggtggggtgaaggagggcagaatgaaatcgggacttggggtaatggtggcaatgcaagcctagcttcaaaaggtgggtgggaggattgcaaaagatccccagcatggaatgagacgggccgacagcccaattcctggaataaacaacaccaacagcagcagcccccacagcagccgccgccaccacaaccagaggcttctggttcgtggggaggcccacccccaccacctccaggcaacgttcgaccttccaattccagctggagcagcgggccacagcctgcaacacctaaggatgaggaacccagtggttgggaagagccatccccacagtcaattagtcggaaaatggacattgatgatggcacttcagcatggggagaccctaacagttataactacaagaatgtgaatctgtgggataagaattcccaagggggcccagcacctcgagaaccaaacctgcccaccccaatgaccagtaaatcggcatcagtctggagcaaaagcacaccacctgctccagataatggtact

SEQ ID NO: 74627 - DNA, 435 bp, Homo sapiens
gcagtatttttgtgtttctgcagagttttgcacaaaatctgttcccatgcaaaccaatgagggagaagtatcggaagaaagcagttccaaggtcagtaaattactgaaaggtacagtttgggtagaaattgaacagtagaggctgtggatgagtagaatgggtatttcattttacatgactgtaaaaattcgattgagttaaattagaacctaacataagattgagaaatattttttcttttcagtatactttttaatcctatatgctaatttaaaacaattttactgaactacagagaactttataatttatttttagaacactaatactatgtcttttaaagtttgttacgaaagttactataggcttataaaaaatcagaagtatataaagtcaggagtcaaagctggtcccctgttcctgctgcacagagg

SEQ ID NO: 74628 - DNA, 427 bp, Homo sapiens
tatggagtgtgcttaagggttgtcagctcaactggaggaaaatgtaaccaagagaccgggaatttggtgttacttccctcctggatacttttgattgtgtgacctgtacttcagtgcacagaccctttaggtgtcctcagtaaatcaatctcaggaaactttggttttctgtctttcccccttgttttgtaggcatgtcagcttctcttgcagcagcagcaacagcagcagttgttacagaaccagagaaagatttctcaagctgtacgccaacagcaagagcagcaggtacgtgggtaggcagggtccctccagtgctgtgttggaggagtacatcccggcttagcctctgatggcaaagaaccgggcacagtcttttcctgggaagttcggggccgtgcttatcacgtgtctgtctctcttggcc

SEQ ID NO: 74629 - DNA, 356 bp, Homo sapiens
ccaaggtgggagagtcccttgagcccgagttcaagaccagcatgggcaacatggcaagaccccatctctaaataaaataataaaattatttttaaaatttttagaaaaaatgtatttgatgtatttcaaagactgtttcccaacccctctcttttagtgcccgaagtgacgaaaccaagtttaagccaaccaacggccgccagcccaattggcagctctccatcgccaccagtcaatggtggcaacaatgccaaaagggtggcagtgccgaacggacaaccgccaagcgccgcccgctacatgcctcgggaggtgccgccgcgattccgttgccagcaggaccacaaagtgttact

SEQ ID NO: 74630 - DNA, 337 bp, Homo sapiens
gatgtttaacatataaataagttaaaaataatgcccaaaatagaagcctgttttgagggaggggatgacagagtgagactccgtctcaaaaaaaaaaaaaaaagaaagaaaataatacaatcatttatggctttttgtgttttatttatgtttttatttattagtttttagagtctcgctctgtcgccaggcttgagtgcagtggtgcaatctggctcactgtaacctccacctcctgggttcaaacgattctcctgcctcagcctcctgagtagctgggactacaggtgcacgccactacgcccagctaatttttgtattttttttttagtagaga

SEQ ID NO: 74631 - DNA, 415 bp, Homo sapiens
gaataagaggaacagtttttattactattggataggtgctgcctgaagctttaagacagagaatgtacatttatgcagctgcagtcagagcctgtgtgaggtttactgtaaactcactggcaataaggctcttaacgacattttgatgcccatgaagcttggtgcctagtttaaaactaatgaaaacacctaaactctccaggtggacaaagccatattcaggagaaattgagaaggagttggtgcaggcagccaatcacaatccacttacgccacaaactaaatctcaaactgcggtttgaacatgaggctcaaaacataagaagtaaagaaatgggcaaaattcaattagtttctggtgaaacgtcctaaatccaaaagaaaggtgaccagaaatagagaaaacggagtgtga

SEQ ID NO: 74632 - DNA, 257 bp, Homo sapiens
agaaagtggcaacacagggcagtagcattttttaaagaaaagtttgaaatttgaaagaaaaataggataagtgaagcgtaaaagcagagccaaaggaactgaaggaaaagttgcagtatcaactctactggaccggagccctccgtacctttcaaattgcccttcttgaaacaaatgcttacacctatgaataaatatttgtttacttgctttaatctccaattgtgcagccaatagaacctgactgagctctcccc

SEQ ID NO: 74633 - DNA, 4202 bp, Homo sapiens
  misc_feature (3)..(3): n is a, c, g, or t
  misc_feature (14)..(14): n is a, c, g, or t
  misc_feature (23)..(23): n is a, c, g, or t
cgnccgggacagantggcgggcnggcgggcactgacgccgcggggccggagcgggccgcgcggtgggagcagcggcgccgtcggtccccgtcagggctccgtgggtccccgacccgcccctggccgggccatggcgggcgcccagcccggcgtccacgcgctgcagttggagccgcccaccgtggtggagaccctgcggcgcgggagtaagttcatcaaatgggacgaggagacctccagtcggaacctggtgaccctgcgtgtggaccccaatggcttcttcttgtactggacgggccccaacatggaggtggacacactggacatcagttccatcagggacacacggacaggccggtacgcccgcctgcccaaggaccccaagatccgggaagttctgggctttgggggtcccgatgcccggctggaggagaagctgatgacggtggtgtctgggccagacccggtgaacacagtgttcttgaacttcatggccgtgcaggatgacacagccaaggtctggtctgaggagctattcaagctggctatgaacatcctggctcagaacgcctcccggaacaccttcctgcgcaaagcatacacgaagctgaagctgcaggtgaaccaggatggtcggatccccgtcaagaacatcctgaagatgttctcagcagacaagaagcgggtggagactgcgctggaatcctgtggcctcaaattcaaccggagtgagtccatccggcctgatgagttttccttggaaatctttgagcggttcctgaacaagctgtgtctgcggccggacattgacaagatcctgctggagataggcgccaagggcaagccatacctgacgctggagcagctcatggacttcatcaaccagaagcaacgcgacccgagactcaacgaagtgctgtacccgcccctgcggccctcccaggcccggctgctcatcgaaaagtatgagcccaaccagcagtttctggagcgagaccagatgtccatggagggctttagccgctacctgggaggcgaggagaatggcatcctgcccctggaagccctggatctgagcacggacatgacccagccactgagtgcctacttcatcaactcctcgcataacacctatctcactgcggggcagctggctgggacctcgtcggtggagatgtaccgccaggcactactatggggctgccgctgcgtggagctggacgtgtggaagggacggccgcctgaggaggaacccttcattacccacggcttcaccatgaccacagaggtgcctctgcgcgacgtgctggaggccattgccgagactgccttcaagacctcgccctaccccgtcatcctctccttcgagaaccatgtggactcggcaaagcaacaggcaaagatggctgagtactgccgctccatctttggagacgcgctactcatcgagcctctggacaagtacccgctggccccaggcgttcccctgcccagcccccaggacctgatgggccgtatcctggtgaagaacaagaagcggcaccgacccagcgcaggtggcccagacagcgccgggcgcaagcggcccctggagcagagcaattctgccctgagcgagagctccgcggccaccgagccctcctccccgcagctggggtctcccagctctgacagctgcccaggcctgagcaatggggaggaggtagggcttgagaagcccagcctggagcctcagaagtctctgggtgacgagggcctgaaccgaggcccctatgttcttggacctgctgaccgtgaggatgaggaggaagatgaggaagaggaggaacagacagaccccaaaaagccaactacagatgagggcacagccagcagcgaggtgaatgccactgaggagatgtccacgcttgtcaactacatcgaacctgtcaagttcaagtcctttgaggctgctcgaaagaggaacaaatgcttcgagatgtcgtcctttgtggagaccaaggccatggagcaactgaccaagagccccatggagtttgtggaatacaacaagcagcagctcagccgcatctaccccaagggcacccgcgtggactcctccaactacatgccccagctcttctggaacgtagggtgccagcttgttgcgctcaacttccagaccctcgatgtggcgatgcagctcaacgcgggcgtttttgagtacaacgggcgcagcgggtacctgctcaagccggagttcatgcggcggccggacaagtccttcgaccccttcactgaggtcatcgtggatggcatcgtggccaatgccttgcgggtcaaggtgatctcagggcagttcctgtccgacaggaaggtgggcatctacgtggaggtggacatgtttggcctccctgttgatacgcggcgcaagtaccgcacccggacctctcaggggaactcgttcaaccccgtgtgggacgaagagcccttcgacttccccaaggtggtgctgcccacgctggcttcacttcgcattgcagcctttgaggaggggggtaaattcgtagggcaccggatcctgcctgtctctgccatccgctccggataccactacgtctgcctgcggaacgaggccaaccaaccgctgtgcctgccggccctgctcatctacaccgaagcctcggactacattcctgacgaccaccaggactatgcggaggccctgatcaaccccattaagcacgtcagcctgatggaccagagggcccggcagctggccgccctcattggggagagtgaggctcaggctggccaagagacgtgccaggacacccagtctcagcagctggggtctcagccgtcctcaaaccccacccccagcccactggatgcctccccccgccggccccctggccccaccacctcccctgccagcacctccctcagcagcccagggcagcgtgatgatctcatcgccagcatcctctcagaggtggcccccaccccgctggatgagctccgaggtcacaaggctctggtcaagctccggagccggcaagagcgagacctgcgggagctgcgcaagaagcatcagcggaaggcagtcaccctcacccgccgcctgctggatggcctggctcaggcacaggctgagggcaggtgccggctgcggccaggtgccctaggtggggccgctgatgtggaggacacgaaggagggggaggacgaggcaaagcggtatcaggagttccagaacagacaggtgcagagcctgctggagctgcgggaggcccaggtggacgcagaggcccagcggaggctggaacacctgagacaggctctgcagcggctcagggaggtcgtccttgatgcaaacacaactcagttcaagaggctgaaagagatgaacgagagggagaagaaggagctgcagaagatcctggacagaaagcgccataacagcatctcggaggccaagatgagggacaagcataagaaggaggcggaactgacggagattaaccgtcggcacatcactgagtcagtcaactccatccgtcggctggaggaggcccagaagcagcggcatgaccgtcttgtggctgggcagcagcaggtcctgcaacagctggcagaagaggagcccaagctgctggcccagctggcccaggagtgtcaggagcagcgggcgaggctcccccaggagatccgccggagcctgctgggcgagatgccggaggggctgggggacgggcctctggtggcctgtgccagcaacggtcacgcacccgggagcagcgggcacctgtcgggcgctgactcggagagccaggaggagaacacgcagctctgaactggctgagcgaggtggccacagggccagggcgggcgctgggtggagggcaggaggcaatgacactaatgctttttttttttttttttaactttttatctagaaattttatttttttaaacccggggcaagtacctcagctaactcccttcatcctcctggggcccctccttcctgccctcagtcttaggttagggccttggtcagggctttgctccctgtgacacccacaccctcgagctagcagcgtctcctcccttccccgggagagctggctggagacttggagctccgggaagtaggagtcacatttttttctctattctttggggattttttttacatgaataaaagtggatttcaggga

SEQ ID NO: 74634 - DNA, 415 bp, Homo sapiens
aactttttatctagaaattttatttttttaaaggtggggccgctgatgtggaggacacgaaggagggggaggacgaggcaaagcggtatcaggagttccagaacagacaggtgcagagcctgctggagctgcgggaggcccaggtggacgcagaggcccagcggaggctggaacacctgagacaggctctgcagcggctcagggaggtcgtccttgatgcaaacacaactcatcttaggttagggccttggtcagggctttgctccctgtgacacccacaccctcgagctagcagcgtctcctcccttccccgggagagctggctggagacttggagctccgggaagtaggagtcacatttttttctctattctttggggattttttttacatgaataaaagtggatttcaggga

SEQ ID NO: 74635 - DNA, 4222 bp, Homo sapiens
  misc_feature (3)..(3): n is a, c, g, or t
  misc_feature (14)..(14): n is a, c, g, or t
  misc_feature (23)..(23): n is a, c, g, or t
cgnccgggacagantggcgggcnggcgggcactgacgccgcggggccggagcgggccgcgcggtgggagcagcggcgccgtcggtccccgtcagggctccgtgggtccccgacccgcccctggccgggccatggcgggcgcccagcccggcgtccacgcgctgcagttggagccgcccaccgtggtggagaccctgcggcgcgggagtaagttcatcaaatgggacgaggagacctccagtcggaacctggtgaccctgcgtgtggaccccaatggcttcttcttgtactggacgggccccaacatggaggtggacacactggacatcagttccatcagggacacacggacaggccggtacgcccgcctgcccaaggaccccaagatccgggaagttctgggctttgggggtcccgatgcccggctggaggagaagctgatgacggtggtgtctgggccagacccggtgaacacagtgttcttgaacttcatggccgtgcaggatgacacagccaaggtctggtctgaggagctattcaagctggctatgaacatcctggctcagaacgcctcccggaacaccttcctgcgcaaagcatacacgaagctgaagctgcaggtgaaccaggatggtcggatccccgtcaagaacatcctgaagatgttctcagcagacaagaagcgggtggagactgcgctggaatcctgtggcctcaaattcaaccggagtgagtccatccggcctgatgagttttccttggaaatctttgagcggttcctgaacaagctgtgtctgcggccggacattgacaagatcctgctggagataggcgccaagggcaagccatacctgacgctggagcagctcatggacttcatcaaccagaagcaacgcgacccgagactcaacgaagtgctgtacccgcccctgcggccctcccaggcccggctgctcatcgaaaagtatgagcccaaccagcagtttctggagcgagaccagatgtccatggagggctttagccgctacctgggaggcgaggagaatggcatcctgcccctggaagccctggatctgagcacggacatgacccagccactgagtgcctacttcatcaactcctcgcataacacctatctcactgcggggcagctggctgggacctcgtcggtggagatgtaccgccaggcactactatggggctgccgctgcgtggagctggacgtgtggaagggacggccgcctgaggaggaacccttcattacccacggcttcaccatgaccacagaggtgcctctgcgcgacgtgctggaggccattgccgagactgccttcaagacctcgccctaccccgtcatcctctccttcgagaaccatgtggactcggcaaagcaacaggcaaagatggctgagtactgccgctccatctttggagacgcgctactcatcgagcctctggacaagtacccgctggccccaggcgttcccctgcccagcccccaggacctgatgggccgtatcctggtgaagaacaagaagcggcaccgacccagcgcaggtggcccagacagcgccgggcgcaagcggcccctggagcagagcaattctgccctgagcgagagctccgcggccaccgagccctcctccccgcagctggggtctcccagctctgacagctgcccaggcctgagcaatggggaggaggtagggcttgagaagcccagcctggagcctcagaagtctctgggtgacgagggcctgaaccgaggcccctatgttcttggacctgctgaccgtgaggatgaggaggaagatgaggaagaggaggaacagacagaccccaaaaagccaactacagatgagggcacagccagcagcgaggtgaatgccactgaggagatgtccacgcttgtcaactacatcgaacctgtcaagttcaagtcctttgaggctgctcgaaagaggaacaaatgcttcgagatgtcgtcctttgtggagaccaaggccatggagcaactgaccaagagccccatggagtttgtggaatacaacaagcagcagctcagccgcatctaccccaagggcacccgcgtggactcctccaactacatgccccagctcttctggaacgtagggtgccagcttgttgcgctcaacttccagaccctcgatgtggcgatgcagctcaacgcgggcgtttttgagtacaacgggcgcagcgggtacctgctcaagccggagttcatgcggcggccggacaagtccttcgaccccttcactgaggtcatcgtggatggcatcgtggccaatgccttgcgggtcaaggtgatctcagggcagttcctgtccgacaggaaggtgggcatctacgtggaggtggacatgtttggcctccctgttgatacgcggcgcaagtaccgcacccggacctctcaggggaactcgttcaaccccgtgtgggacgaagagcccttcgacttccccaaggtggtgctgcccacgctggcttcacttcgcattgcagcctttgaggaggggggtaaattcgtagggcaccggatcctgcctgtctctgccatccgctccggataccactacgtctgcctgcggaacgaggccaaccaaccgctgtgcctgccggccctgctcatctacaccgaagcctcggactacattcctgacgaccaccaggactatgcggaggccctgatcaaccccattaagcacgtcagcctgatggaccagagggcccggcagctggccgccctcattggggagagtgaggctcaggctggccaagagacgtgccaggacacccagtctcagcagctggggtctcagccgtcctcaaaccccacccccagcccactggatgcctccccccgccggccccctggccccaccacctcccctgccagcacctccctcagcagcccagggcagcgtgatgatctcatcgccagcatcctctcagaggtggcccccaccccgctggatgagctccgaggtcacaaggctctggtcaagctccggagccggcaagagcgagacctgcgggagctgcgcaagaagcatcagcggaaggcagtcaccctcacccgccgcctgctggatggcctggctcaggcacaggctgagggcaggtgccggctgcggccaggtgccctaggtggggccgctgatgtggaggacacgaaggagggggaggacgaggcaaagcggtatcaggagttccagaacagacaggtgcagagcctgctggagctgcgggaggcccaggtggacgcagaggcccagcggaggctggaacacctgagacaggctctgcagcggctcagggaggtcgtccttgatgcaaacacaactcagttcaagaggctgaaagagatgaacgagagggagaagaaggagctgcagaagatcctggacagaaagcgccataacagcatctcggaggccaagatgagggacaagcataagaaggaggcggaactgacggagattaaccgtcggcacatcactgagtcagtcaactccatccgtcggctggaggaggcccagaagcagcggcatgaccgtcttgtggctgggcagcagcaggtcctgcaacagctggcagaagaggagcccaagctgctggcccagctggcccaggagtgtcaggagcagcgggcgaggctcccccaggagatccgccggagcctgctgggcgagatgccggaggggctgggggacgggcctctggtggcctgtgccagcaacggtcacgcacccgggagcagcgggcacctgtcgggcgctgactcggagagccaggaggagaacacgcagctctgaactggctgagcgaggtggccacagggccagggcgggcgctgggtggagggcaggaggcaatgacactaatgctttttttttttttttttaactttttatctagaaattttatttttttaaacccggggcaagtacctcagctaactcccttcatcctcctggggcccctccttcctgccctcagtcttaggttagggccttggtcagggctttgctccctgtgacacccacaccctcgagctagcagcgtctcctcccttccccgggagagctggctggagacttggagctccgggaagtaggagtcacatttttttctctattctttggggattttttttacatgaataaaagtggatttcagggaaaaaaaacacaaagtcgagc

SEQ ID NO: 74636 - DNA, 4104 bp, Homo sapiens
  misc_feature (3)..(3): n is a, c, g, or t
  misc_feature (14)..(14): n is a, c, g, or t
  misc_feature (23)..(23): n is a, c, g, or t
cgnccgggacagantggcgggcnggcgggcactgacgccgcggggccggagcgggccgcgcggtgggagcagcggcgccgtcggtccccgtcagggctccgtgggtccccgacccgcccctggccgggccatggcgggcgcccagcccggcgtccacgcgctgcagttggagccgcccaccgtggtggagaccctgcggcgcgggagtaagttcatcaaatgggacgaggagacctccagtcggaacctggtgaccctgcgtgtggaccccaatggcttcttcttgtactggacgggccccaacatggaggtggacacactggacatcagttccatcagggacacacggacaggccggtacgcccgcctgcccaaggaccccaagatccgggaagttctgggctttgggggtcccgatgcccggctggaggagaagctgatgacggtggtgtctgggccagacccggtgaacacagtgttcttgaacttcatggccgtgcaggatgacacagccaaggtctggtctgaggagctattcaagctggctatgaacatcctggctcagaacgcctcccggaacaccttcctgcgcaaagcatacacgaagctgaagctgcaggtgaaccaggatggtcggatccccgtcaagaacatcctgaagatgttctcagcagacaagaagcgggtggagactgcgctggaatcctgtggcctcaaattcaaccggagtgagtccatccggcctgatgagttttccttggaaatctttgagcggttcctgaacaagctgtgtctgcggccggacattgacaagatcctgctggagataggcgccaagggcaagccatacctgacgctggagcagctcatggacttcatcaaccagaagcaacgcgacccgagactcaacgaagtgctgtacccgcccctgcggccctcccaggcccggctgctcatcgaaaagtatgagcccaaccagcagtttctggagcgagaccagatgtccatggagggctttagccgctacctgggaggcgaggagaatggcatcctgcccctggaagccctggatctgagcacggacatgacccagccactgagtgcctacttcatcaactcctcgcataacacctatctcactgcggggcagctggctgggacctcgtcggtggagatgtaccgccaggcactactatggggctgccgctgcgtggagctggacgtgtggaagggacggccgcctgaggaggaacccttcattacccacggcttcaccatgaccacagaggtgcctctgcgcgacgtgctggaggccattgccgagactgccttcaagacctcgccctaccccgtcatcctctccttcgagaaccatgtggactcggcaaagcaacaggcaaagatggctgagtactgccgctccatctttggagacgcgctactcatcgagcctctggacaagtacccgctggccccaggcgttcccctgcccagcccccaggacctgatgggccgtatcctggtgaagaacaagaagcggcaccgacccagcgcaggtggcccagacagcgccgggcgcaagcggcccctggagcagagcaattctgccctgagcgagagctccgcggccaccgagccctcctccccgcagctggggtctcccagctctgacagctgcccaggcctgagcaatggggaggaggtagggcttgagaagcccagcctggagcctcagaagtctctgggtgacgagggcctgaaccgaggcccctatgttcttggacctgctgaccgtgaggatgaggaggaagatgaggaagaggaggaacagacagaccccaaaaagccaactacagatgagggcacagccagcagcgaggtgaatgccactgaggagatgtccacgcttgtcaactacatcgaacctgtcaagttcaagtcctttgaggctgctcgaaagaggaacaaatgcttcgagatgtcgtcctttgtggagaccaaggccatggagcaactgaccaagagccccatggagtttgtggaatacaacaagcagcagctcagccgcatctaccccaagggcacccgcgtggactcctccaactacatgccccagctcttctggaacgtagggtgccagcttgttgcgctcaacttccagaccctcgatgtggcgatgcagctcaacgcgggcgtttttgagtacaacgggcgcagcgggtacctgctcaagccggagttcatgcggcggccggacaagtccttcgaccccttcactgaggtcatcgtggatggcatcgtggccaatgccttgcgggtcaaggtgatctcagggcagttcctgtccgacaggaaggtgggcatctacgtggaggtggacatgtttggcctccctgttgatacgcggcgcaagtaccgcacccggacctctcaggggaactcgttcaaccccgtgtgggacgaagagcccttcgacttccccaaggtggtgctgcccacgctggcttcacttcgcattgcagcctttgaggaggggggtaaattcgtagggcaccggatcctgcctgtctctgccatccgctccggataccactacgtctgcctgcggaacgaggccaaccaaccgctgtgcctgccggccctgctcatctacaccgaagcctcggactacattcctgacgaccaccaggactatgcggaggccctgatcaaccccattaagcacgtcagcctgatggaccagagggcccggcagctggccgccctcattggggagagtgaggctcaggctggccaagagacgtgccaggacacccagtctcagcagctggggtctcagccgtcctcaaaccccacccccagcccactggatgcctccccccgccggccccctggccccaccacctcccctgccagcacctccctcagcagcccagggcagcgtgatgatctcatcgccagcatcctctcagaggtggcccccaccccgctggatgagctccgaggtcacaaggctctggtcaagctccggagccggcaagagcgagacctgcgggagctgcgcaagaagcatcagcggaaggcagtcaccctcacccgccgcctgctggatggcctggctcaggcacaggctgagggcaggtgccggctgcggccaggtgccctaggtggggccgctgatgtggaggacacgaaggagggggaggacgaggcaaagcggtatcaggagttccagaacagacaggtgcagagcctgctggagctgcgggaggcccaggtggacgcagaggcccagcggaggctggaacacctgagacaggctctgcagcggctcagggaggtcgtccttgatgcaaacacaactcagttcaagaggctgaaagagatgaacgagagggagaagaaggagctgcagaagatcctggacagaaagcgccataacagcatctcggaggccaagatgagggacaagcataagaaggaggcggaactgacggagattaaccgtcggcacatcactgagtcagtcaactccatccgtcggctggaggaggcccagaagcagcggcatgaccgtcttgtggctgggcagcagcaggtcctgcaacagctggcagaagaggagcccaagctgctggcccagctggcccaggagtgtcaggagcagcgggcgaggctcccccaggagatccgccggagcctgctgggcgagatgccggaggggctgggggacgggcctctggtggcctgtgccagcaacggtcacgcacccgggagcagcgggcacctgtcgggcgctgactcggagagccaggaggagaacacgcagctctgaactggctgagcgaggtggccacagggccagggcgggcgctgggtggagggcaggaggcaatgacactaatgctttttttttttttttttaactttttatctagaaattttatttttttaaacccggggcaagtacctcagctaactcccttcatcctcccttccccgggagagctggctggagacttggagctccgggaagtaggagtcacatttttttctctattctttggggattttttttacatgaataaaagtggatttcaggga

SEQ ID NO: 74637 - DNA, 3190 bp, Homo sapiens
caccacctgtcggctggtgtggggcctctgacccctgacctcaggtgcacgtctcacccagctgcaccccaactcctgactcccaacctcagcctctcacctctcagagccttcccacaacccggtgatggctctgaaggctgacctctgacctcagtaaaccacatcccacactgggtgtgacctcagacccctaagcccgcattgagttcacctgcccagttggttatcatttcagctgacctctgacctctcacccctgactgttcacctcactatgccccctccttagacatggctctgacttacccctgacctgtaacctctctatgtcatcccttaccccgctattagggctgtggtatgctacttcctgacttctcaccccactgaaccaccctatctgcctccctgctgaatatcactgcagacctttacctttgacctatgacccctctcaacccatactgggttaataccatctgacctcgacctcttggcctctccccaagccacactgccctgagagtaccccttgaattccccactgagtcacctcggcacacactgggaaaaacccctccagacttcctaagcagctgtgtggtcctgacccctcaccctgtggccctgtcctctgcagggtctcccagctctgacagctgcccaggcctgagcaatggggaggaggtagggcttgagaagcccagcctggagcctcagaagtctctgggtgacgagggcctgaaccgaggcccctatgttcttggacctgctgaccgtgaggatgaggaggaagatgaggaagaggaggaacagacagaccccaaaaagccaactacagatgagggcacagccagcagcgaggtgaatgccactgaggagatgtccacgcttgtcaactacatcgaacctgtcaagttcaagtcctttgaggctgctcgaaagaggaacaaatgcttcgagatgtcgtcctttgtggagaccaaggccatggagcaactgaccaagagccccatggagtttgtggaatacaacaagcagcagctcagccgcatctaccccaagggcacccgcgtggactcctccaactacatgccccagctcttctggaacgtagggtgccagcttgttgcgctcaacttccagaccctcgatgtggcgatgcagctcaacgcgggcgtttttgagtacaacgggcgcagcgggtacctgctcaagccggagttcatgcggcggccggacaagtccttcgaccccttcactgaggtcatcgtggatggcatcgtggccaatgccttgcgggtcaaggtgatctcagggcagttcctgtccgacaggaaggtgggcatctacgtggaggtggacatgtttggcctccctgttgatacgcggcgcaagtaccgcacccggacctctcaggggaactcgttcaaccccgtgtgggacgaagagcccttcgacttccccaaggtggtgctgcccacgctggcttcacttcgcattgcagcctttgaggaggggggtaaattcgtagggcaccggatcctgcctgtctctgccatccgctccggataccactacgtctgcctgcggaacgaggccaaccaaccgctgtgcctgccggccctgctcatctacaccgaagcctcggactacattcctgacgaccaccaggactatgcggaggccctgatcaaccccattaagcacgtcagcctgatggaccagagggcccggcagctggccgccctcattggggagagtgaggctcaggctggccaagagacgtgccaggacacccagtctcagcagctggggtctcagccgtcctcaaaccccacccccagcccactggatgcctccccccgccggccccctggccccaccacctcccctgccagcacctccctcagcagcccagggcagcgtgatgatctcatcgccagcatcctctcagaggtggcccccaccccgctggatgagctccgaggtcacaaggctctggtcaagctccggagccggcaagagcgagacctgcgggagctgcgcaagaagcatcagcggaaggcagtcaccctcacccgccgcctgctggatggcctggctcaggcacaggctgagggcaggtgccggctgcggccaggtgccctaggtggggccgctgatgtggaggacacgaaggagggggaggacgaggcaaagcggtatcaggagttccagaacagacaggtgcagagcctgctggagctgcgggaggcccaggtggacgcagaggcccagcggaggctggaacacctgagacaggctctgcagcggctcagggaggtcgtccttgatgcaaacacaactcagttcaagaggctgaaagagatgaacgagagggagaagaaggagctgcagaagatcctggacagaaagcgccataacagcatctcggaggccaagatgagggacaagcataagaaggaggcggaactgacggagattaaccgtcggcacatcactgagtcagtcaactccatccgtcggctggaggaggcccagaagcagcggcatgaccgtcttgtggctgggcagcagcaggtcctgcaacagctggcagaagaggagcccaagctgctggcccagctggcccaggagtgtcaggagcagcgggcgaggctcccccaggagatccgccggagcctgctgggcgagatgccggaggggctgggggacgggcctctggtggcctgtgccagcaacggtcacgcacccgggagcagcgggcacctgtcgggcgctgactcggagagccaggaggagaacacgcagctctgaactggctgagcgaggtggccacagggccagggcgggcgctgggtggagggcaggaggcaatgacactaatgctttttttttttttttttaactttttatctagaaattttatttttttaaacccggggcaagtacctcagctaactcccttcatcctcctggggcccctccttcctgccctcagtcttaggttagggccttggtcagggctttgctccctgtgacacccacaccctcgagctagcagcgtctcctcccttccccgggagagctggctggagacttggagctccgggaagtaggagtcacatttttttctctattctttggggattttttttacatgaataaaagtggatttcaggga

SEQ ID NO: 74638 - DNA, 3635 bp, Homo sapiens
gcactcgcaacttacgagcggcagccgtcagctcccttgctggctgtcaaggcaacaccgatctagctaaaacccacctcggtcgtgacccaggtagaggtacatgccatacatttgagatatgcgtccttaacgaacctgacaagcagactgaagggatagtgagtccatccggcctgatgagttttccttggaaatctttgagcggttcctgaacaagctgtgtctgcggccggacattgacaagatcctgctggagataggcgccaagggcaagccatacctgacgctggagcagctcatggacttcatcaaccagaagcaacgcgacccgagactcaacgaagtgctgtacccgcccctgcggccctcccaggcccggctgctcatcgaaaagtatgagcccaaccagcagtttctggagcgagaccagatgtccatggagggctttagccgctacctgggaggcgaggagaatggcatcctgcccctggaagccctggatctgagcacggacatgacccagccactgagtgcctacttcatcaactcctcgcataacacctatctcactgcggggcagctggctgggacctcgtcggtggagatgtaccgccaggcactactatggggctgccgctgcgtggagctggacgtgtggaagggacggccgcctgaggaggaacccttcattacccacggcttcaccatgaccacagaggtgcctctgcgcgacgtgctggaggccattgccgagactgccttcaagacctcgccctaccccgtcatcctctccttcgagaaccatgtggactcggcaaagcaacaggcaaagatggctgagtactgccgctccatctttggagacgcgctactcatcgagcctctggacaagtacccgctggccccaggcgttcccctgcccagcccccaggacctgatgggccgtatcctggtgaagaacaagaagcggcaccgacccagcgcaggtggcccagacagcgccgggcgcaagcggcccctggagcagagcaattctgccctgagcgagagctccgcggccaccgagccctcctccccgcagctggggtctcccagctctgacagctgcccaggcctgagcaatggggaggaggtagggcttgagaagcccagcctggagcctcagaagtctctgggtgacgagggcctgaaccgaggcccctatgttcttggacctgctgaccgtgaggatgaggaggaagatgaggaagaggaggaacagacagaccccaaaaagccaactacagatgagggcacagccagcagcgaggtgaatgccactgaggagatgtccacgcttgtcaactacatcgaacctgtcaagttcaagtcctttgaggctgctcgaaagaggaacaaatgcttcgagatgtcgtcctttgtggagaccaaggccatggagcaactgaccaagagccccatggagtttgtggaatacaacaagcagcagctcagccgcatctaccccaagggcacccgcgtggactcctccaactacatgccccagctcttctggaacgtagggtgccagcttgttgcgctcaacttccagaccctcgatgtggcgatgcagctcaacgcgggcgtttttgagtacaacgggcgcagcgggtacctgctcaagccggagttcatgcggcggccggacaagtccttcgaccccttcactgaggtcatcgtggatggcatcgtggccaatgccttgcgggtcaaggtgatctcagggcagttcctgtccgacaggaaggtgggcatctacgtggaggtggacatgtttggcctccctgttgatacgcggcgcaagtaccgcacccggacctctcaggggaactcgttcaaccccgtgtgggacgaagagcccttcgacttccccaaggtggtgctgcccacgctggcttcacttcgcattgcagcctttgaggaggggggtaaattcgtagggcaccggatcctgcctgtctctgccatccgctccggataccactacgtctgcctgcggaacgaggccaaccaaccgctgtgcctgccggccctgctcatctacaccgaagcctcggactacattcctgacgaccaccaggactatgcggaggccctgatcaaccccattaagcacgtcagcctgatggaccagagggcccggcagctggccgccctcattggggagagtgaggctcaggctggccaagagacgtgccaggacacccagtctcagcagctggggtctcagccgtcctcaaaccccacccccagcccactggatgcctccccccgccggccccctggccccaccacctcccctgccagcacctccctcagcagcccagggcagcgtgatgatctcatcgccagcatcctctcagaggtggcccccaccccgctggatgagctccgaggtcacaaggctctggtcaagctccggagccggcaagagcgagacctgcgggagctgcgcaagaagcatcagcggaaggcagtcaccctcacccgccgcctgctggatggcctggctcaggcacaggctgagggcaggtgccggctgcggccaggtgccctaggtggggccgctgatgtggaggacacgaaggagggggaggacgaggcaaagcggtatcaggagttccagaacagacaggtgcagagcctgctggagctgcgggaggcccaggtggacgcagaggcccagcggaggctggaacacctgagacaggctctgcagcggctcagggaggtcgtccttgatgcaaacacaactcagttcaagaggctgaaagagatgaacgagagggagaagaaggagctgcagaagatcctggacagaaagcgccataacagcatctcggaggccaagatgagggacaagcataagaaggaggcggaactgacggagattaaccgtcggcacatcactgagtcagtcaactccatccgtcggctggaggaggcccagaagcagcggcatgaccgtcttgtggctgggcagcagcaggtcctgcaacagctggcagaagaggagcccaagctgctggcccagctggcccaggagtgtcaggagcagcgggcgaggctcccccaggagatccgccggagcctgctgggcgagatgccggaggggctgggggacgggcctctggtggcctgtgccagcaacggtcacgcacccgggagcagcgggcacctgtcgggcgctgactcggagagccaggaggagaacacgcagctctgaactggctgagcgaggtggccacagggccagggcgggcgctgggtggagggcaggaggcaatgacactaatgctttttttttttttttttaactttttatctagaaattttatttttttaaacccggggcaagtacctcagctaactcccttcatcctcctggggcccctccttcctgccctcagtcttaggttagggccttggtcagggctttgctccctgtgacacccacaccctcgagctagcagcgtctcctcccttccccgggagagctggctggagacttggagctccgggaagtaggagtcacatttttttctctattctttggggattttttttacatgaataaaagtggatttcaggga

SEQ ID NO: 74639 - DNA, 3244 bp, Homo sapiens
  misc_feature (3)..(3): n is a, c, g, or t
  misc_feature (14)..(14): n is a, c, g, or t
  misc_feature (23)..(23): n is a, c, g, or t
cgnccgggacagantggcgggcnggcgggcactgacgccgcggggccggagcgggccgcgcggtgggagcagcggcgccgtcggtccccgtcagggctccgtgggtccccgacccgcccctggccgggccatggcgggcgcccagcccggcgtccacgcgctgcagttggagccgcccaccgtggtggagaccctgcggcgcgggagtaagttcatcaaatgggacgaggagacctccagtcggaacctggtgaccctgcgtgtggaccccaatggcttcttcttgtactggacgggccccaacatggaggtggacacactggacatcagttccatcagggacacacggacaggccggtacgcccgcctgcccaaggaccccaagatccgggaagttctgggctttgggggtcccgatgcccggctggaggagaagctgatgacggtggtgtctgggccagacccggtgaacacagtgttcttgaacttcatggccgtgcaggatgacacagccaaggtctggtctgaggagctattcaagctggctatgaacatcctggctcagaacgcctcccggaacaccttcctgcgcaaagcatacacgaagctgaagctgcaggtgaaccaggatggtcggatccccgtcaagaacatcctgaagatgttctcagcagacaagaagcgggtggagactgcgctggaatcctgtggcctcaaattcaaccggagtgagtccatccggcctgatgagttttccttggaaatctttgagcggttcctgaacaagctgtgtctgcggccggacattgacaagatcctgctggagataggcgccaagggcaagccatacctgacgctggagcagctcatggacttcatcaaccagaagcaacgcgacccgagactcaacgaagtgctgtacccgcccctgcggccctcccaggcccggctgctcatcgaaaagtatgagcccaaccagcagtttctggagcgagaccagatgtccatggagggctttagccgctacctgggaggcgaggagaatggcatcctgcccctggaagccctggatctgagcacggacatgacccagccactgagtgcctacttcatcaactcctcgcataacacctatctcactgcggggcagctggctgggacctcgtcggtggagatgtaccgccaggcactactatggggctgccgctgcgtggagctggacgtgtggaagggacggccgcctgaggaggaacccttcattacccacggcttcaccatgaccacagaggtgcctctgcgcgacgtgctggaggccattgccgagactgccttcaagacctcgccctaccccgtcatcctctccttcgagaaccatgtggactcggcaaagcaacaggcaaagatggctgagtactgccgctccatctttggagacgcgctactcatcgagcctctggacaagtacccgctggccccaggcgttcccctgcccagcccccaggacctgatgggccgtatcctggtgaagaacaagaagcggcaccgacccagcgcaggtggcccagacagcgccgggcgcaagcggcccctggagcagagcaattctgccctgagcgagagctccgcggccaccgagccctcctccccgcagctggggtctcccagctctgacagctgcccaggcctgagcaatggggaggaggtagggcttgagaagcccagcctggagcctcagaagtctctgggtgacgagggcctgaaccgaggcccctatgttcttggacctgctgaccgtgaggatgaggaggaagatgaggaagaggaggaacagacagaccccaaaaagccaactacagatgagggcacagccagcagcgaggtgaatgccactgaggagatgtccacgcttgtcaactacatcgaacctgtcaagttcaagtcctttgaggctgctcgaaagaggaacaaatgcttcgagatgtcgtcctttgtggagaccaaggccatggagcaactgaccaagagccccatggagtttgtggaatacaacaagcagcagctcagccgcatctaccccaagggcacccgcgtggactcctccaactacatgccccagctcttctggaacgtagggtgccagcttgttgcgctcaacttccagaccctcgatgtggcgatgcagctcaacgcgggcgtttttgagtacaacgggcgcagcgggtacctgctcaagccggagttcatgcggcggccggacaagtccttcgaccccttcactgaggtcatcgtggatggcatcgtggccaatgccttgcgggtcaaggtgatctcagggcagttcctgtccgacaggaaggtgggcatctacgtggaggtggacatgtttggcctccctgttgatacgcggcgcaagtaccgcacccggacctctcaggggaactcgttcaaccccgtgtgggacgaagagcccttcgacttccccaaggtggtgctgcccacgctggcttcacttcgcattgcagcctttgaggaggggggtaaattcgtagggcaccggatcctgcctgtctctgccatccgctccggataccactacgtctgcctgcggaacgaggccaaccaaccgctgtgcctgccggccctgctcatctacaccgaagcctcggactacattcctgacgaccaccaggactatgcggaggccctgatcaaccccattaagcacgtcagcctgatggaccagagggcccggcagctggccgccctcattggggagagtgaggctcaggctggccaagagacgtgccaggacacccagtctcagcagctggggtctcagccgtcctcaaaccccacccccagcccactggatgcctccccccgccggccccgtggccacagggccagggcgggcgctgggtggagggcaggaggcaatgacactaatgctttttttttttttttttaactttttatctagaaattttatttttttaaacccggggcaagtacctcagctaactcccttcatcctcctggggcccctccttcctgccctcagtcttaggttagggccttggtcagggctttgctccctgtgacacccacaccctcgagctagcagcgtctcctcccttccccgggagagctggctggagacttggagctccgggaagtaggagtcacatttttttctctattctttggggattttttttacatgaataaaagtggatttcaggga

SEQ ID NO: 74640 - DNA, 2199 bp, Homo sapiens
tgagacacgcatgaagcactgacagaaccatgagttgtggatacaacaagcagcagctcagccgcatctaccccaagggcacccgcgtggactcctccaactacatgccccagctcttctggaacgtagggtgccagcttgttgcgctcaacttccagaccctcgatgtggcgatgcagctcaacgcgggcgtttttgagtacaacgggcgcagcgggtacctgctcaagccggagttcatgcggcggccggacaagtccttcgaccccttcactgaggtcatcgtggatggcatcgtggccaatgccttgcgggtcaaggtgatctcagggcagttcctgtccgacaggaaggtgggcatctacgtggaggtggacatgtttggcctccctgttgatacgcggcgcaagtaccgcacccggacctctcaggggaactcgttcaaccccgtgtgggacgaagagcccttcgacttccccaaggtggtgctgcccacgctggcttcacttcgcattgcagcctttgaggaggggggtaaattcgtagggcaccggatcctgcctgtctctgccatccgctccggataccactacgtctgcctgcggaacgaggccaaccaaccgctgtgcctgccggccctgctcatctacaccgaagcctcggactacattcctgacgaccaccaggactatgcggaggccctgatcaaccccattaagcacgtcagcctgatggaccagagggcccggcagctggccgccctcattggggagagtgaggctcaggctggccaagagacgtgccaggacacccagtctcagcagctggggtctcagccgtcctcaaaccccacccccagcccactggatgcctccccccgccggccccctggccccaccacctcccctgccagcacctccctcagcagcccagggcagcgtgatgatctcatcgccagcatcctctcagaggtggcccccaccccgctggatgagctccgaggtcacaaggctctggtcaagctccggagccggcaagagcgagacctgcgggagctgcgcaagaagcatcagcggaaggcagtcaccctcacccgccgcctgctggatggcctggctcaggcacaggctgagggcaggtgccggctgcggccaggtgccctaggtggggccgctgatgtggaggacacgaaggagggggaggacgaggcaaagcggtatcaggagttccagaacagacaggtgcagagcctgctggagctgcgggaggcccaggtggacgcagaggcccagcggaggctggaacacctgagacaggctctgcagcggctcagggaggtcgtccttgatgcaaacacaactcagttcaagaggctgaaagagatgaacgagagggagaagaaggagctgcagaagatcctggacagaaagcgccataacagcatctcggaggccaagatgagggacaagcataagaaggaggcggaactgacggagattaaccgtcggcacatcactgagtcagtcaactccatccgtcggctggaggaggcccagaagcagcggcatgaccgtcttgtggctgggcagcagcaggtcctgcaacagctggcagaagaggagcccaagctgctggcccagctggcccaggagtgtcaggagcagcgggcgaggctcccccaggagatccgccggagcctgctgggcgagatgccggaggggctgggggacgggcctctggtggcctgtgccagcaacggtcacgcacccgggagcagcgggcacctgtcgggcgctgactcggagagccaggaggagaacacgcagctctgaactggctgagcgaggtggccacagggccagggcgggcgctgggtggagggcaggaggcaatgacactaatgctttttttttttttttttaactttttatctagaaattttatttttttaaacccggggcaagtacctcagctaactcccttcatcctcctggggcccctccttcctgccctcagtcttaggttagggccttggtcagggctttgctccctgtgacacccacaccctcgagctagcagcgtctcctcccttccccgggagagctggctggagacttggagctccgggaagtaggagtcacatttttttctctattctttggggattttttttacatgaataaaagtggatttcaggga

SEQ ID NO: 74641 - DNA, 1835 bp, Homo sapiens
taggtcagctcgtctgaaggtctgctttgttaagctttgatggctgtggttagctgtggcctggtagccacagtggcccagggtcagccctgcggctcagctccagtctggcccacaggtggtgctgcccacgctggcttcacttcgcattgcagcctttgaggaggggggtaaattcgtagggcaccggatcctgcctgtctctgccatccgctccggataccactacgtctgcctgcggaacgaggccaaccaaccgctgtgcctgccggccctgctcatctacaccgaagcctcggactacattcctgacgaccaccaggactatgcggaggccctgatcaaccccattaagcacgtcagcctgatggaccagagggcccggcagctggccgccctcattggggagagtgaggctcaggctggccaagagacgtgccaggacacccagtctcagcagctggggtctcagccgtcctcaaaccccacccccagcccactggatgcctccccccgccggccccctggccccaccacctcccctgccagcacctccctcagcagcccagggcagcgtgatgatctcatcgccagcatcctctcagaggtggcccccaccccgctggatgagctccgaggtcacaaggctctggtcaagctccggagccggcaagagcgagacctgcgggagctgcgcaagaagcatcagcggaaggcagtcaccctcacccgccgcctgctggatggcctggctcaggcacaggctgagggcaggtgccggctgcggccaggtgccctaggtggggccgctgatgtggaggacacgaaggagggggaggacgaggcaaagcggtatcaggagttccagaacagacaggtgcagagcctgctggagctgcgggaggcccaggtggacgcagaggcccagcggaggctggaacacctgagacaggctctgcagcggctcagggaggtcgtccttgatgcaaacacaactcagttcaagaggctgaaagagatgaacgagagggagaagaaggagctgcagaagatcctggacagaaagcgccataacagcatctcggaggccaagatgagggacaagcataagaaggaggcggaactgacggagattaaccgtcggcacatcactgagtcagtcaactccatccgtcggctggaggaggcccagaagcagcggcatgaccgtcttgtggctgggcagcagcaggtcctgcaacagctggcagaagaggagcccaagctgctggcccagctggcccaggagtgtcaggagcagcgggcgaggctcccccaggagatccgccggagcctgctgggcgagatgccggaggggctgggggacgggcctctggtggcctgtgccagcaacggtcacgcacccgggagcagcgggcacctgtcgggcgctgactcggagagccaggaggagaacacgcagctctgaactggctgagcgaggtggccacagggccagggcgggcgctgggtggagggcaggaggcaatgacactaatgctttttttttttttttttaactttttatctagaaattttatttttttaaacccggggcaagtacctcagctaactcccttcatcctcctggggcccctccttcctgccctcagtcttaggttagggccttggtcagggctttgctccctgtgacacccacaccctcgagctagcagcgtctcctcccttccccgggagagctggctggagacttggagctccgggaagtaggagtcacatttttttctctattctttggggattttttttacatgaataaaagtggatttcaggga

SEQ ID NO: 74642 - DNA, 2340 bp, Homo sapiens
  misc_feature (3)..(3): n is a, c, g, or t
  misc_feature (14)..(14): n is a, c, g, or t
  misc_feature (23)..(23): n is a, c, g, or t
cgnccgggacagantggcgggcnggcgggcactgacgccgcggggccggagcgggccgcgcggtgggagcagcggcgccgtcggtccccgtcagggctccgtgggtccccgacccgcccctggccgggccatggcgggcgcccagcccggcgtccacgcgctgcagttggagccgcccaccgtggtggagaccctgcggcgcgggagtaagttcatcaaatgggacgaggagacctccagtcggaacctggtgaccctgcgtgtggaccccaatggcttcttcttgtactggacgggccccaacatggaggtggacacactggacatcagttccatcagggacacacggacaggccggtacgcccgcctgcccaaggaccccaagatccgggaagttctgggctttgggggtcccgatgcccggctggaggagaagctgatgacggtggtgtctgggccagacccggtgaacacagtgttcttgaacttcatggccgtgcaggatgacacagccaaggtctggtctgaggagctattcaagctggctatgaacatcctggctcagaacgcctcccggaacaccttcctgcgcaaagcatacacgaagctgaagctgcaggtgaaccaggatggtcggatccccgtcaagaacatcctgaagatgttctcagcagacaagaagcgggtggagactgcgctggaatcctgtggcctcaaattcaaccggagtgagtccatccggcctgatgagttttccttggaaatctttgagcggttcctgaacaagctgtgtctgcggccggacattgacaagatcctgctggagataggcgccaagggcaagccatacctgacgctggagcagctcatggacttcatcaaccagaagcaacgcgacccgagactcaacgaagtgctgtacccgcccctgcggccctcccaggcccggctgctcatcgaaaagtatgagcccaaccagcagtttctggagcgagaccagatgtccatggagggctttagccgctacctgggaggcgaggagaatggcatcctgcccctggaagccctggatctgagcacggacatgacccagccactgagtgcctacttcatcaactcctcgcataacacctatctcactgcggggcagctggctgggacctcgtcggtggagatgtaccgccaggcactactatggggctgccgctgcgtggagctggacgtgtggaagggacggccgcctgaggaggaacccttcattacccacggcttcaccatgaccacagaggtgcctctgcgcgacgtgctggaggccattgccgagactgccttcaagacctcgccctaccccgtcatcctctccttcgagaaccatgtggactcggcaaagcaacaggcaaagatggctgagtactgccgctccatctttggagacgcgctactcatcgagcctctggacaagtacccgctggccccaggcgttcccctgcccagcccccaggacctgatgggccgtatcctggtgaagaacaagaagcggcaccgacccagcgcaggtggcccagacagcgccgggcgcaagcggcccctggagcagagcaattctgccctgagcgagagctccgcggccaccgagccctcctccccgcagctggggtctcccagctctgacagctgcccaggcctgagcaatggggaggaggtagggcttgagaagcccagcctggagcctcagaagtctctgggtgacgagggcctgaaccgaggcccctatgttcttggacctgctgaccgtgaggatgaggaggaagatgaggaagaggaggaacagacagaccccaaaaagccaactacagatgagggcacagccagcagcgaggtgaatgccactgaggagatgtccacgcttgtcaactacatcgaacctgtcgggcgctgactcggagagccaggaggagaacacgcagctctgaactggctgagcgaggtggccacagggccagggcgggcgctgggtggagggcaggaggcaatgacactaatgctttttttttttttttttaactttttatctagaaattttatttttttaaacccggggcaagtacctcagctaactcccttcatcctcctggggcccctccttcctgccctcagtcttaggttagggccttggtcagggctttgctccctgtgacacccacaccctcgagctagcagcgtctcctcccttccccgggagagctggctggagacttggagctccgggaagtaggagtcacatttttttctctattctttggggattttttttacatgaataaaagtggatttcaggga

SEQ ID NO: 74643 - DNA, 1898 bp, Homo sapiens
  misc_feature (3)..(3): n is a, c, g, or t
  misc_feature (14)..(14): n is a, c, g, or t
  misc_feature (23)..(23): n is a, c, g, or t
cgnccgggacagantggcgggcnggcgggcactgacgccgcggggccggagcgggccgcgcggtgggagcagcggcgccgtcggtccccgtcagggctccgtgggtccccgacccgcccctggccgggccatggcgggcgcccagcccggcgtccacgcgctgcagttggagccgcccaccgtggtggagaccctgcggcgcgggagtaagttcatcaaatgggacgaggagacctccagtcggaacctggtgaccctgcgtgtggaccccaatggcttcttcttgtactggacgggccccaacatggaggtggacacactggacatcagttccatcagggacacacggacaggccggtacgcccgcctgcccaaggaccccaagatccgggaagttctgggctttgggggtcccgatgcccggctggaggagaagctgatgacggtggtgtctgggccagacccggtgaacacagtgttcttgaacttcatggccgtgcaggatgacacagccaaggtctggtctgaggagctattcaagctggctatgaacatcctggctcagaacgcctcccggaacaccttcctgcgcaaagcatacacgaagctgaagctgcaggtgaaccaggatggtcggatccccgtcaagaacatcctgaagatgttctcagcagacaagaagcgggtggagactgcgctggaatcctgtggcctcaaattcaaccggagtgagtccatccggcctgatgagttttccttggaaatctttgagcggttcctgaacaagctgtgtctgcggccggacattgacaagatcctgctggagataggcgccaagggcaagccatacctgacgctggagcagctcatggacttcatcaaccagaagcaacgcgacccgagactcaacgaagtgctgtacccgcccctgcggccctcccaggcccggctgctcatcgaaaagtatgagcccaaccagcagtttctggagcgagaccagatgtccatggagggctttagccgctacctgggaggcgaggagaatggcatcctgcccctggaagccctggatctgagcacggacatgacccagccactgagtgcctacttcatcaactcctcgcataacacctatctcactgcggggcagctggctgggacctcgtcggtggagatgtaccgccaggcactactatggggctgccgctgcgtggagctggacgtgtggaagggacggccgcctgaggaggaacccttcattacccacggcttcaccatgaccacagaggtgcctctgcgcgacgtgctggaggccattgccgagactgccttcaagacctcgccctaccccgtcatcctctccttcgagaaccatgtggactcggcaaagcaacaggcaaagatggctgagtactgccgctccatctttggagacgcgctactcatcgagcctctggacaagtacccgctggccccaggcgttcccctgcccagcccccaggacctgatgggccgtatcctggtgaagaacaagaagcggcaccgacccagcgcaggtggcccagacagcgccgggcgcaagcggcccctggagcagagcaattctgccctgagcgagagctccgcggccaccgagccctcctccccgcagctggggtctcccagctctgacagctgcccaggcctgagcaatggggaggaggtagggcttgagaagcccagcctggagcctcagaagtctctgggtgacgagggcctgaaccgaggcccctatgttcttggacctgctgaccgtgaggatgaggaggaagatgaggaagaggaggaacagacagaccccaaaaagccaactacagatgagtcaggtccagtaaaagcactgccaaaaccagaagttg

SEQ ID NO: 74644 - DNA, 439 bp, Homo sapiens
aggcagttgtggacctgggttgtggctgggcagcccctgtgtcccccactcaccgcctccccgtgtatactggccccccaggtctggtctgaggagctattcaagctggctatgaacatcctggctcagaacgcctcccggaacaccttcctgcgcaaagcgtgagccccaggccacccgagggggagccggggggttcacgtggccgttttcagggtgtgacctcttcatctgccttcccagatacacgaagctgaagctgcaggtgaaccaggatggtcggatccccgtcaagaagtgagcaccccttcccccagcaccttcctcctgccctgaccttggtgacctttgtcctccactgaccctgaacccctcctgcccgcatcagcatcctgaagatgttctcagcagacaagaagcgggtggagactgcgctgga

SEQ ID NO: 74645 - DNA, 408 bp, Homo sapiens
tttaactttttatctagaaattttatttttttaaacccggggcaagtacctcagctaactcccttcatcctcctggggcccctccttcctgccctcagtcttaggttagggccttggtcagggctttgctccctgtgacacccacaccctcgagctagcagcgtctcctcccttccccgggagagctggctggagacttggagctccgggaagtaggagtcacatttttttctctattctttggggattttttttacatgaataaaagtggatttcagggaccctgtgtgcagtgtgatttggggtgacaggactctgggccctaagtttcctcatctataaaatggactttgggcatttggtggggttgaggtcacgcctccagccaagggctgctgggttgaacct

SEQ ID NO: 74646 - DNA, 813 bp, Homo sapiens
cttggttattttaatgacaaatgacagaccaataattgattcctcaataaaacagtggaagtcagaaagagtagaattgtacattcagaatgctggcagaaaataaccatcaacctagaattgggcactcagcaaaattatctttcaagaattaaagtatagaaataaaataatttccaggtacatggaaactgaatttaacatctacctacactttttaaaggaagttctaaaagatgtacttcagaaagaaaaattacttcagaaggagagtctgagatagaagtgatgggcaaagaaattgtaaacacatagttgaatctgagcaaacattacatgaaataacaccagacaacaaaagtatgtaagacgagaggtggatgacaaagttaaagaattctaaggtctctctttgtagttaagatatcaattaatagagttgacataattcaagtctttaagtacgcaaggtaaagtttcaaggataaccatgaaagtgtataacttctaatccagccaaaggaaaaaatggactaacaggaaaacacagattaaatgaacaaaaacctaatatcataatgagcattaaaaaaaaagaggatgaaaagaaagcactaaagtaacaaaatagaaataaattcatatatatcaatagtaacaatgaaagtaaataaactttctgatgaaaagccagagattgttggatgacacatacccacaagtttaaaaaataaaaaagccagagattggttgaaaaaaaaaagtgccatttacaagagatgcaccaaaaacattaaggatcgtgaggagttg

SEQ ID NO: 74647 - DNA, 440 bp, Homo sapiens
agatttcaaggctgagatccacaaaactctagcaaatactgcacagacactgaccaatgacagcaggtgctgcctgtcaccctggagcaccaggcaggtttccaaagcacccttgctgtgccagcctctgattgctggttatagggaggtctggggtagtcccaaaagctgggatgtctaaggcagctggggtcagtcaggaggctcagggcagtggcaggaaaatattttcctccctggtagagccacagcggggtatccaggctgaatattattggcgagaaggaccatggcaccgcaccaagacctgcaggacaaactttgttggagctgaatccagaaaaacaatcttcttctaaaccactctcctgcccctcatttaattattgtgcttttgggtgcacttggactactctgaaacattcagaactctgtcaaaa

SEQ ID NO: 74648 - DNA, 474 bp, Homo sapiens
ttagtgcaagttcatatggagtctgatctaaatgtctctgggcaaagaagaacaaatggagatccttgaaaaggctttttgtcattttctttgagagcatctttttggggtacatagagtcttccagatttatgagaatatttttatcaataaccttacctaaaacacataatgtatttttcagggtcattgtgatgtctcacttataaacatactatattaattagagcaaaataatttttacatttctcaatgacctgagttttatttatggagcttataacaataactttgtttctttttttttctgtgaaatgatgtccaaaatgaatctcctttttacattttttttatttttaatattcatgggtacatagcaggtgtgtgtgtgtatacttttagttggaggcaactatatagttttagtgtatatgtatatatttttagtatatctattttatttgtaaagctgta

SEQ ID NO: 74649 - DNA, 518 bp, Homo sapiens
tcatatatttttagcagacctttcccaccaagcagtctctggggagccataaactatccgggttagaaagaggctgcaggtggtatggccccgcagaacgagagccctgccctccagaagaggtctcccccatcagcgggtttccctgtgggctgagggctgttctcttagtgtgtttgattgcactctggggtttccatcctggaataatatcagaactccagtaaaggtcgtgcctcacagttcctttacaaataggacagatgcccagccactcagaaggctgaggcgggaggatggcttgagcccaggagttcaagaccagcctgagcaacatagtgagaccttgtcctacagaacaaataaataatttaaaaattaaacattaaaaaacaaattagccaggcatggccctgcacctgtagtcccagctactcaggaggatcgcctgagcccaggagttcgaggtttgtggtgagctgtgatctcccctgtgaatagccatagtactccagcct

SEQ ID NO: 74650 - DNA, 463 bp, Homo sapiens
  misc_feature (135)..(135): n is a, c, g, or t
  misc_feature (146)..(146): n is a, c, g, or t
  misc_feature (228)..(228): n is a, c, g, or t
catctcccagcccctccggtatgtcaccatcatgaacactcaattgtgtgtgggcctggtagtagccgcctgggtggggggctttgtccactccattgtccaactggctctgatacttccactgcccttctgtgnccccaatatcntagataacttctactgtgatgttccccaagtactgagacttgcctgcactgatacctccctcctggagttcctcatgatctncaacagtgggctgctagttatcatctggttcctcctccttctgatctcttatactgtcatcctggtgatgctgaggtcccactcgggaaaggcaaggaggaaggcagcttccacctgcaccacccacatcatcgtggtgtccatgatcttcattccctgtatctatatctatacctggcccttcaccccattcctcatggacaaggctgtgtccatcagctacacagtcatgacc

SEQ ID NO: 74651 - DNA, 268 bp, Homo sapiens
gggtgcttcattttacaaaactccacctgtgatcctcatacacaaattattgctgcattgttgctgaaatataccccatatatttgactccacgtggtagtactctgaccattcactttaataatcagacttgataatagatacctttgaaaataaattgtatgtttggaaatggcctactgacaaaaccttgtcacaatggagaaggtcaaaaagaaggtattgaaggctctgaaaatggtttgtaaggaggaatgcaaatattgtc

SEQ ID NO: 74652 - DNA, 477 bp, Homo sapiens
acttttgttctctgctgatatttttgtgggtgaaatctgtctgaataaagctatgtcacttacaaattctgcatctctggataaggtcagtcaataggaccaattattgattccatttgtgtcattttcaaaaagccacatttgcattgtgttgactgtgcgatcccagaaaacttgtaataactggtgctctattgtgaactaagaaccaagcgaatgttggtagcaaatgctatgttctactgttagttcttttttagtatcccatctaaaagtaaagcccctatttacagaataagtgctaatatgcttttccccttagcctacctccattgggatggaatagtggatagagttcaggctttggagtcatagagactctacatgggatcaatctctgactagctattgatcttggaaagttacttaaccttaagtctcaattttctcatttgcaagaggaaaatgaaaaaaaaa

SEQ ID NO: 74653 - DNA, 177 bp, Homo sapiens
aatattgggttaagtttggtgagcttgcaggctcatgagctcaggccttggattttaagaaggatacagctaaagctacaccaggcacttgtcagccctaaaattttgctgtgtgtatatatttatatttatatattatagtttttatacatatgtatatatttatttataaatata

SEQ ID NO: 74654 - DNA, 867 bp, Homo sapiens
tgattttcttctacatctcacagggggaagagctggatcaccatgaaatatgtcttctatttgggtgtcctcgctgggacatttttctttgctgactcatctgttcagaaagaagaccctgctccctatttggtgtacctcaagtctcacttcaacccctgtgtgggcgtcctcatcaaacccagctgggtgctggccccagctcactgctatttaccaaatctgaaagtgatgctgggaaatttcaagagcagagtcagagacggtactgaacagacaattaaccccattcagatcgtccgctactggaactacagtcatagcgccccacaggatgacctcatgctcatcaagctggctaagcctgccatgctcaatcccaaagtccagccccttcccctcgccaccaccaatgtcaggccaggcactgtctgtctactctcaggtttggactggagccaagaaaacagtggccgacaccctgacttgcggcagaacctggaggcccccgtgatgtctgatcgagaatgccaaaaaacagaacaaggaaaaagccacaggaattccttatgtgtgaaatttgtgaaagtattcagccgaatttttggggaggtggccgttgctactgtcatctgcaaagacaagctccagggaatcgaggtggggcacttcatgggaggggacgtcggcatctacaccaatgtttacaaatatgtatcctggattgagaacactgctaaggacaagtgagaccctacttctccctctgcattccactggctctgccatggactatacaagcagataattttccctctattcaaaataaaatctccaaatgaaaatttgggaatgtagcatactagt

SEQ ID NO: 74655 - DNA, 886 bp, Homo sapiens
  misc_feature (25)..(26): n is a, c, g, or t
  misc_feature (44)..(45): n is a, c, g, or t
  misc_feature (56)..(56): n is a, c, g, or t
  misc_feature (58)..(59): n is a, c, g, or t
  misc_feature (62)..(62): n is a, c, g, or t
  misc_feature (64)..(64): n is a, c, g, or t
  misc_feature (68)..(68): n is a, c, g, or t
  misc_feature (73)..(74): n is a, c, g, or t
tagtgtttaaggtttaaagaagacnnccacaacaccgtatcttnnggggactactncnnacntngaanatgtnntctatttgggtgtcctcgctgggacatttttctttgctgactcatctgttcagaaagaagaccctgctccctatttggtgtacctcaagtctcacttcaacccctgtgtgggcgtcctcatcaaacccagctgggtgctggccccagctcactgctatttaccaaatctgaaagtgatgctgggaaatttcaagagcagagtcagagacggtactgaacagacaattaaccccattcagatcgtccgctactggaactacagtcatagcgccccacaggatgacctcatgctcatcaagctggctaagcctgccatgctcaatcccaaagtccagccccttcccctcgccaccaccaatgtcaggccaggcactgtctgtctactctcaggtttggactggagccaagaaaacagtggccgacaccctgacttgcggcagaacctggaggcccccgtgatgtctgatcgagaatgccaaaaaacagaacaaggaaaaagccacaggaattccttatgtgtgaaatttgtgaaagtattcagccgaatttttggggaggtggccgttgctactgtcatctgcaaagacaagctccagggaatcgaggtggggcacttcatgggaggggacgtcggcatctacaccaatgtttacaaatatgtatcctggattgagaacactgctaaggacaagtgagaccctacttctccctctgcattccactggctctgccatggactatacaagcagataattttccctctattcaaaataaaatctccaaatgaaaatttgggaatgtagcatactagt

SEQ ID NO: 74656 - DNA, 449 bp, Homo sapiens
tgcacagaggcccagccattcctgattggcagagacacaattcacatgaacaaggccgacaccctgacttgcggcagaacctggaggcccccgtgatgtctgatcgagaatgccaaaaaacagaacaaggaaaaagccacaggaattccttatgtgtgaaatttgtgaaagtattcagccgaatttttggggaggtggccgttgctactgtcatctgcaaagacaagctccagggaatcgaggtggggcacttcatgggaggggacgtcggcatctacaccaatgtttacaaatatgtatcctggattgagaacactgctaaggacaagtgagaccctacttctccctctgcattccactggctctgccatggactatacaagcagataattttccctctattcaaaataaaatctccaaatgaaaatttgggaatgtagcatactagt

SEQ ID NO: 74657 - DNA, 986 bp, Homo sapiens
gaaatgactatttcattcttgttgtggtgcttctgtaaccttgtgttctgtcccccatgtggacagtgtgccacatctagtttctgcatagatttcaagagagacataaggacaagttttttatgtgtgaggatgcagcttagggcagcaacattgcacaccaattataaaccaataaagttcttgtccctgcctctccctcagcgtctccctcaccagccagtatcagcagatggtctatctcattcttcatgggaaaacagaaactgttcatcttatgcttgggaagcctctctctcttaaccttgagatttcccttcagagatggtcgtttcctccttccctcctgcctaatagaataagttattctcttcgcctaatagaataagttgttctcttcgcctaatagaataagttgttctcttctcttttacctcttttgagacttagcctctttaaagattcccttttgttttagttgtcttcgatttttctttcacttggcttaattccctcagagacataatttaaatcattttcttgatactgtctcctgctcagtttacaccttagcttactccttactgtcaatgaaaatcttgggagggttgtatatgcttcctagctcctctgcctcatgattactcctcagccctcagcatttgcatgccaaactctgaactttcatgttctcagcatgttagtaaaactgttcttgtttcattttacttaagttcgaagcactgtattattgctcccacagccctcagtccaaaacttcagtgcattgtaattgttaaaatcttcatcacattgtattttaatggtctgcgttcatatgtttcctccgtagactaagcttctagaaggcagaaaaatggatttatatagattgcatatttcctttggagttaaatgtaggtcatgacacataaatatatggaaaatacactatccaataaattcacaataaatattggtggaaa

SEQ ID NO: 74658 - DNA, 300 bp, Homo sapiens
tagtgaagttacactcttcctcacccttccccttcccctctataaactaggatctaaattaagggtttcaaaagccccagttaaatgtcaccaaataaaacaaatactaaagtctaaaaaaaggaagattaacttgaattattttaatgttcctaaacttcctataaaaaggattaagaactctggactaggaggcaagtaacttacccttcctgaatttctgtttcctcctttgtaacttaagacctccttgcctatctgaggaaggtcacttagagcactgaatgatatactgtatgt

SEQ ID NO: 74659 - DNA, 492 bp, Homo sapiens
acaagtaacattgttatccccaaagagaaggtggtggtcaagaatattccagggagaaacagcattgaggtgagaagtatcggggtgtgtttagagctctaaaaggagtgaattgagctaagttgttattctttttgttttttagaggcagggtcttgctctgtcacccaggctgaagtgcagtggcatcatcatagctcactgcagcctcgacctcctgggctcaaacaatcctcccacctcagcctcctgagtaacaaggactgcaagcatgcacctccatgcccagctattttattttattttttgtagagacagggtcttgctatgttgcccaggctggtctttaactcctggcctcaagctgtcctccagccttggcctcccaaagtgctgggattataggtgtgagccacctcacctggcctgtattattacagttaattgttaattgtgttaccgtgttgtgctgtgaataatggtaaccactgc

SEQ ID NO: 74660 - DNA, 532 bp, Homo sapiens
gaaaatgcagcttgctggacctcacccccaaaggggttctgtaggtctagggtgggcccgagaatgtgtatctagttcccaggagacgttgacgcaggtccaggacctgattttgagaaccgctgtcctgcagggagcgtaaccccagcctccccaccgcatgctccctgcgggagggtcctgtttcctgcaccaagaacagggcctgggacgcgccagccctggataaatctcatggactgcgcggatggcgctgagggctcctcccagacagtcgccttctctcccaggagggggcaaccgcgctccgctccacccgtcgccagaggctccacgcgcgggacagacccggctgctgcagcctgtgctggtctctgtgcaccgggacccttccctgcaggatctcaaggcctttacgcggctgctccttcgaccccaaacactcctccccatccccgccggagcactccctccaggaatgagggaatgaaaacaatgtttctttccagcacattccccaccaggcctatct

SEQ ID NO: 74661 - DNA, 731 bp, Homo sapiens
cgccctcagacctgggctgaactacagccatctggaggggcccctgcccaccctgggcccttaacttccggtgcttctggctgcaggcagcggagcggagcacaggacacttggtgatgtctgagtccagtcctgtttcagatctggtccttgtgtgcccaccgtggctgttgtcagctcttgtcctgcggcccctaatggctggagtccggtactcactgctcacttagggataaaactgctggtggaactgcctaaagtgtgggaggttctgacatccaggggaacctggaggatgtggcactctcatgctgcctctggaaggtccaggaccttcggccttttgaatcctcgatcccagattgtccacctgctctgtgctcccagctccaagtctagctctgctggacagaccattcatctgcccagagcccctcctcggtctctgggccccacacctgactctgaggctacatttgggcatgattcagacctgactccgagccccacaactggccacaggcaccccatctgtctgaggctctcacttgtctctgagaccctggcttcacacctggctctaaactccatttgtcttccaggccccgtgctcggatctgaatcccatgtggggtctgaggtccatagtaaggctcacgtctgccttggcacttagctttacatgggactctcacatctggttttgtaggtaaagttcatggcaaagtagc

SEQ ID NO: 74662 - DNA, 545 bp, Homo sapiens
ctttctggacaagttaagctgtcctgtatgtcgtggaaccaaagctcggtaacctgtggaaaaatgatgagctctggggccacctttgattttcaggggaacctggaggatgtggcactctcatgctgcctctggaaggtccaggaccttcggccttttgaatcctcgatcccagattgtccacctgctctgtgctcccagctccaagtctagctctgctggacagaccattcatctgcccagagcccctcctcggtctctgggccccacacctgactctgaggctacatttgggcatgattcagacctgactccgagccccacaactggccacaggcaccccatctgtctgaggctctcacttgtctctgagaccctggcttcacacctggctctaaactccatttgtcttccaggccccgtgctcggatctgaatcccatgtggggtctgaggtccatagtaaggctcacgtctgccttggcacttagctttacatgggactctcacatctggttttgtaggtaaagttcatggcaaagtagc

SEQ ID NO: 74663 - DNA, 726 bp, Homo sapiens
gtgagccaagatcatgccactgcactccagcctgggtgacaagagtgagtgagactccttctcaaaaaaaaaaaaaaaaaaaaagaatcccagcatgtagcaagcaagcattgctatgtgtctgactttttctcatttatttctcacagcactacttcttcaatgtaaattttttgtccattttacagatgaaaaaactgaggattagagaagtgaaataatcttacccaggggtggcacactttttctgtagaggcccagatatatattttgggctttgtcagccatatgggtctctgtcacaagcatttggcttggctgttattgagagaacacagccataaatacctaaacagatgaaaaaataggaggtgggctggatgtggcccatgggcctcagtttcctggcccctcactcatttcactggtggacacatttctaacatgtaacagaagcaggatttacacccacatttttctgacttcgaagtccttacactttttcctatatgcatggaaacattttaggccaattgtgaaacctggtaactcaaagaaacttttttagatggttacagtatgggcataggtggtgctgtctgcatgaaagcccagaggcacggtggccagccaaacaaccaaacaaacctatggaacctcctggtgtcagtacctcctatacacaaggtggagtatggacatgaataaacctcttgaaaagggact

SEQ ID NO: 74664 - DNA, 1538 bp, Homo sapiens
ggctacgcaagaccttcagttccggattaggaggccccgccccccggcccgagggaggggcggagagacccgctcctgcgacttagggcgatgccaccttaaagggcttgacctcctcgaagccagaactgcggaagaggatggagaaagaaacgctagatagacccaggattcgaacccacaacagcttggatgcaaagctcattttgaattctgaagagctgggagtttagcagtggacgaccaaacaaaaaaataccagaagacggtgaaagcagcagctggaaatgagagaaaaattaagaaatagaaaatgctgtttcatgtattagggagtgcacatctttaaagagaagtgaagaacctttttggctaggcgctttctggggaccttggcagttatcaacaagtcactctgaaactaacagaaggtgaggagggagtaatccagaaaggaaactgccatttttgctagggcaagaaagtagacctagcaatgcaatgccatcaaggagttagctggctctagcgttctccgaactttgcaactcattttatattacattgtctgcgtcaagaaatttcaagtaaatgccttgagattttatatgtataaaatgtagtctctggccaggcggggtggctcacgcctgtaatcccagcactttgggaggctgaggcgagtagatcacgatgtcaggagatcaagaccatcctggctaacatggtgaaaccccgtctctactaaaaaatacaaaaaattagccgggcatgatggtgggcgcctgtagtcccagctactcgggaggctgagacaggagaatggtgtgaacccgggaggcagagcttgcagtgagccgagatcgcgccactgcactccagcctgggcgacagagcgagactccgtctcaaaaaaaaaaaaaaaaaaaaaagtctcagaagaagtgtcaagttgactaaatgatttttaagtcccttccactctactatatcacaataatttcccctattttaccttatttaattttcacaacaaccctgcagcctgtaagtaggtgactcctccatggtcagcaggtggtcagtggtcgaactatttaggactatctgatgctctttcctctgctcaccattgcaatacaatgagaaaaatgcaaatgaatctaagtacagtgttctctgggaatatgaagatagaactaaaaactgcctgagagatcagggcaggcttctagaaagttgtgtctaactagtcttgaggtttacataaaccacaccaggctgatgggactgggaagggcccactaagcagtgagaccattcccttttggagagtccttgcatcccctcccagatttcctctttgaggggaaggtgagagaggaggtaaaaggggtgaggaatggagaataactcattctggttcttgtttccccttttccacataaaagtatatttgtcttgtgttccatacaccagtccatactgatgtgatggtgttttttatgcttccttttgaataaacatttcattcttaa

SEQ ID NO: 74665 - DNA, 535 bp, Homo sapiens
ggcccggcagtgtgtatgtggggataactgtgaaaggatataggacttcatttggagtgataaaagtcttcaaagttgattgtgttggtggctgcacaactctgaatatactataaaccactgaatttgcactttagaaagtatgtccttgctacattccttttttggagttcttttatttcattcttttggaatcggagagaaacaagttgctgccccaggaaagcgtgcattttcggagatcactcattgcagaagaagccaactgccatgccagaggggcactcaaacagctctgcaaggaagtccctgtgataagcaactgaagactctgccatcggccatgagagcgccaccttggaaacagattcttcagccttagtcaaattttcagaagactgtatgtccagccaacttcttgactacaatccctttatagatcccaagctagaacctcccagctaagccactcctggattcctgaccctgagaaactctgtgagagaataaatgtttattcttgccttaagctcct

SEQ ID NO: 74666 - DNA, 842 bp, Homo sapiens
tctcgctctgttgcccaggctgcagcgcagtggctcaatctcggctcattgcaaactctgcctcccgcttcaagtgattctcctgcctcagcctcccgagtagctggaattataggcatgtaccactacacccagctaatttttgtatttttagtagaaatgggttttcaccattttggtcaggctggtctcaaactcctgacctcaagtgatccacccacctcagcctcccaaaatgcggggattacaggcatgaaccactgcacccagcccatactattatattggctattataattattaatcataatattaatattactttgggaggccgaggcaggcagatcacttgacatcaggagtcaagaccagcctgggcaacatggtgaaacaccatctgtactaaaaatacaaaacattagctgggcatggtggcgtgtgcctgtaatcccagttactcggaaggctgaggcaggagaattgcttgaacctgggaggcagaggttgcagtgagctgagatcctaccactgcactccagcctggatgacagagtgagattccgtctaaaaaaaaaatttgttataaatattaatagttagacatttccattttgtgaccacattctctgaattatcctcatgtttagcattttatttatttattatatcacccagcctggaatgcagtgatgccatttcagctcactgcaacctccgtctcctgggcaacatggtgaaacaccatctgtactaaaaatacaaaacattagctgggcgtggtggtgtgtgcctgtaatcccagttactcaaaaggctgaggcaggagaattgcttgaacctgg

SEQ ID NO: 74667 - DNA, 366 bp, Homo sapiens
ttaattatgaatctgctttgcaagaccctaaaataaagccatccatgaagcaaagcaattttcgtggccctgtgactgatcatgtgcttgccacttggctgatacccctggaccgtggcctgaagtgtcattactcttggctccagtctccagaaaacccagacataaactcactgtggtggatgcagatcaaaatgccatcccagagctggcttttaaaatgttttgaaaaattcattatccctctaagccattagatcactttgagccttatggggaacaaatgcatttctcacttctgtggaattctttcatgccaaaatagcctcctgaccaagcgcaacatctctgtacaaatcaattcat

SEQ ID NO: 74668 - DNA, 4559 bp, Homo sapiens
cgcctgcttttgcccgggtcctgagaacaggggctccccacactttgttttttttttttggttttgttttatttcgtttccgcgcgtctctttctactgcaaacagaaatgggagggtggacaggcgggtaggagcggatcagacgcccaggacgcagcagcccgagtccgcacagggtttgcgggaggtggtgaccgcgctggggacgccaggacgcgaatgaacctccggggcacgctcggggcctgcgctcagagcttggaaaactggagtttcttttcctccggccacggagagaacgcgggtaacctgtgtggggggctcgggcgcctgcgcccccctcctgcgcgcgcgctctcccttccaaaaatgggatctttcccccttcgcaccaaggtgtacggacgccaaacagtgatgaaatgagaagaaagccaattgccggcctggggggtgggggagacacagcgtctctgcgtgcgtccgccgcggagcccggagaccagtaattgcaccagacaggcagcgcatggggggctgggcgaggtcgccgcgtataaatagtgagatttccaatggaaaggcgtaaataacagcgctggtgatccacccgcgcgcacgggccgtcctctccgcgcggggagacgcgcgcatccaccagccccggctgctcgccagccccggccccagccatggaagagctcacggcttttgtatccaagtcttttgaccagaaaagcaaggacggtaacggcggaggcggaggcggcggaggtaagaaggattccattacgtaccgggaagttttggagagcggactggcgcgctcccgggagctggggacgtcggattccagcctccaggacatcacggagggcggcggccactgcccggtgcatttgttcaaggaccacgtagacaatgacaaggagaaactgaaagaattcggcaccgcgagagtggcagaagggatttatgaatgcaaagagaagcgcgaggacgtgaagtcggaggacgaggacgggcagaccaagctgaaacagaggcgcagccgcaccaacttcacgctggagcagctgaacgagctcgagcgactcttcgacgagacccattaccccgacgccttcatgcgcgaggagctcagccagcgcctggggctctccgaggcgcgcgtgcaggtttggttccagaaccggagagccaagtgccgcaaacaagagaatcagatgcataaaggcgtcatcttgggcacagccaaccacctagacgcctgccgagtggcaccctacgtcaacatgggagccttacggatgcctttccaacaggtccaggctcagctgcagctggaaggcgtggcccacgcgcacccgcacctgcacccgcacctggcggcgcacgcgccctacctgatgttccccccgccgcccttcgggctgcccatcgcgtcgctggccgagtccgcctcggccgccgccgtggtcgccgccgccgccaaaagcaacagcaagaattccagcatcgccgacctgcggctcaaggcgcggaagcacgcggaggccctggggctctgacccgccgcgcagccccccgcgcgcccggactcccgggctccgcgcaccccgcctgcaccgcgcgtcctgcactcaaccccgcctggagctccttccgcggccaccgtgctccgggcaccccgggagctcctgcaagaggcctgaggagggaggctcccgggaccgtccacgcacgacccagccagaccctcgcggagatggtgcagaaggcggagcgggtgagcggccgtgcgtccagcccgggcctctccaaggctgcccgtgcgtcctgggaccctggagaagggtaaacccccgcctggctgcgtcttcctctgctataccctatgcatgcggttaactacacacgtttggaagatccttagagtctattgaaactgcaaagatcccggagctggtctccgatgaaaatgccatttcttcgttgccaacgattttctttactaccatgctccttccttcatcccgagaggctgcggaacgggtgtggatttgaatgtggacttcggaatcccaggaggcaggggccgggctctcctccaccgctcccccggagcctcccaggcagcaataaggaaatagttctctggctgaggctgaggacgtgaaccgcgggctttggaaagggaggggagggagacccgaacctcccacgttgggactcccacgttccggggacctgaatgaggaccgactttataacttttccagtgtttgattcccaaattgggtctggttttgttttggattggtatttttttttttttttttttttgctgtgttacaggattcagacgcaaaagacttgcataagagacggacgcgtggttgcaaggtgtcatactgatatgcagcattaactttactgacatggagtgaagtgcaatattataaatattatagattaaaaaaaaaatagccgtgcactcttgaccccgtcaacgtccaacgtggaaaaggcgttacctcttctcccagcgctggccgcctggcactgagggtccctttgcaaaaatcacgggtgtagagatggccctgggcgcgctgggagtgtggttgtgtttctgaaggggataaaagagggcacggtggtgccaagatatcagtttggtacctgagctgtttctggttgggaagcgtaaaagccagggagagatccagagagttttcaagtttttgcagatgtaggtggttccagcttttctttctcccctactccatcttctgcgttcccccagttcttttatttctttgttttttatttttgagacagagacttgctttgtcgcccaggctggagcgcagtcccgcaatgtcagctcaccgccacctccgccccccgggttcaagcgatgctcctgcctcagcctcccgagtagctgggactacaggcacctgccaccaccacccccgccatattttttgtatttatagtagagacggcgtttcaccgtgttggccaggctcgtctcggaactcctgacctcaggtgatctgcccgcctcggcctcccaacgtgcccccagttttataaacagcagatagcaacttgtcgtcacagctggcatgggctggacagttgcttgaaatgacctaaccaaaaacattcaagggttctgcccccagatttcgggagatccacgttccatgttctgattggttttctgggaacacagcaaggggtttggtgacctccgagaagatccatctgcatgattggcattagttaccacagccagcccagagagaaactatcttctcccaacatttactaacatccactggtcaactctcttatttccataacacatttgcatctttctggattcaagcttggtggttttctttcctaacttctgatttagatacttctccctcgaggtggggataaaagaaaaaaaaaaacaacttcttttttgcttccgcataacacttcctatcttgtcactgagctgaactgtagatccatttggacccgtctcatttgtatcttctgatattctttatacaaaccaaaagtccccttcaacattttttatgtcaaaatgttacaaccgctgtaaaatgacggagagagagagaaagaatcccagacattaacggtattagagagtttgcctcattcatccatttttcttaaaagctggaaattaaaaaaaaaaaagaggagagaggctttcggtggacacgtttgacattaaaaaaaaaaaaaaaaaaaaaaactggtgcctaatttattaaagagaattagcttagcgatgtatattctgatattcttcgacacacgtgggtaagttgatgccatttataaatgttttattgaaatttgatatttaatgagaagccggttaaggaatgtagacaatatcccgtttcaaagctatgaaatgtgctatttattgaaaggggatgtggcttcacgagttcagcccattgtacgtgcaggtcccgtgggaaggaggcaaaagcccctgcttcttactttgtgatgtatgtggatttgttatttatttttttttttccttggtcggacgttcataaatatgtactattttaattatgtcgagtgtaaatttgacatcgcgttgcatttatttttatatttctgaaaactgttgctttttctttttccctcccccattgacgacatagcggcccccggtccgggttacaaatacatctacagatattttcagggattgcttcagatgaaaacaaatcacacaccgtttcccaaaccaacagtcttcacatttctatccctctgttattgtcggcaggcggtgaggggtagaaaaaaaaacaaacaaacaaacaaaaaaaaaaccaaaaaaaaccaccctgagtttctctggtgacgccctcattctcctttcgttcaataactcaatgttgagttgcagcaacagactgtatctttgtgacgccccgtagtatgaatgtacatcttgtaaaactgagatataaataaacttataaatatttgt

SEQ ID NO: 74669 - DNA, 1953 bp, Homo sapiens
cgcctgcttttgcccgggtcctgagaacaggggctccccacactttgttttttttttttggttttgttttatttcgtttccgcgcgtctctttctactgcaaacagaaatgggagggtggacaggcgggtaggagcggatcagacgcccaggacgcagcagcccgagtccgcacagggtttgcgggaggtggtgaccgcgctggggacgccaggacgcgaatgaacctccggggcacgctcggggcctgcgctcagagcttggaaaactggagtttcttttcctccggccacggagagaacgcgggtaacctgtgtggggggctcgggcgcctgcgcccccctcctgcgcgcgcgctctcccttccaaaaatgggatctttcccccttcgcaccaaggtgtacggacgccaaacagtgatgaaatgagaagaaagccaattgccggcctggggggtgggggagacacagcgtctctgcgtgcgtccgccgcggagcccggagaccagtaattgcaccagacaggcagcgcatggggggctgggcgaggtcgccgcgtataaatagtgagatttccaatggaaaggcgtaaataacagcgctggtgatccacccgcgcgcacgggccgtcctctccgcgcggggagacgcgcgcatccaccagccccggctgctcgccagccccggccccagccatggaagagctcacggcttttgtatccaagtcttttgaccagaaaagcaaggacggtaacggcggaggcggaggcggcggaggtaagaaggattccattacgtaccgggaagttttggagagcggactggcgcgctcccgggagctggggacgtcggattccagcctccaggacatcacggagggcggcggccactgcccggtgcatttgttcaaggaccacgtagacaatgacaaggagaaactgaaagaattcggcaccgcgagagtggcagaagggatttatgaatgcaaagagaagcgcgaggacgtgaagtcggaggacgaggacgggcagaccaagctgaaacagaggcgcagccgcaccaacttcacgctggagcagctgaacgagctcgagcgactcttcgacgagacccattaccccgacgccttcatgcgcgaggagctcagccagcgcctggggctctccgaggcgcgcgtgcaggtttggttccagaaccggagagccaagtgccgcaaacaagagaatcagatgcataaaggcgtcatcttgggcacagccaaccacctagacgcctgccgagtggcaccctacgtcaacatgggagccttacggatgcctttccaacagatggagttttgctcttgtcgcccaggctggagtataatggcatgatctcgactcactgcaacctccgcctcccgagttcaagcgattctcctgcctcagcctcccgagtagctgggattacaggtgcccaccaccatgtcaagataatgtttgtattttcagtagagatggggtttgaccatgttggccaggctggtctcgaactcctgacctcaggtgatccacccgccttagcctcccaaagtgctgggatgacaggcgtgagcccctgcgcccggcctttgtaactttatttttaatttttttttttttttaagaaagacagagtcttgctctgtcacccaggctggagcacactggtgcgatcatagctcactgcagcctcaaactcctgggctcaagcaatcctcccacctcagcctcctgagtagctgggactacaggcacccaccaccacacccagctaatttttttgatttttactagagacgggatcttgctttgctgctgaggctggtcttgagctcctgagctccaaagatcctctcacctccacctcccaaagtgttagaattacaagcatgaaccactgcccgtggtctccaaaaaaaggactgttacgtggat

SEQ ID NO: 74670 - DNA, 378 bp, Homo sapiens
ggccacgtcagcacgtgggagcatctgtggataccgcagagtctggggacagctgggcgtttaaccgaaatgaagccgagacgggtttcaggttttggtgccaagctctggtcaggatgaaagggaaataccagagtcctctgtcctcgcctctgggtttcatgctgacctttctaacatttgttttcccctaagaacaagcagaagcctccagctccctttagctccacagttttcccggggacatagcgaggatggcacacggcagccactcccacgacacacatttcggaggcactttgctggaagccgcttgtctcctccagctttgggaggtctggggaggagagaggctttcggtggacacgtttgacatta

SEQ ID NO: 74671 - DNA, 1231 bp, Homo sapiens
ggctctactgtgaagagtagtctcattacacatcaacaaacccatacagaagagaaatcctatatgtgcagtgagtgtggaaagggctttacaatgaagcgctatctaattgctcatcagcgaactcatagtggagagaaaccttatgtgtgcaaagaatgtggaaaaggtttcactgtgaagagcaatctcattgtacatcagcgaactcatacaggggagaaaccctatatatgcagtgaatgtggaaaaggcttcaccatgaagcgctatcttgttgtacatcagcgaactcatactggagagaaaccctatatgtgcagtgaatgtggaaaaggctttaccgtgaagagcaatctcattgtacatcagcgctcccacacaggagaaaaatcttacatatgcagcgaatgtggaaaaggcttcactgtcaaacgcactctcgttatacatcagcgaactcatacaggagagaaatcttacatatgcaatgaatgtggtaaaggcttcaccacaaagcgcactcttattatacatcagcgaactcatacaggagaaaaaccctatgaatgcaatgaatgtggtaaagccttcagccagaaaatatgcctcatacaacatgagagatgtcatacaggaaagactccctttgtatgtaccgagtgcggaaaatcctattcacacaaatatggcctcattacccatcagagaattcacacaggagagaaaccttatgagtgcaatgaatgtggaaaagccttcaccacaaagtcagtactcaatgtacatcaaagaacgcatacaggagagaggccgtatggatgcagtgattgtgagaaagccttctcccacttatcaaaccttgtcaaacataagaaaatgcacacaagagaaatgggtagaatcagtcaagttgaaaactcctgtaatggagagtcacagctccttccttataagtgaactcatgcagaagaaaaccctactagtgccgtgactatggaaatgccttttgtggcaactcagacttcattaaacatcagtgtgtttctagccaattggaacataaacatggtgctgcctgttgacagatgtgtgtctgtcctcaggaggtgaaataatttgccctagagatcaatttgatgaatacagtaaataaggtagtgcctttagtggtcttttacctcatattttctgtcaatgaaaatacgttgaataaactatattaatgtgg

SEQ ID NO: 74672 - DNA, 1177 bp, Homo sapiens
ggctctactgtgaagagtagtctcattacacatcaacaaacccatacagaagagaaatcctatatgtgcagtgagtgtggaaagggctttacaatgaagcgctatctaattgctcatcagcgaactcatagtggagagaaaccttatgtgtgcaaagaatgtggaaaaggtttcactgtgaagagcaatctcattgtacatcagcgaactcatacaggggagaaaccctatatatgcagtgaatgtggaaaaggcttcaccatgaagcgctatcttgttgtacatcagcgaactcatactggagagaaaccctatatgtgcagtgaatgtggaaaaggctttaccgtgaagagcaatctcattgtacatcagcgctcccacacaggagaaaaatcttacatatgcagcgaatgtggaaaaggcttcactgtcaaacgcactctcgttatacatcagcgaactcatacaggagagaaatcttacatatgcaatgaatgtggtaaaggcttcaccacaaagcgcactcttattatacatcagcgaactcatacaggagaaaaaccctatgaatgcaatgaatgtggtaaagccttcagccagaaaatatgcctcatacaacatgagagatgtcatacaggaaagactccctttgtatgtaccgagtgcggaaaatcctattcacacaaatatggcctcattacccatcagagaattcacacaggagagaaaccttatgagtgcaatgaatgtggaaaagccttcaccacaaagtcagtactcaatgtacatcaaagaacgcatacaggagagaggccgtatggatgcagtgattgtgagaaagccttctcccacttatcaaaccttgtcaaacataagaaaatgcacacaagagaaatgggtagaatcagtcaagttgaaaactcctgtaatggagagtcacagctccttccttataagtgaactcatgcagaagcattaaacatcagtgtgtttctagccaattggaacataaacatggtgctgcctgttgacagatgtgtgtctgtcctcaggaggtgaaataatttgccctagagatcaatttgatgaatacagtaaataaggtagtgcctttagtggtcttttacctcatattttctgtcaatgaaaatacgttgaataaactatattaatgtgg

SEQ ID NO: 74673 - DNA, 3468 bp, Homo sapiens
ggctctactgtgaagagtagtctcattacacatcaacaaacccatacagaagagaaatcctatatgtgcagtgagtgtggaaagggctttacaatgaagcgctatctaattgctcatcagcgaactcatagtggagagaaaccttatgtgtgcaaagaatgtggaaaaggtttcactgtgaagagcaatctcattgtacatcagcgaactcatacaggggagaaaccctatatatgcagtgaatgtggaaaaggcttcaccatgaagcgctatcttgttgtacatcagcgaactcatactggagagaaaccctatatgtgcagtgaatgtggaaaaggctttaccgtgaagagcaatctcattgtacatcagcgctcccacacaggagaaaaatcttacatatgcagcgaatgtggaaaaggcttcactgtcaaacgcactctcgttatacatcagcgaactcatacaggagagaaatcttacatatgcaatgaatgtggtaaaggcttcaccacaaagcgcactcttattatacatcagcgaactcatacaggagaaaaaccctatgaatgcaatgaatgtggtaaagccttcagccagaaaatatgcctcatacaacatgagagatgtcatacaggaaagactccctttgtatgtaccgagtgcggaaaatcctattcacacaaatatggcctcattacccatcagagaattcacacaggagagaaaccttatgagtgcaatgaatgtggaaaagccttcaccacaaagtcagtactcaatgtacatcaaagaacgcatacaggagagaggccgtatggatgcagtgattgtgagaaagccttctcccacttatcaaaccttgtcaaacataagaaaatgcacacaagagaaatgggtagaatcagtcaagttgaaaactcctgtaatggagagtcacagctccttccttataagtgaactcatgcagaagaaaaccctactagtgccgtgactatggaaatgccttttgtggcaactcagacttcattaaacatcagtgtgtttctagccaattggaacataaacatggtgctgcctgttgacagatgtgtgtctgtcctcaggaggtgaaataatttgccctagagatcaatttgatgaatacagtaaataaggtagtgcctttagtggtcttttacctcatattttctgtcaatgaaaatacgttgaataaactatattaatgtggagatgttttgagcaataatttctgctcatatgtctgaaaagtatacagagataaattctgtgaatacaaagactaagaaaagtcttctgtggaaagatagactttattatcaggtttcatcatagatttcaacgtaagtgagcttattgttgatagaaacatgatgaccatgacaaagtctttactcagaaatatgacctcagtgagtgtcaaagtttacactggaaaataactttaaggtgacagtattgatggcaggatttcagcgacgcactctgcttcatcatttgtcaggagatcacatagaaagtaaaattgttccgaacatgctatcaaataaatgtggaacacctttagcaaactatcaacagctcatgaaggcatgaaatgtgaaaatgatgaatatttgagtgctttttcttaataagtataaccttaaacatcagctaatacacctggtgtgcattttcagtcaggataccttaatcctcatttctagttgccttgccaatgattccataatatactgtctcattactgtttatttttactgttgtgtaaaattgtggtataatgagaaatacatttggtctttgttcctggttcctggcatagagctcctaaaacgcttagaatttcatgagtgataagagttttttggttttgttttgtttttgctgttgttgttattcatagcactgcccttttaattacacctgattatactactgaagtgacttatggttgctcccctagacagcctcagaatggggctgttctctaggaagatcaagtaactagaggatggagactttgtgccccatttctcccacctcctggaaggggaggggtgctggagattagattagacaatgagattaagagaactccaaatagcccaagagggtggtgcacccccaacttcataggggtagaggctcctgagattaggagaaccctttttaggctttactctatgtacctcttcatttgagtgttcatttgcgtcctttataaccagtaaaacaaagtacgctgttttcttgagttttgtgagccctgtagcaaattatcaaacctgagtagggcagtgggaactcggaatttatcaccattcagaactgcaggttgtccttgtgagtggcatctgatgtgggggaagtcttggactgagccccttaacttgtggagtctgcactaatttagactgcactaactaacttgcactgcactaacttggactgcactaacttgtggagtctgcactaacttggagaagttagtgtcagaattgaattatagaacacccagttgttcagaattgaattgtagaacacccaattggtgtgggagaattagagaatttatttgtgtcagaaaatactccagaacaaccaccccatattatgattagctcttttcctttctttggctctgagcttaattgtacattaagcaaacttaagtagaaaagaaactgaatatgttaaatatattaacaacatatttggacttgcttaactaagattatagagatgatcagtttataaaaccaccttcaacttaaataaatttgaactcgaaattgcaaaagcagtctagaggctttgctagtatccttcaaccaatttctagtaaaaatatcctatataaccataattatcaaaaccagaaaaacaacattggtaggatactataaagtaaactaatcttattttggatttgacgaatttttacatgtttttttcttttttagtttgtactctaagaagttgtattacatgtacagattcgtgtaaccactgcaaccacataaaactaatgaacacaaagtccctcatgctacctttttatgcttacactccatccaaacctaactctgccaaccacttttctcctatcagtataatttcatcatttcatgaatatgataaaaataaaattgtttttgtaaatggtttttataaattttatataaataagttatatgaatttttattgatagagagtatgtaagcttttggcatttttgtcactcagcaaattactcctaaggtttatatgagttgatgaatagttgttttattatttttttttaccaccatgtatctaaccagatgaaagttgtttatatttgagagtagtatacatatttgatgtagtagtttatccattcacctatgagatatatttgcactgttttcctggttttaagtgctataaataaagatgctgtg

SEQ ID NO: 74674 - DNA, 557 bp, Homo sapiens
cgctcgtgtggcacagcccccaccgactcctatacacatagagatctacactgagtcttttcaacgtggtgcatatcttcttatctagagatacacacagtgtctccaccggacgcgtgggtcgacttagcaaccacctcataggcccacccacctcgggatccgagccaaccatcccacatcacaaactttggtttgggggactttacgttcgtttaatttctcattttgtacggagaaatattcttttcaaaagcgtcttttgactgaagtaactttcctggtgctgttgttaactcgttcctttttttaatttattcccccaccccaggcagccctcctggttcctactcaccctccccccctcccccaccctccgtcccatctgaaccatttgtttcttttctttccgtcagattttggaaaaattctcctctcctccccgccccctccacaccatcctccccgatttaaatatagtcactgctacaagtaacagatgcactgtgaagattccagtattaataaaggtgtactgtaattaacaaaaaaaactc

SEQ ID NO: 74675 - DNA, 484 bp, Homo sapiens
aagcaggctggtctggtctgggaattttaggattgactcccccggctacatggggcccacacgggcgggcagtgaggagtgcgtcttctataccgacgagaccgcctcacccctggcaccggacctcgccaaggcctccccaaagaggctcagcctgcccaacacagcctggggcagcccatccccagaggcagccgggtaccccggggcaggggccgaggacgagcagcagcagctggcggccaaccggcacagcctggtggagaagctgggggagctggtggcgggtgcccacgcactgggtgagggccagttccccttccccactgctctgtcggccacccccacggaggagacgcccaccccacccccagccgccaccagcgaccccccggccgaagacatgctggtggccatccggcgtggggtccggctccgcaggaccgtcaccaacgacaggtcggcgccccgcatcttatgatgg

SEQ ID NO: 74676 - DNA, 1547 bp, Homo sapiens
  misc_feature (20)..(20): n is a, c, g, or t
tccgctcggacgaggactangtgtgggggagaggggacgatacagggtgtgtgtctgggagtgcctgggggacagggaccccccggtggtcctatggcaggatgagaagggagggacttggctcccccagagcccggtggaagctactgttctctccagtgtctcgagcgtagccaaaataaggttgggaggctcccggcctgtctgctgtggtctgagctggctgcaagcccaggtgggggagcgagtctgggaagattggctttgactctctgttgccagaggagatgccatcccagcacggcccccactgtagtccaggctcgtggtggcagcgggggcaaggggaggggcaaggctgcccccaccccacgcaccaagtcacgccaagtctcagcaggtaaaagcacgtgagcctagggcgagcggagggagtcctggtggccccgcaggtcaggagggaaagcagggctcagagggcatcgtggccccagggcagggtcctacctgggggtcaggagcaccttggtcttgatgattgattgattgatagaatggagctgggtctgagcctcccaggcttgagctcctgggagttcttgtgcggtgagctgggcagctcctgggtaggtccgggcaccaagcaggccctgatgtggacagagtcccatcagagggagctgatgaagaatggtccctgtaagtaagtcactaggttcaacaactgcctggccgagcactcagcccgtggagctcaggccaacaccagagccccggttttaggggccaggagagcaggtgaccaattatttggggagtcttgggtagaatttccgccacacattctccccagggctgcaggggtcttccgaggcagggcggtggagcaggattcaggatgtggtgggaatagagtgaggggcagtgggtgggcagacctgggcgtcagaggtcctgatgggaaaggaggcaggggctacccagagaggggggctcgtgtggcacagcccccaccgactccgccgtccccctcccctgtgagccccgggggctgtacatactctactccatccccttgtccatccctgagaccacccccgccgcccttgcgtcgacttagcaaccacctcataggcccacccacctcgggatccgagccaaccatcccacatcacaaactttggtttgggggactttacgttcgtttaatttctcattttgtacggagaaatattcttttcaaaagcgtcttttgactgaagtaactttcctggtgctgttgttaactcgttcctttttttaatttattcccccaccccaggcagccctcctggttcctactcaccctccccccctcccccaccctccgtcccatctgaaccatttgtttcttttctttccgtcagattttggaaaaattctcctctcctccccgccccctccacaccatcctccccgatttaaatatagtcactgctacaagtaacagatgcactgtgaagattccagtattaataaaggtgtactgtaattaacaaaaaaaactc

SEQ ID NO: 74677 - DNA, 1503 bp, Homo sapiens
  misc_feature (20)..(20): n is a, c, g, or t
tccgctcggacgaggactangtgtgggggagaggggacgatacagggtgtgtgtctgggagtgcctgggggacagggaccccccggtggtcctatggcaggatgagaagggagggacttggctcccccagagcccggtggaagctactgttctctccagtgtctcgagcgtagccaaaataaggttgggaggctcccggcctgtctgctgtggtctgagctggctgcaagcccaggtgggggagcgagtctgggaagattggctttgactctctgttgccagaggagatgccatcccagcacggcccccactgtagtccaggctcgtggtggcagcgggggcaaggggaggggcaaggctgcccccaccccacgcaccaagtcacgccaagtctcagcaggtaaaagcacgtgagcctagggcgagcggagggagtcctggtggccccgcaggtcaggagggaaagcagggctcagagggcatcgtggccccagggcagggtcctacctgggggtcaggagcaccttggtcttgatgattgattgattgatagaatggagctgggtctgagcctcccaggcttgagctcctgggagttcttgtgcggtgagctgggcagctcctgggtaggtccgggcaccaagcaggccctgatgtggacagagtcccatcagagggagctgatgaagaatggtccctgtaagtaagtcactaggttcaacaactgcctggccgagcactcagcccgtggagctcaggccaacaccagagccccggttttaggggccaggagagcaggtgaccaattatttggggagtcttgggtagaatttccgccacacattctccccagggctgcaggggtcttccgaggcagggcggtggagcaggattcaggatgtggtgggaatagagtgaggggcagtgggtgggcagacctgggcgtcagaggtcctgatgggaaaggaggcaggggctacccagagaggggggctcgtgtggcacagcccccaccgactccgccgtccccctcccctgtgagccccgggggctgtacatactctactccatccccttgtccatccctgagaccacccccgccgcccttgcgtcgacttagcaaccacctcataggcccacccacctcgggatccgagccaaccatcccacatcacaaactttggtttgggggactttacgttcgtttaatttctcattttgtacggagaaatattcttttcaaaagcgtcttttgactgaagtaactttcctggtgctgttgttaactcgttcctttttttaatttattcccccaccccaggcagccctcctggttcctactcaccctccccccctcccccaccctccgtcccatctgaaccatttgtttcttttctttccgtcagattttggaaaaattctgagacggagtcttgctctgttgcccaggctggagtgcagtggtgtgatctctgctcactgcaacctctgcctcccgggttc

SEQ ID NO: 74678 - DNA, 1493 bp, Homo sapiens
  misc_feature (20)..(20): n is a, c, g, or t
tccgctcggacgaggactangtgtgggggagaggggacgatacagggtgtgtgtctgggagtgcctgggggacagggaccccccggtggtcctatggcaggatgagaagggagggacttggctcccccagagcccggtggaagctactgttctctccagtgtctcgagcgtagccaaaataaggttgggaggctcccggcctgtctgctgtggtctgagctggctgcaagcccaggtgggggagcgagtctgggaagattggctttgactctctgttgccagaggagatgccatcccagcacggcccccactgtagtccaggctcgtggtggcagcgggggcaaggggaggggcaaggctgcccccaccccacgcaccaagtcacgccaagtctcagcaggtaaaagcacgtgagcctagggcgagcggagggagtcctggtggccccgcaggtcaggagggaaagcagggctcagagggcatcgtggccccagggcagggtcctacctgggggtcaggagcaccttggtcttgatgattgattgattgatagaatggagctgggtctgagcctcccaggcttgagctcctgggagttcttgtgcggtgagctgggcagctcctgggtaggtccgggcaccaagcaggccctgatgtggacagagtcccatcagagggagctgatgaagaatggtccctgtaagtaagtcactaggttcaacaactgcctggccgagcactcagcccgtggagctcaggccaacaccagagccccggttttaggggccaggagagcaggtgaccaattatttggggagtcttgggtagaatttccgccacacattctccccagggctgcaggggtcttccgaggcagggcggtggagcaggattcaggatgtggtgggaatagagtgaggggcagtgggtgggcagacctgggcgtcagaggtcctgatgggaaaggaggcaggggctacccagagaggggggctcgtgtggcacagcccccaccgactccgccgtccccctcccctgtgagccccgggggctgtacatactctactccatccccttgtccatccctgagaccacccccgccgcccttgcgtcgacttagcaaccacctcataggcccacccacctcgggatccgagccaaccatcccacatcacaaactttggtttgggggactttacgttcgtttaatttctcattttgtacggagaaatattcttttcttttttaatttattcccccaccccaggcagccctcctggttcctactcaccctccccccctcccccaccctccgtcccatctgaaccatttgtttcttttctttccgtcagattttggaaaaattctcctctcctccccgccccctccacaccatcctccccgatttaaatatagtcactgctacaagtaacagatgcactgtgaagattccagtattaataaaggtgtactgtaattaacaaaaaaaactc

SEQ ID NO: 74679 - DNA, 1361 bp, Homo sapiens
  misc_feature (20)..(20): n is a, c, g, or t
tccgctcggacgaggactangtgtgggggagaggggacgatacagggtgtgtgtctgggagtgcctgggggacagggaccccccggtggtcctatggcaggatgagaagggagggacttggctcccccagagcccggtggaagctactgttctctccagtgtctcgagcgtagccaaaataaggttgggaggctcccggcctgtctgctgtggtctgagctggctgcaagcccaggtgggggagcgagtctgggaagattggctttgactctctgttgccagaggagatgccatcccagcacggcccccactgtagtccaggctcgtggtggcagcgggggcaaggggaggggcaaggctgcccccaccccacgcaccaagtcacgccaagtctcagcaggtaaaagcacgtgagcctagggcgagcggagggagtcctggtggccccgcaggtcaggagggaaagcagggctcagagggcatcgtggccccagggcagggtcctacctgggggtcaggagcaccttggtcttgatgattgattgattgatagaatggagctgggtctgagcctcccaggcttgagctcctgggagttcttgtgcggtgagctgggcagctcctgggtaggtccgggcaccaagcaggccctgatgtggacagagtcccatcagagggagctgatgaagaatggtccctgtaagtaagtcactaggttcaacaactgcctggccgagcactcagcccgtggagctcaggccaacaccagagccccggttttaggggccaggagagcaggtgaccaattatttggggagtcttgggtagaatttccgccacacattctccctgtgagccccgggggctgtacatactctactccatccccttgtccatccctgagaccacccccgccgcccttgcgtcgacttagcaaccacctcataggcccacccacctcgggatccgagccaaccatcccacatcacaaactttggtttgggggactttacgttcgtttaatttctcattttgtacggagaaatattcttttcaaaagcgtcttttgactgaagtaactttcctggtgctgttgttaactcgttcctttttttaatttattcccccaccccaggcagccctcctggttcctactcaccctccccccctcccccaccctccgtcccatctgaaccatttgtttcttttctttccgtcagattttggaaaaattctcctctcctccccgccccctccacaccatcctccccgatttaaatatagtcactgctacaagtaacagatgcactgtgaagattccagtattaataaaggtgtactgtaattaacaaaaaaaactc

SEQ ID NO: 74680 - DNA, 1013 bp, Homo sapiens
agctgtaccgcccggaagtacgggatctgggtctgagcctcccaggcttgagctcctgggagttcttgtgcggtgagctgggcagctcctgggtaggtccgggcaccaagcaggccctgatgtggacagagtcccatcagagggagctgatgaagaatggtccctgtaagtaagtcactaggttcaacaactgcctggccgagcactcagcccgtggagctcaggccaacaccagagccccggttttaggggccaggagagcaggtgaccaattatttggggagtcttgggtagaatttccgccacacattctccccagggctgcaggggtcttccgaggcagggcggtggagcaggattcaggatgtggtgggaatagagtgaggggcagtgggtgggcagacctgggcgtcagaggtcctgatgggaaaggaggcaggggctacccagagaggggggctcgtgtggcacagcccccaccgactccgccgtccccctcccctgtgagccccgggggctgtacatactctactccatccccttgtccatccctgagaccacccccgccgcccttgcgtcgacttagcaaccacctcataggcccacccacctcgggatccgagccaaccatcccacatcacaaactttggtttgggggactttacgttcgtttaatttctcattttgtacggagaaatattcttttcaaaagcgtcttttgactgaagtaactttcctggtgctgttgttaactcgttcctttttttaatttattcccccaccccaggcagccctcctggttcctactcaccctccccccctcccccaccctccgtcccatctgaaccatttgtttcttttctttccgtcagattttggaaaaattctcctctcctccccgccccctccacaccatcctccccgatttaaatatagtcactgctacaagtaacagatgcactgtgaagattccagtattaataaaggtgtactgtaattaacaaaaaaaactc

SEQ ID NO: 74681 - DNA, 2390 bp, Homo sapiens
  misc_feature (120)..(120): n is a, c, g, or t
  misc_feature (260)..(260): n is a, c, g, or t
  misc_feature (298)..(298): n is a, c, g, or t
cgccgcgagctgcccgcgccgcgccccccgcgccgcccgccagccccgctgcgacatggcccgcgccgcccgccggaggccgcgaccccggagcgcggcgcggccggccgctgagcgcanctggaggcgggaggcccggcccggcctcggagcgagcgcccgcgcggcctggccccctcccttgcgctgctccccgcgctccgtgcgcctagccgccgccgcggcccggcccagccagagcatggagacggcggagaagnagtgcgggccctgggcgggctcttccaggccatagtcnacgacatgaagagctcctaccctatctgggaggacttcaactccaaggccacgaagctgcattcccagctgaggaccaccgtgctggctgctgtggccttcctggatgccttccagaaagtggctgacatggctaccaacacccgaggggccacgagggacatcggctcggcgctcacacgcatgtgcatgcgccaccgcagcatcgagaccaagctgcggcagttcaccaacgcactgctggagagcctcatcaacccgctgcaggagcgcatcgaggactggaagaaggcggccaaccagctggacaaggaccacgcgaaagagtacaaacgagcccggcatgagatcaaaaagaagtcgtcggacacgctgaagctgcagaagaaggcgcgcaaagagctacttgggaaaggagacctgcagccccagctggacagtgccctgcaggacgtcaacgacatgtacctgctgctggaggagacggagaagcaggccgtgcgccgggcgctgatcgaggagcggggccgcttctgcaccttcatcaccttcctgcagcctgtggtgaatggagagctgaccatgctgggagagatcacccacctgcagggcatcatcgacgacttggtggtgctgacagcagaaccccacaaactgcctcccgccagcgagcaggtaatcaaagacctaaagggctcggactacagctggtcctaccagaccccaccctcatcacccagcagctccagctcccggaagtccagcatgtgcagcctggcgcagccagccaccaccaccgctcgcctctccagcgtttcctcccatgactctggcttcgtctcccaggacgccacctactccaagcccccctcgcctatgccttcagacatcaccagccagaagtcctccagctctgcatcttccgaggcctcggaaacctgccagtccgttagcgagtgcagctcccccacctcggactggtccaaggtcggctcccatgagcagccctcaggcgccactctgcagcggaggaaggaccgagtggagctcctgcgagacacagagccaggccctgccagtgggggcaccctgggccccagcggggaagaggcaccgcgaccccggatgtcccctgccaccatcgcagccaagcacggtgaggaggtgtcccccgccgccagtgacctggccatggtgctgacgcggggcctgagcctggagcaccagaagagcagccgggactcgctgcagtactccagcggctacagcacgcagaccaccacgccctcctgctctgaggacaccatcccctcccaaggctccgactacgactgctactccgtgaatggggatgcggacagcgagggcccgcccgagtttgacaagtcatccaccatcccgcgcaacagcaacatcgcccagaactaccgccgcctgatccagaccaagcgcccagcctccactgctgggctgcccaccgggggctgcccacgggcactggcctgccctcggggcgcaccccccgggtggccaccatccgccgcacaccctccaccaagcccaccgtgcgccgcgccctgtccagcgctggccccatccccatccggccgcccatcgtccctgtgaagacgcccacggtgcctgactcccccggctacatggggcccacacgggcgggcagtgaggagtgcgtcttctataccgacgagaccgcctcacccctggcaccggacctcgccaaggcctccccaaagaggctcagcctgcccaacacagcctggggcagcccatccccagaggcagccgggtaccccggggcaggggccgaggacgagcagcagcagctggcggccaaccggcacagcctggtggagaagctgggggagctggtggcgggtgcccacgcactgggtgagggccagttccccttccccactgctctgtcggccacccccacggaggagacgcccaccccacccccagccgccaccagcgaccccccggccgaagacatgctggtggccatccggcgtggggtccggctccgcaggaccgtcaccaacgacaggtcggcgccccgcatcttatgatgg

SEQ ID NO: 74682 - DNA, 1209 bp, Homo sapiens
  misc_feature (120)..(120): n is a, c, g, or t
  misc_feature (260)..(260): n is a, c, g, or t
  misc_feature (298)..(298): n is a, c, g, or t
cgccgcgagctgcccgcgccgcgccccccgcgccgcccgccagccccgctgcgacatggcccgcgccgcccgccggaggccgcgaccccggagcgcggcgcggccggccgctgagcgcanctggaggcgggaggcccggcccggcctcggagcgagcgcccgcgcggcctggccccctcccttgcgctgctccccgcgctccgtgcgcctagccgccgccgcggcccggcccagccagagcatggagacggcggagaagnagtgcgggccctgggcgggctcttccaggccatagtcnacgacatgaagagctcctaccctatctgggaggacttcaactccaaggccacgaagctgcattcccagctgaggaccaccgtgctggctgctgtggccttcctggatgccttccagaaagtggctgacatggctaccaacacccgaggggccacgagggacatcggctcggcgctcacacgcatgtgcatgcgccaccgcagcatcgagaccaagctgcggcagttcaccaacgcactgctggagagcctcatcaacccgctgcaggagcgcatcgaggactggaagaaggcggccaaccagctggacaaggaccacgcgaaagagtacaaacgagcccggcatgagatcaaaaagaagtcgtcggacacgctgaagctgcagaagaaggcgcgcaaagagctacttgggaaaggagacctgcagccccagctggacagtgccctgcaggacgtcaacgacatgtacctgctgctggaggagacggagaagcaggccgtgcgccgggcgctgatcgaggagcggggccgcttctgcaccttcatcaccttcctgcagcctgtggtgaatggagagctgaccatgctgggagagatcacccacctgcagggcatcatcgacgacttggtggtgctgacagcagaaccccacaaactgcctcccgccagcgagcaggtaatcaaagacctaaagggctcggactacagctggtcctaccagaccccacccctccgtcccatctgaaccatttgtttcttttctttccgtcagattttggaaaaattctcctctcctccccgccccctccacaccatcctccccgatttaaatatagtcactgctacaagtaacagatgcactgtgaagattccagtattaataaaggtgtactgtaattaacaaaaaaaactc

SEQ ID NO: 74683 - DNA, 2486 bp, Homo sapiens
  misc_feature (120)..(120): n is a, c, g, or t
  misc_feature (260)..(260): n is a, c, g, or t
  misc_feature (298)..(298): n is a, c, g, or t
cgccgcgagctgcccgcgccgcgccccccgcgccgcccgccagccccgctgcgacatggcccgcgccgcccgccggaggccgcgaccccggagcgcggcgcggccggccgctgagcgcanctggaggcgggaggcccggcccggcctcggagcgagcgcccgcgcggcctggccccctcccttgcgctgctccccgcgctccgtgcgcctagccgccgccgcggcccggcccagccagagcatggagacggcggagaagnagtgcgggccctgggcgggctcttccaggccatagtcnacgacatgaagagctcctaccctatctgggaggacttcaactccaaggccacgaagctgcattcccagctgaggaccaccgtgctggctgctgtggccttcctggatgccttccagaaagtggctgacatggctaccaacacccgaggggccacgagggacatcggctcggcgctcacacgcatgtgcatgcgccaccgcagcatcgagaccaagctgcggcagttcaccaacgcactgctggagagcctcatcaacccgctgcaggagcgcatcgaggactggaagaaggcggccaaccagctggacaaggaccacgcgaaagagtacaaacgagcccggcatgagatcaaaaagaagtcgtcggacacgctgaagctgcagaagaaggcgcgcaaagagctacttgggaaaggagacctgcagccccagctggacagtgccctgcaggacgtcaacgacatgtacctgctgctggaggagacggagaagcaggccgtgcgccgggcgctgatcgaggagcggggccgcttctgcaccttcatcaccttcctgcagcctgtggtgaatggagagctgaccatgctgggagagatcacccacctgcagggcatcatcgacgacttggtggtgctgacagcagaaccccacaaactgcctcccgccagcgagcaggtaatcaaagacctaaagggctcggactacagctggtcctaccagaccccaccctcatcacccagcagctccagctcccggaagtccagcatgtgcagtgcccccagcagcagtagcagtgccaagggtggcggagccccatggcctgggggtgcccaaacatactcacccagttccacctgtcgctaccgcagcctggcgcagccagccaccaccaccgctcgcctctccagcgtttcctcccatgactctggcttcgtctcccaggacgccacctactccaagcccccctcgcctatgccttcagacatcaccagccagaagtcctccagctctgcatcttccgaggcctcggaaacctgccagtccgttagcgagtgcagctcccccacctcggactggtccaaggtcggctcccatgagcagccctcaggcgccactctgcagcggaggaaggaccgagtggagctcctgcgagacacagagccaggccctgccagtgggggcaccctgggccccagcggggaagaggcaccgcgaccccggatgtcccctgccaccatcgcagccaagcacggtgaggaggtgtcccccgccgccagtgacctggccatggtgctgacgcggggcctgagcctggagcaccagaagagcagccgggactcgctgcagtactccagcggctacagcacgcagaccaccacgccctcctgctctgaggacaccatcccctcccaaggctccgactacgactgctactccgtgaatggggatgcggacagcgagggcccgcccgagtttgacaagtcatccaccatcccgcgcaacagcaacatcgcccagaactaccgccgcctgatccagaccaagcgcccagcctccactgctgggctgcccaccgggggctgcccacgggcactggcctgccctcggggcgcaccccccgggtggccaccatccgccgcacaccctccaccaagcccaccgtgcgccgcgccctgtccagcgctggccccatccccatccggccgcccatcgtccctgtgaagacgcccacggtgcctgactcccccggctacatggggcccacacgggcgggcagtgaggagtgcgtcttctataccgacgagaccgcctcacccctggcaccggacctcgccaaggcctccccaaagaggctcagcctgcccaacacagcctggggcagcccatccccagaggcagccgggtaccccggggcaggggccgaggacgagcagcagcagctggcggccaaccggcacagcctggtggagaagctgggggagctggtggcgggtgcccacgcactgggtgagggccagttccccttccccactgctctgtcggccacccccacggaggagacgcccaccccacccccagccgccaccagcgaccccccggccgaagacatgctggtggccatccggcgtggggtccggctccgcaggaccgtcaccaacgacaggtcggcgccccgcatcttatgatgg

SEQ ID NO: 74684 - DNA, 769 bp, Homo sapiens
aaaacttatggctaggtacgatggctgcggtgttatacgcatgtgcatgcgccaccgcagcatcgagaccaagctgcggcagttcaccaacgcactgctggagagcctcatcaacccgctgcaggagcgcatcgaggactggaagaaggcggccaaccagctggacaaggaccacgcgaaagagtacaaacgagcccggcatgagatcaaaaagaagtcgtcggacacgctgaagctgcagaagaaggcgcgcaaagagctacttgggaaaggagacctgcagccccagctggacagtgccctgcaggacgtcaacgacatgtacctgctgctggaggagacggagaagcaggccgtgcgccgggcgctgatcgaggagcggggccgcttctgcaccttcatcaccttcctgcagcctgtggtgaatggagagctgaccatgctgggagagatcacccacctgcagggcatcatcgacgacttggtggtgctgacagcagaaccccacaaactgcctcccgccagcgagcaggtaatcaaagacctaaagggctcggactacagctggtcctaccagaccccacccctccgtcccatctgaaccatttgtttcttttctttccgtcagattttggaaaaattctcctctcctccccgccccctccacaccatcctccccgatttaaatatagtcactgctacaagtaacagatgcactgtgaagattccagtattaataaaggtgtactgtaattaacaaaaaaaactc

SEQ ID NO: 74685 - DNA, 1432 bp, Homo sapiens
  misc_feature (120)..(120): n is a, c, g, or t
  misc_feature (260)..(260): n is a, c, g, or t
  misc_feature (298)..(298): n is a, c, g, or t
cgccgcgagctgcccgcgccgcgccccccgcgccgcccgccagccccgctgcgacatggcccgcgccgcccgccggaggccgcgaccccggagcgcggcgcggccggccgctgagcgcanctggaggcgggaggcccggcccggcctcggagcgagcgcccgcgcggcctggccccctcccttgcgctgctccccgcgctccgtgcgcctagccgccgccgcggcccggcccagccagagcatggagacggcggagaagnagtgcgggccctgggcgggctcttccaggccatagtcnacgacatgaagagctcctaccctatctgggaggacttcaactccaaggccacgaagctgcattcccagctgaggaccaccgtgctggctgctgtggccttcctggatgccttccagaaagtggctgacatggctaccaacacccgaggggccacgagggacatcggctcggcgctcacacgcatgtgcatgcgccaccgcagcatcgagaccaagctgcggcagttcaccaacgcactgctggagagcctcatcaacccgctgcaggagcgcatcgaggactggaagaaggcggccaaccagctggacaaggaccacgcgaaagagtacaaacgagcccggcatgagatcaaaaagaagtcgtcggacacgctgaagctgcagaagaaggcgcgcaaagagctacttgggaaaggagacctgcagccccagctggacagtgccctgcaggacgtcaacgacatgtacctgctgctggaggagacggagaagcaggccgtgcgccgggcgctgatcgaggagcggggccgcttctgcaccttcatcaccttcctgcagcctgtggtgaatggagagctgaccatgctgggagagatcacccacctgcagggcatcatcgacgacttggtggtgctgacagcagaaccccacaaactgcctcccgccagcgagcaggtaatcaaagacctaaagggctcggactacagctggtcctaccagaccccaccctcatcacccagcagctccagctcccggaagtccagcatgtgcagcctggcgcagccagccaccaccaccgctcgcctctccagcgtttcctcccatgactctggcttcgtctcccaggacgccacctactccaagcccccctcgcctatgccttcagacatcaccagccaggtgagggggcgttaggaggatcagtcagggtggggtgcagcagccttatgccagcatcaggcaagccacatgcgggactactatagctgttgagactactatagctgttgagactggcctgaaggcccccaaggcctttattctgttcagtatttatattattattttctatctctgcttttaaattcacatatctttatatcttaaatgagtctcttgtaagcagcataatgcc

SEQ ID NO: 74686 - DNA, 1616 bp, Homo sapiens
tttattgttggacaacattgtttcacacatacatcaaacaggccaaaaaaaataaacagcaacttcatcaccttcctgcagcctgtggtgaatggagagctgaccatgctgggagagatcacccacctgcagggcatcatcgacgacttggtggtgctgacagcagaaccccacaaactgcctcccgccagcgagcaggtaatcaaagacctaaagggctcggactacagctggtcctaccagaccccaccctcatcacccagcagctccagctcccggaagtccagcatgtgcagcctggcgcagccagccaccaccaccgctcgcctctccagcgtttcctcccatgactctggcttcgtctcccaggacgccacctactccaagcccccctcgcctatgccttcagacatcaccagccagaagtcctccagctctgcatcttccgaggcctcggaaacctgccagtccgttagcgagtgcagctcccccacctcggactggtccaaggtcggctcccatgagcagccctcaggcgccactctgcagcggaggaaggaccgagtggagctcctgcgagacacagagccaggccctgccagtgggggcaccctgggccccagcggggaagaggcaccgcgaccccggatgtcccctgccaccatcgcagccaagcacggtgaggaggtgtcccccgccgccagtgacctggccatggtgctgacgcggggcctgagcctggagcaccagaagagcagccgggactcgctgcagtactccagcggctacagcacgcagaccaccacgccctcctgctctgaggacaccatcccctcccaaggctccgactacgactgctactccgtgaatggggatgcggacagcgagggcccgcccgagtttgacaagtcatccaccatcccgcgcaacagcaacatcgcccagaactaccgccgcctgatccagaccaagcgcccagcctccactgctgggctgcccaccgggggctgcccacgggcactggcctgccctcggggcgcaccccccgggtggccaccatccgccgcacaccctccaccaagcccaccgtgcgccgcgccctgtccagcgctggccccatccccatccggccgcccatcgtccctgtgaagacgcccacggtgcctgactcccccggctacatggggcccacacgggcgggcagtgaggagtgcgtcttctataccgacgagaccgcctcacccctggcaccggacctcgccaaggcctccccaaagaggctcagcctgcccaacacagcctggggcagcccatccccagaggcagccgggtaccccggggcaggggccgaggacgagcagcagcagctggcggccaaccggcacagcctggtggagaagctgggggagctggtggcgggtgcccacgcactgggtgagggccagttccccttccccactgctctgtcggccacccccacggaggagacgcccaccccacccccagccgccaccagcgaccccccggccgaagacatgctggtggccatccggcgtggggtccggctccgcaggaccgtcaccaacgacaggtcggcgccccgcatcttatgatgg

SEQ ID NO: 74687 - DNA, 1253 bp, Homo sapiens
tcctccttgctgcctgccggcccctctgtctgcaaccgcctgctggcctctgcatggcagaagtcctccagctctgcatcttccgaggcctcggaaacctgccagtccgttagcgagtgcagctcccccacctcggactggtccaaggtcggctcccatgagcagccctcaggcgccactctgcagcggaggaaggaccgagtggagctcctgcgagacacagagccaggccctgccagtgggggcaccctgggccccagcggggaagaggcaccgcgaccccggatgtcccctgccaccatcgcagccaagcacggtgaggaggtgtcccccgccgccagtgacctggccatggtgctgacgcggggcctgagcctggagcaccagaagagcagccgggactcgctgcagtactccagcggctacagcacgcagaccaccacgccctcctgctctgaggacaccatcccctcccaaggctccgactacgactgctactccgtgaatggggatgcggacagcgagggcccgcccgagtttgacaagtcatccaccatcccgcgcaacagcaacatcgcccagaactaccgccgcctgatccagaccaagcgcccagcctccactgctgggctgcccaccgggggctgcccacgggcactggcctgccctcggggcgcaccccccgggtggccaccatccgccgcacaccctccaccaagcccaccgtgcgccgcgccctgtccagcgctggccccatccccatccggccgcccatcgtccctgtgaagacgcccacggtgcctgactcccccggctacatggggcccacacgggcgggcagtgaggagtgcgtcttctataccgacgagaccgcctcacccctggcaccggacctcgccaaggcctccccaaagaggctcagcctgcccaacacagcctggggcagcccatccccagaggcagccgggtaccccggggcaggggccgaggacgagcagcagcagctggcggccaaccggcacagcctggtggagaagctgggggagctggtggcgggtgcccacgcactgggtgagggccagttccccttccccactgctctgtcggccacccccacggaggagacgcccaccccacccccagccgccaccagcgaccccccggccgaagacatgctggtggccatccggcgtggggtccggctccgcaggaccgtcaccaacgacaggtcggcgccccgcatcttatgatgg

SEQ ID NO: 74688 - DNA, 1008 bp, Homo sapiens
gaggagagatacgggagggtgtccagaagccacaagccatggtgtggggaacatcaacgagctgccgagaacatcctgctggagctgttcactgcacgtgcccgcccgccagctgctgctgaactgccgcctggtctgcagcctctggcgggacctcatcgagctcgtgaccctctggaaacgcaagttgctgcgagagggcttcatcactgaggacaccatcccctcccaaggctccgactacgactgctactccgtgaatggggatgcggacagcgagggcccgcccgagtttgacaagtcatccaccatcccgcgcaacagcaacatcgcccagaactaccgccgcctgatccagaccaagcgcccagcctccactgctgggctgcccaccgggggctgcccacgggcactggcctgccctcggggcgcaccccccgggtggccaccatccgccgcacaccctccaccaagcccaccgtgcgccgcgccctgtccagcgctggccccatccccatccggccgcccatcgtccctgtgaagacgcccacggtgcctgactcccccggctacatggggcccacacgggcgggcagtgaggagtgcgtcttctataccgacgagaccgcctcacccctggcaccggacctcgccaaggcctccccaaagaggctcagcctgcccaacacagcctggggcagcccatccccagaggcagccgggtaccccggggcaggggccgaggacgagcagcagcagctggcggccaaccggcacagcctggtggagaagctgggggagctggtggcgggtgcccacgcactgggtgagggccagttccccttccccactgctctgtcggccacccccacggaggagacgcccaccccacccccagccgccaccagcgaccccccggccgaagacatgctggtggccatccggcgtggggtccggctccgcaggaccgtcaccaacgacaggtcggcgccccgcatcttatgatgg

SEQ ID NO: 74689 - DNA, 429 bp, Homo sapiens
gccaaaccatatcagtctctgagcctcagtttcccccatgtagaatagattattgtgaaaatgagaaaaaataatgtcttttttttttctttttagagactgggtctcactctctcacccaggttggatgatggtggtggtgaggatcacagctcactgcagcctcaagtgagccaggctcaagtgatcctcccacctcagtctcctaagtaggtgggactacaggtgcacaccatcatgcctgcctagaatgtctctgaagcacttaacactgtgcctgacacatagtatttgctcaattaatggtatctgctatcattaacatcatagttattagttattattactaatcgtgaagactgtcctgatggccatttttcactagtttcttccttctaggataaatgggtcattaggcacccacactgt

SEQ ID NO: 74690 - DNA, 447 bp, Homo sapiens
aaggttccaatttctccaaatcttcaccaacacttgttattttctgtttgattttatgatagccaccctaatggatgtgaggtggtatcttattgtggtttggtttgtatttctctaatggataatgatattgtgcatcttttcatgtgcttgctggccatttgtacatcatctttggaaaaatgtctattaaagtccctttctattttctttgcagaaaaaaattttatttataaaagtacagtttcagggctgggcacagtggctcactcctgtaatcccaacactttggaaggctgaggcaggcagatacctgaggtcaggagtttgagaccagctggccaacatggcgaaacaccatctctactacaaatacaaaaattagccaggtgtggtagcgggcgtctgtagtcccagctacttgggaggctgaggcaggcagatcac

SEQ ID NO: 74691 - DNA, 316 bp, Homo sapiens
gtagagatgggatttctccatgtttgtcaggctggtctcgaactcccgacctcaggtgatccacccacctcagcctcccaaagtgctgggattacaggcatgagccaccacgcccagcctagactgaacttcttgagagcagtcggggctgtgtttgtcctttgaataatttttttctgttgaatgaacgtatatgcatcagtaaatcccctacccaaagtaggctatcagaatgtttacagaattgagttttaaaaactgaaatatagtaaatggtttggaaatttaggaaaggtggatataatttcttattaat

SEQ ID NO: 74692 - DNA, 361 bp, Homo sapiens
ggtctcactatgttgcccaggctggtctcaaactcctgttctcaagcgatcctcctgcctcagcctaccaaagtgctgaggttacaggcgtgagccactgcacctggctaggaaactgagttttttcagtggtagaggctcctagccagtggccaagggaaagagagagttctgggttcaggggctggcaggaagtcagcaagacaccagggactcggctccactggctggatctcagggaagagcaactgccacagtggggacctggaacacaaagggaaactgaggcagcagctgcaccacagtttacaagtagaaagaccatgcttgaggacaacagaagtttcactaaggatgcacg

SEQ ID NO: 74693 - DNA, 696 bp, Homo sapiens
gatgatttgattctaagtcccaggaaggaaccctcttccaggaactcaccatcaactctcccccttttctccttccagctggcccaacctggacctgtcggaaacttctccttcaccactatgccccagggtcccaaatgccccaggatcccaaaaagattgccacctctgacctttgaaaatatgagcatgtgagcttgaggcagcaggagaagaggaagtgggctttgactgatttacaattcagggaactaactcttgcccatagcttctagtgtggttctttccaagagccagactaccacttttgctcctctctttttctcatttcaggaccctcttccaatccatctataccctgtccggtttatgttagtgacaaaacaagactcccccatccttcaaggaggtggagcatcagaatcttttcagaataggggtggagaggaaaggattcagttgtggtgccctcatttgtgagactcgagcccttgttcaaaatcatcttctcagataaatccccaccagatctgcccagaaagtttatcagaccctccatggcccatgtcattttggttccaaatgtttcaggtgacttttgaattgcaactgaaaaagttattctgatttttgacattatagagttcattatcgacagctggctataaattactaaatttataattaactatataa

SEQ ID NO: 74694 - DNA, 526 bp, Homo sapiens
cgcgcctagctggcgggaccgttagatcgaggcggatgcggcccggaccccgtggatatggagcaatcgccgccgctggcgccggagcccacccaagggccaaccaccacaaggagctgaaggcggcgggagcccgagtcgccgccggcgtcggtgccgtcaaagaagatggccagggagacagcagcatggtcagagtggtaggagctggccatcggtgagagctgctccatgcctggctgctgggtgctagagcttgtggaccactggcttgcctcactgtggttggtggtggcggtgacagagtgtgccctcacccctgggcgccgtggacctgtacgagtatgcatgcggggatgaggacctggagccactgtgacgccacccatgagaacgccgctgcggggccgctccacacgtgccacggccaccactgggacaccgccgcttgtgtaaaaactgttgtcttttgtggaaaatgagtgtgtttgcatggaatgataaatttttatttattcacaaaaaa

SEQ ID NO: 74695 - DNA, 459 bp, Homo sapiens
cgcgcctagctggcgggaccgttagatcgaggcggatgcggcccggaccccgtggatatggagcaatcgccgccgctggcgccggagcccacccaagggccaaccaccacaaggagctgaaggcggcgggagcccgagtcgccgccggcgtcggtgccggcttttctggctttgcccgcccagctgctccatgccaggaggaggaggagacacctagagcctgcgacaccatggctcgcctcgctgcagtgtaggttctacccatgtaacagatgaggaaaccaaggagcacagttatttactaactcgcacaagagcctttcctgaggaaattttttttttggtggagagactgagaacacgaggtgcacagtgaccagctaaagggagaatgaggcagttccaaaatgaattataaagtatacgagtattaaagtctacttgttttttattgctaaa

SEQ ID NO: 74696 - DNA, 626 bp, Homo sapiens
cgcgcctagctggcgggaccgttagatcgaggcggatgcggcccggaccccgtggatatggagcaatcgccgccgctggcgccggagcccacccaagggccaaccaccacaaggagctgaaggcggcgggagcccgagtcgccgccggcgtcggtgccgtcaaagaagatggccagggagacagcagcatggtcagagtggtaggagctggccatcggtgagagctgctccatgcctggctgctgggtgctagagcttgtggaccactggcttgcctcactgtggttggtggtggcggtgacagagtgtgcagcacgaccagagtggcttttctggctttgcccgcccagctgctccatgccaggaggaggaggagacacctagagcctgcgacaccatggctcgcctcgctgcagtgtaggttctacccatgtaacagatgaggaaaccaaggagcacagttatttactaactcgcacaagagcctttcctgaggaaattttttttttggtggagagactgagaacacgaggtgcacagtgaccagctaaagggagaatgaggcagttccaaaatgaattataaagtatacgagtattaaagtctacttgttttttattgctaaa

SEQ ID NO: 74697 - DNA, 705 bp, Homo sapiens
cgcgcctagctggcgggaccgttagatcgaggcggatgcggcccggaccccgtggatatggagcaatcgccgccgctggcgccggagcccacccaagggccaaccaccacaaggagctgaaggcggcgggagcccgagtcgccgccggcgtcggtgccgtcaaagaagatggccagggagacagcagcatggtcagagtggtaggagctggccatcggtgagagctgctccatgcctggctgctgggtgctagagcttgtggaccactggcttgcctcactgtggttggtggtggcggtgacagagtgtgcagcacgaccagagtggcttttctggctttgcccgcccagctgctccatgccaggaggaggaggagacacctagagcctgcgacaccatggctcgcctcgctgcagtgtaggttctacccatgtaacagatgaggaaaccaaggagcacagttatttactaactcgcacaaggcaagtttcaaaattgtctttgaaaataatgattgcttttaaggtttattctataatggtttaagatcatgggttacagaagtagaacaacagtgtctaattactagttctaataattcttatcggatttgttgagattttatacacatacatgtttgtttttgtgtataagtatatatgtaacaatgtattacacatatgaattaactgtttaatatgtgtg

SEQ ID NO: 74698 - DNA, 780 bp, Homo sapiens
cgcgcctagctggcgggaccgttagatcgaggcggatgcggcccggaccccgtggatatggagcaatcgccgccgctggcgccggagcccacccaagggccaaccaccacaaggagctgaaggcggcgggagcccgagtcgccgccggcgtcggtgccgtcaaagaagatggccagggagacagcagcatggtcagagtggtaggagctggccatcggtgagagctgctccatgcctggctgctgggtgctagagcttgtggaccactggcttgcctcactgtggttggtggtggcggtgacagagtgtgcagcacgaccagagtggcttttctggctttgcccgcccagctgctccatgccaggaggaggaggagacacctagagcctgcgacaccatggctcgcctcgctgcagtgtaggttctacccatgtaacagatgaggaaaccaaggagcacagttatttactaactcgcacaaggttcgaggccgagctcagacctgtggagcagaagctgagtgcgctgcagtccccgctggcccagaggcccttcttcgaggtgccctcacccctgggcgccgtggacctgtacgagtatgcatgcggggatgaggacctggagccactgtgacgccacccatgagaacgccgctgcggggccgctccacacgtgccacggccaccactgggacaccgccgcttgtgtaaaaactgttgtcttttgtggaaaatgagtgtgtttgcatggaatgataaatttttatttattcacaaaaaa

SEQ ID NO: 74699 - DNA, 739 bp, Homo sapiens
agggccagccagcctgtactctgggcaagagccaaaaatggctaggaatgtttgactcccttaatctcttccccagctacagaggaatcttttctctgcctggtctcagaatgggactgccaactggctcattggtgggagacacagtatcctcaaacctgtggccactggcatgacagtggtgctctgtctccctgggtgacacccaccctaggcttcctcctggatgtgatggggattgccagagaggctcttagcataaaaggcattaggtgggcatttttctgtgtgccccccaaaaagctccatggaaacaggcacctggtagctgcggaacacccgtggacttgtgtatatggtcataggctttgggaagacaggacgtaaaggaaaatgagagaaacaaaatgggtcagatagctttggccacagccccaggcagcctttggggcctatgacacttagtgcccttagatgggatacatcttgcctcggccccaagactcctccaacttacccgtcccatccagggcctgcacagcttagagaggctcacagcttggcaaatgctagggcttcatcagaccactgacttgactcagtgtttgttaaaatggaaccactcccgttggcctactgtttctctcctgtacttcttgtaatgatagttatttattgactctggtagcaggcagttcttaaataaagatggtttctcaacctgttggggaagctggca

SEQ ID NO: 74700 - DNA, 622 bp, Homo sapiens
catgtcttggtaaatgacagatataaaagcccggcttttctcactgtcccactcccacccatgtcctgttagtcaaggagctctgacttttacttttgaaagtatctccaaatctccgatacgtcctccattcccattgccagtaccttaactcagaccttcatcatctctaggctagattgattgtccctgttcaccagcccatcatccccagtacaccaaagtcattttcttacatgcagagccactgtcccatgttccagaccctctctgctgccctcaggcttcactttggccaaccttcgttagctaagcctttgctaacctcacaccactcctcctcttactggggtttttgtgccagattgtcatgcagtagaactttctctccctgagcctggaccaccaagtgacctgtgcctggtggtgactaatttgttatatatctactgcatgtcatgcacgtgctaactgctcttgtgccttttctaatttaaccgtgacagcaacttgctgaggcataggtgctatactagctcccttccacagactaggagattgaggctttcaaatggaaacgatttgccaaagctgcatctctagcagcaagatgcaaactcag

SEQ ID NO: 74701 - DNA, 243 bp, Homo sapiens
aactttttatttttggcactaaatatcatttataagagctagtccccaaagtagaaaatctactatagtatgtaaaccagaactcttaggaaatgaatttccagattgggcagctgaatgagtaaggcagactgaataacacagaagacagtatctgcctgtatactacctaaaaattcttaagagtgtccttcctgccctataagcttaaatccaagtcaagaagatagtggtgcttagatc

SEQ ID NO: 74702 - DNA, 642 bp, Homo sapiens
cgtggtttacagaaaataaattacatgaactgaatattttgcactattgtagaagataaattgatctaattattatctaacttcaaacacagtggaataaacagattatcatatctatgctgacatattagagacaagatttatttgcttttgttttgtagaagatgcattttcctttttggaatcagaatgatacacaaaacgaattaaccctgagcatcccacctgctcgactgtacctctattcctcaatattctcagggtcaggaaagtgaatgcagaaggtttcgcaaagtaaagccccacaggatcacagaagcaagaagggagtctacagggaattctgtggaacccaggaaacggcccacacatgacccaccaccccctgcaatggcaggtattctgtggaaccctacagggacccaggaaaaggccacacatgacccaccagccctgcaatggcagggattctgtggaacctacagggattctgtggaacccaggaaatggccacatgtgaaccaccatcccctgcaagggcagggattctgtgcaacccaggaaaaggctacacatgacccaccacccctgcaatggtgcattcacttgcaggggatggagaaggtggagatggttcatcat

SEQ ID NO: 74703 - DNA, 591 bp, Homo sapiens
cccgagaaactaaatcaacattcacctggggatacctgtactgggtaggcctgtgatgggcaataagaaaagtcacttatgttgttctctcaggaaactctgagcaggtaaaaggttggcagaggctaccggtgcacttccaatattagtgatggagtcctgctcagaatacacaccatgcttctcaggctttcctgcaaccgggcgaagcacagttctggcccatgagatatttgcagaaatgatgtgtgtaacttctggaatgtaccatgatgaggaatggacataccccaccaccaccaccaccccaccccacttccccttccctattacttagcagctgcaatctatacctggtggtaagtggtaatgagtgaccctcaaccactccaatgagcacaatgccttagagataggtgagtaacaatatagaagggtcctgagtccctcgcaccacagacccattattccagttctgtaatgcttatgcttgggcagtcacataactgaaaaacaaactcttgttttattgaagtcacaggtactttgggtcttggtcttaatagcagaatctacttcttaattaattaa

SEQ ID NO: 74704 - DNA, 203 bp, Homo sapiens
tgaacatgggggtgcagatatctcttcaagatactgattttatttccttaggacatatacccagtagtgagattgctggatcatatggtagttctatttttaattttttgaggaacctccatactattttctataatggctgtaccaatttacattctggtggtagattttttaaacagccatcaagatgacattttcttttc

SEQ ID NO: 74705 - DNA, 488 bp, Homo sapiens
acacagtgctgggtctacaaaacactttctaggggaatgactcggtgcagttctaggggaagacacagcccctccgcagacctgctcagcctcgaaccctgcgctgatatgccctttggttgacaccttcctctcccacctagtgtggtcttcttgtgctctgttctggagtggccgagctgaaaggatgacactgccttccctcagcacatatgagcacaggatatcccatatcttctgctccatttcttgagaaaacagaacccaaaagagttgccatgaagagcatttgagtggcccaggaccctggccttgctttctgcagcctcctctggtttactcaggccacagccatataggccccattcacattcaaggctacgctgattctgtgtccctgggacttgtccagaagtatttgtgaaacttgtagtcagttctctttcctttccttttctttctggttgaaataattgcacaatgaggca

SEQ ID NO: 74706 - DNA, 1094 bp, Homo sapiens
aaaactcatatctgaaaacagattttaggaagcctatgatcagggtttctctcaaccatgtttgttttttaaacagggtcccctcttgtcacccaagctgggggtacggtggtggcacagtaatggcttgctgcagcctcgtcctctcaggctccagggatcctctcacctcagcctcccaagaagctagggctgcaggcacgtgacactgtgcctggctaatttttcctatttttgtagagaccgagtttcattgtgttacccagctggtctcgaactcctgggctcaagtgaccctcccacctcagccttccagatttgctgggattacaggcgtgagccactgcgcccggccgggatctgattttatataacctataagattatttgtcctgtttatgcaagatttgttatatatttgtcacttgatgctttaaggcgctctaaatacttaggctcggaaatcaaatttcatctaccacttactagctatataacattaggcaagttatttgacctcttagtgccttactttctcatctgtaaaataagagtaataaaagtatcttacagtttgggctttagcatgtaattgctaggtgaggcagtggcctcttgccatatattttggaaaacttcacttagccctgtctgcatgattcaaggttagaatgataattggttttactgacatattaactcctttaagaaaggaagggaactaggtttccttgacaaactactctgcccagacactgtgctctcttgtatatctttgtattaaattgttatgacaaccgtatggtaagcttctctgataaattgccccaaaactctgaagtcacaagatgaaagttttctatgttggctaagagcctttaggggcaaaaacttaagaatctagttagaaagaaaaattcttctgccttgggatcctgttgatcggtgaccttacccccaaccctgtgctctctgaaacatgtgctgtgtccactcagggttaaatggattaagggcggtgcaagatgtgctttgttaaacagatgcttgaaggcagcatgctcgttaagaatcatcaccactccctaatctca

SEQ ID NO: 74707 - DNA, 500 bp, Homo sapiens
ttttaatggaaaaggacctgctgtggtttatagtttttctacttaccttacgtccaggaggtcctggttccccaggggatcccatctctcctggaagcccagcagatatctcaaaggagaatttattttaaaattgtatttatacatatatgtatgtgtgtgtgtaaattcaaattttaaaaaattaaaattcaaaggtgaaaattcaaaagtgaaaatttcacttttattttagaaaattgagagttttccaaaaaacataaagaaggaaaaaatattcccagcaatcccttcttccccaaataatcctcattaacattttgatgtcttttcttattttttttggaattaagacatatattcctttttaaaactcatttgaatcatacttttctctgttaccttttaaactaaatatatctctggacattttcagttagtaaacattatttggcaaaatcatttttcacagctgcatagtatcccatcacatggttgta

SEQ ID NO: 74708 - DNA, 4393 bp, Homo sapiens
  misc_feature (733)..(733): n is a, c, g, or t
  misc_feature (1009)..(1009): n is a, c, g, or t
  misc_feature (1586)..(1586): n is a, c, g, or t
  misc_feature (2096)..(2096): n is a, c, g, or t
  misc_feature (2790)..(2790): n is a, c, g, or t
  misc_feature (3284)..(3284): n is a, c, g, or t
  misc_feature (3571)..(3571): n is a, c, g, or t
  misc_feature (3896)..(3897): n is a, c, g, or t
tctatgaataggagaggctcaaaaagaggcagggaccaacatggtcaaatacaaagactttagaacacagtgagcattgaagaaaacaagatagcagcttcaccagtgcaagaaagcagaacagaagctgcctttcaagggattacagtgagagggtttggtgtaagaattcaggttcaaagtacagtatccttatataataattcagaaaacacacatggaccataaaatgaaattgattttggccaaatcattcaaactttatggactttgttgtttatccagttctgtgctaagatttatattatggcacgtctttaaaataatgaggtggggggaccagtaaggtggcttcaactcactaaaagaaaatatattgtttcattgtcatctattttgctaatatttgtgttcaatttagagaaagtagggtagacatagtggtaaacagttctcttactcttgaattgacaagtagactgagaatttcacaaaaggcttttcctcactttgagtgtttttattctttaattttcaaaatgctatttcactgaattgagacagtttggtttttatttctgaattactttctgatattattattactgaggtagtttagctagttgtggccagttgttttggtgctcagtgtagttagaatacagattgcattatacacaaataacaatttatcacatgccaaatgtgctctgtgaatctgaaaagctccctntatatgagggtatatttccctcaagccaggcaattttaaggacctgcaagctcccaccaccaactagctcagtgtagtaaaagttaatttagtaaacacatcatcatcctaagtaatcctttccttgactaaaataccctctgcttggcagagaagcaattggatcaactacatcaggactccaagtgatcccaccctgattccaacacccccatgttgttcttgtttccttggaggccttgaaaactgtgcatgcacagcaaccggattcatgtngagccattccaattcatctgagaagcgattctccacttaggcatcaacccatgaccatcacagggtgtgtgcacatgtcctgggtttatcaggtctaactatatctttcagaatactgattccagaactcttaggtaacgcagagatcagttgaacttaatgtataaatgtgcattttatatataaaatattgctcttcaaaatttggcttaaatcatgctttcttgtgtgcctttgaacaaagattttgatttaaaaaatcattgagaaatgtaattcaagaatgcccagaaattgtcattagtatttgttaagttgtttatgaagaacttaagcccactttaatttctgtttttatatagatcttccccaagacaaaacatcttttattgacttccttgaaaacaatttagtactagagatcagcaataacttattagacagaaaccagattatttaatcatttggctttcgaaataatatttagattgaaaaaagcaaattagaagagtttactaaaggaactaatgactgtcatctcatactcttcttttacattttaaactttttaagaaantgatctttcatcatgtcagtgaaactttagtttccctgaagtttcacagtcatttacaaggttgaatttttttatatgatgaaataatagtatttttaaaatattaataatattacatggccataattgtaaagtcagtgataacacattttatgacaaggtgtgcactgcattatttcatagtacattcataatcaaaggtcatgttggacatacaacattaccataattttctaattaatttgttctttatacatgtttatacgtgttccaattgcatttcattaattcatagttttcttgtaagtttgtgctttccttccatgttcaaagaatctctttaattcaatttctctgtttctcctcatacagtctggcagccagatatgcaactcagtctaatcacagtggaattgcaaccagtcaaaaaaagcctactaggtcagttaatattctctaatttattgcttattagtgatatgcaaataaatacccagtgatattttgtcntatcttttttttttaatgatgcacttctgaatgagaagtttagagcactaaatttttccaggaagattttcacacatagcctcagggatgagcatgtttgtactagataattaaatgggttttggcatcttttttagttttgtgatatgtagtgctataactgggcttaagtctaggttctaggtttagaatcaatcaaggaaaccattactttgaatgcccaattccttccaagtcacataatctggaagttatacaacaaaattgtaattgctttttgagatgggcatgcattaattattgcacattttaatggagatttgaaaaacattggcagattttagtggggaagttagtaccaggtcagtctggactgttcttctatctataatagtttaatttttttgcttctttatgacacaggtataataaagacagcctgttatagtaaatgatagtgcgttatatactgtttggaaaataatgacctataaaaatgttttgaaagagtttgattttttaaaagtgttaagttgctgaaggcatgatggtagcatggaacagctgaataaaaccacagcaaaagagttttatacctctgattagtatgtgatcctttgtgtcatctcactcactggggaagtatccagcagtggtttattcattactgttccattgatgaatcatattatgnagtgtttgaccacaaagactgcgtctgatgctttgacttgaggtaggtgtctttccccttgccttggctttctaagttatattcatttccagagtagccaaaataattctcgaaagacaaattttaaaaggtatttaattaaaaactagaataaatgatataaattatgatgggtaaggaacagtcacctgccatgcacaatgagcatttttattactccttctaagacttgggcatgtaaaatatttttaagtactgtattttgatagatctctctccctctctctctctcctctctgcttcatctcatttccctttttattactttgatgaataatctgaaggcctgctctgcctgcctgtcaaattagggtaatgagaagagcaaatgtatttttacatttgttttaatttgttcttctaaggactgaagatcatttgacttcatgggttgcagtaaagattaaaatgtattttaattattttctgaaacnggtcaatttgcattacaagcagggcaagttttgtgataaaatttgtttatgtgtgtgagtttggaatgaactttctaagtctatgcctatgtctacagaaatagttctcagatttattatgattaggacacttggccaaattcattagttgggttccttcaacagagtgcaatcactggtcctgtaaattcctagcatctgtcgttattatgctgtacttacaaacccttgtagattctcttaagcaaaagttaaatgctggaatcatttggaaaatattctaatantttgtatgacacaatgtccaattagcaaaatagctaaagggaccaattatcagccatatatatttaaacattaaaatataattcacattttgaagctattaaccgttctaagaaatcaacagttttgtttttaagttagtatttgttttttttcctgatattcactctattttataatgactgttactattataaaagcacttatatttcctgaaggtggtttgattttctaatattctgtgaaaatgatatagtctagtagtattataaaggtgaattaaatgttgagcatgtaacaactggattgtgaaattttggtatatcnnatactaatatgagagacattaataatctttgctttaaaattttataagatgattataaaaaatagtgctatatttgtagattttgaattcttgttttcctttcaaataaaaaatttcagagtagtacacagtgacattcacatggtggcagcaaatactaaacaaaactttcaatatcatattttctaaatagatcttagactgtcagtattagttcttggccagacacggtggctcacgcctgtaatcccaacactttgggaggctgaggtgggatcacttgaggtcaggagttcaagaccagcctagccaacacagggaaaccccgtctctatcaaaatacaaagatgagccgggcatgatagcaagtgcctgtaattgtagctactcagaggctgaggcaggagaatcgcttgaaccctggaggcaaaggttgcagtgggctgagattgtgccactgcactctagcctgggcgacagagtgacaccctgtctc

SEQ ID NO: 74709 - DNA, 373 bp, Homo sapiens
ccatgttggccaggtctcgaactcctggcatcaggtgatccgcccgtttcagcctcccaaagtgctgggattacaggcttgagccaccaggcctggcccgttactattgttatttttaaatgcattagtaaaaaaaaaaaaaattttaattgctagaacattaaatatcaatacccacattaataaaagctatttgggagccttaataattatcaatggtgtaaaggggtcctgagaccaaaaagtttgacttcaccaggtgtttgaacactacagatcccatcttgcccatgaagcttccctagacatccccaccccaccgtgctcccttctgcatcctacaatagcatccactggtaaggccactatttta

SEQ ID NO: 74710 - DNA, 148 bp, Homo sapiens
ataatgcgcttactgaggagggaatgtgggtggagcaaggaacaagagctgaaacccaagcactgtgacatttatagatgggagagagaaggagggccccacaaaggagacctgaaaagaagcagccagtgagatggaaagaagacca

SEQ ID NO: 74711 - DNA, 456 bp, Homo sapiens
atagctgggactagaggcatatgccaccatgtccggctaatttttaaatttttagtagagatggggtttcaccatattggccaggctggtctcaaactcctgacctcgtggtctgcccatcttggcctcccaaagtgctgggattacaggcgtgaaccaccgcgcccagccgctataacttttaacaattcccatatgtcctttattccactaagatgagtgcagtatatatttccatctgtccaaggcttcctaaatgtagccaaggccaagccaacaccagtcacatgatcaaaatcaaagggcatttggggaatccaggctgtgattcagggaagttccaagtgtctgatgaagtgtttgttttacatctttgtgtcccttgcaggtctagcactgtgctatgtaggtaacatgtgctccattaaatgtgaattaaactaagttttctacaaa

SEQ ID NO: 74712 - DNA, 241 bp, Homo sapiens
acaacaacaacaacaaaaaacactttattgaaaggcattaaagaagatgtaaataaatgatgtaaatcaattaactgcaactcaatggcataaaaacgacaatattcccaaagttcaaatatagattcaccacaacttgaaaacaaaagtccagtatgtggaatttggtgaactgactagaatttaagccatgacattcctgaaaaagaatggctaggtgtaagtacttcatctacaagat

SEQ ID NO: 74713 - DNA, 533 bp, Homo sapiens
atgggtggagaattctatgttaaaataattttccttaaggaatttttaatcaggtccattttttcctcggctgtaggattcaagaatttgaattcaaagagagatgggattcgcatctctatttcttcacttccttctgcacatgccctgaacttcacttgcagatttgataatgtccttctcctcggcatgcttccactgctgcctcttcaacatttcttctcttacttctgccaagatagagcttatgttttatatggggaaaaaaacagatttttttttcagaattttatagctattagcccactgtctttctgctttcagtattctattcaaaacgcccaaagccattttgaggcctaaaacatttcatttccctagaattttgctgaaagccagtgatctgacgttttactgtgatgtggactatggtgaacctaattttttccattgttttataaacttactgtgtgacttcaacatgaaaattcatgtctttcaattataaaatattttcaatttttctgcatttc

SEQ ID NO: 74714 - DNA, 244 bp, Homo sapiens
aaatagcctctaatttcctaaaacactctaaactttagttgaaatgcaagcatactctaccttttaagcacttaatatctagtaagtttaaattttctgagctaagacatttccctacacttttacattaatttaaatactcctaaaacaaagtagctcaaaaagttcacaagtaaactatttcctccagtctcatttttgtttcatacgctgtaatcaaacacagatcaaaattacaacactg

SEQ ID NO: 74715 - DNA, 2853 bp, Homo sapiens
gttcgccagggtcttccgggtgagggtcctgcagcccgtgaatccctggtcccgccgagacttggacctggtgcgaactggaggcgaagcgggtgcacccacaacctataggaagggctggcggcgagctctgagcactcgggcgtcggagggaacgctctgctttcaacactcttggccctttctcaagagaacatgaaaatgaaaaaatttcagataccagtttcattccaggacctgactgtgaacttcacccaagaggaatggcagcaactggaccctgctcagaggctcctgtacagggatgtgatgctggagaactacagcaacttggtctctgtggggtatcatgttagcaaaccagatgtgattttcaaattggagcaaggagaagagccatggatagtggaggaattctcaaatcagaactacccagacattgatgatgccttagagaagaacaaggaaatccaagataaacatttgacacaaactgtattcttcagcaacaaaacactgattacagaaagagagaatgtatttggggaaacacttaatctgggcatgaatagtgttccctcaagaaaaatgccctataaatgtaatccaggaggaaacagtttgaaaactaattcagaagtaattgttgcaaagaaaagcaaagaaaacagaaagattcctgatggatacagtggatttgggaagcatgagaaaagtcatttgggaatgaaaaaatacagatacaatccaatgaggaaagccagcaatcaaaacgaaaatcttattctgcaccagaacattcagattttgaaacaaccgtttgactataataaatgtgggaaaaccttcttcaagagggcaattctcattacacaaaaggggagacagactgaaaggaaaccaaatgaatgtaatgaatgtaggaaaaccttttctaagagatctaccctcattgtacatcagagaattcatacaggggagaaaccgtatgtttgtagtgattgtaggaaaacttttcgtgtgaagacaagcctcactcgacaccgaagaattcatactggagagagaccctatgaatgcagtgaatgcaggaaaaccttcattgacaaatctgcccttattgtacaccagaaaattcatggaggggagaaatcctatgagtgtaatgaatgtggaaagaccttttttcggaagtcagccctggctgaacatttcaggtcacacacaggggagaagccttacgaatgcaaggaatgtggaaatgccttcagcaagaaatcgtatcttgttgtacatcaaagaactcacagaggagagaagccaaatgaatgtaaggaatgtgggaaaaccttcttctgtcagtcagcccttactgcgcatcagagaattcacacaggggaaaaaccctatgaatgtagtgaatgtgagaaaaccttcttttgtcaatctgccctcaatgtgcatcgaagaggtcatacaggagagaagccctatgaatgcagtcaatgtggaaaatttttatgtacgaaatcagccctcattgcacatcagataactcatagaggaaagaagtcttatgaatgtaatgaatgtgggaaatttttctgccataagtcaacactcactatacatcagagaacacacacaggagagaaacatggtgtgtttaataaatgtggtagaatctccattgtgaagtcaaactgcagtcagtgtaagagaatgaacacaaaggagaatctttatgagtgtagtgaacatgggcatgccgtcagcaaaaactcacacctcattgtacatcagagaactatatgggagagaccatatgaatgcaatgaatgtgggagaacctactgcaggaagtcagccctgactcaccatcagagaacacacacaggacagagaccctatgagtgtaatgaatgtgggaaaaccttctgtcagaagttctcctttgttgaacatcagcgaactcacactggggagaaaccatatgaatgtaatgaatgtgggaaatccttctgccataagtcagccttcagagtccatagaagaattcacacaggagagaaaccatatgaatgtaatcaatgtgggaaaacctaccgtcgcctgtggactctcactgaacatcagaaaatacacacaggagagaaaccttatgaatgtaacaaatgtgagaaaacatttcgccacaaatcaaactttcttttacatcagaaatcccacaaggaataagttccaacaaagtaataaattccaacaaagcaacaaatcaaataacttacacaatgctaaactgtgagtatgtatagaggagtaaaatcttataaatgtaatgaatatggaaaatttttctgccataagtcaaccctcaatgtaacatcagagaaatcatgtaggaaagaaataatttgtttaataaatgtattattcattgtgaactatgaaaatattcaacagcaattcaaaggttatgccaaatgtgcctcccttttaaaataatgaaacaaacattgtttaagttaaattgttacttggttcctccccacagtgttacttgatagtgtatgttacgaggtgtgaggatctgaccttcatttcaaatcaataccattgtttgatagttgagtaagttacagtttctcaatttatggtgtattttcagatttggcagattttttgttgtctgctaactccatagtcttctagtagtggactgtatacctttatctgcaaaggtgacaactcaggagaactaaccattgtactctatgcacccatggtaattataccccaggtgagcattttgtaaagctgagccagtgaaagcccttcctaagacctttctaa

SEQ ID NO: 74716 - DNA, 1854 bp, Homo sapiens
gaatgtgacaaagcttttaaccgatccttaaaacttactgcacataagaaaattctaatggaagagaaaccctacaaatgtaaagaatgtggcaaagcttttaacctatcctcaacccttattgtacaccagaaaattcatggaggggagaaatcctatgagtgtaatgaatgtggaaagaccttttttcggaagtcagccctggctgaacatttcaggtcacacacaggggagaagccttacgaatgcaaggaatgtggaaatgccttcagcaagaaatcgtatcttgttgtacatcaaagaactcacagaggagagaagccaaatgaatgtaaggaatgtgggaaaaccttcttctgtcagtcagcccttactgcgcatcagagaattcacacaggggaaaaaccctatgaatgtagtgaatgtgagaaaaccttcttttgtcaatctgccctcaatgtgcatcgaagaggtcatacaggagagaagccctatgaatgcagtcaatgtggaaaatttttatgtacgaaatcagccctcattgcacatcagataactcatagaggaaagaagtcttatgaatgtaatgaatgtgggaaatttttctgccataagtcaacactcactatacatcagagaacacacacaggagagaaacatggtgtgtttaataaatgtggtagaatctccattgtgaagtcaaactgcagtcagtgtaagagaatgaacacaaaggagaatctttatgagtgtagtgaacatgggcatgccgtcagcaaaaactcacacctcattgtacatcagagaactatatgggagagaccatatgaatgcaatgaatgtgggagaacctactgcaggaagtcagccctgactcaccatcagagaacacacacaggacagagaccctatgagtgtaatgaatgtgggaaaaccttctgtcagaagttctcctttgttgaacatcagcgaactcacactggggagaaaccatatgaatgtaatgaatgtgggaaatccttctgccataagtcagccttcagagtccatagaagaattcacacaggagagaaaccatatgaatgtaatcaatgtgggaaaacctaccgtcgcctgtggactctcactgaacatcagaaaatacacacaggagagaaaccttatgaatgtaacaaatgtgagaaaacatttcgccacaaatcaaactttcttttacatcagaaatcccacaaggaataagttccaacaaagtaataaattccaacaaagcaacaaatcaaataacttacacaatgctaaactgtgagtatgtatagaggagtaaaatcttataaatgtaatgaatatggaaaatttttctgccataagtcaaccctcaatgtaacatcagagaaatcatgtaggaaagaaataatttgtttaataaatgtattattcattgtgaactatgaaaatattcaacagcaattcaaaggttatgccaaatgtgcctcccttttaaaataatgaaacaaacattgtttaagttaaattgttacttggttcctccccacagtgttacttgatagtgtatgttacgaggtgtgaggatctgaccttcatttcaaatcaataccattgtttgatagttgagtaagttacagtttctcaatttatggtgtattttcagatttggcagattttttgttgtctgctaactccatagtcttctagtagtggactgtatacctttatctgcaaaggtgacaactcaggagaactaaccattgtactctatgcacccatggtaattataccccaggtgagcattttgtaaagctgagccagtgaaagcccttcctaagacctttctaa

SEQ ID NO: 74717 - DNA, 3875 bp, Homo sapiens
gttcgccagggtcttccgggtgagggtcctgcagcccgtgaatccctggtcccgccgagacttggacctggtgcgaactggaggcgaagcgggtgcacccacaacctataggaagggctggcggcgagctctgagcactcgggcgtcggagggaacggtggggccgggcggagcgggcctcgggtctgcggagggtggacgcgcgctctccctgtctttggagggagggtttcctgtggtcgggaggcgaggcagccagggcaggattgggctcctgacctgcaggccacgggcgagctctctctagggccctgatttgcccgaagaaggcgcttggtgaaggtgaaaggtttacgcatccaagtagctagaacctctttccagaacttctgctgatgcacttagtcttgcagccattgattattatagctcagcaaagttcagttcaactttcggaagaaggatgtgagctggaatgggcagggtcaagatttgacaggaaaagacacttcactggaggtatctgcgagagtcctgggttggagggaaggagtactggttataaataaggaaatgatgtcttcatcacttcctaaacacatacatgtcattccctaccatctccaccctctgtttattcagagctgcaccaaccatgttcatcacctcacctgggatttactgagtttaccccttacagagctacacgataggggtaaaggaaagactaaaaaccaatttatcttatattaaaattacgacttagtaaatatttttttcagtaatgcagtttgctagtgacagatccaataactgaattctggtcctttgagtaccaggtcagggcttttgtcatctaccacatttacgttacctaccacaagaagtttcttagtaaaaggtcctcttgtgaaactgcagctaagggaaaccaaactgtcaaaaagacaaacaccttaaagcactttcattcattctctctggattctgtcatctcaagtggctaaacacattagtaggaaaacagctctgctttcaacactcttggccctttctcaagagaacatgaaaatgaaaaaatttcagagatggggttttgccgtgttgcccagactgatcttgagcttctgagctccagcgatcagcctacctcaacctctcagagtgctgggattataggtgtgcgccaccacacctggccatgtgtgttttcttacatctcctttcttacataaaagataccagtttcattccaggacctgactgtgaacttcacccaagaggaatggcagcaactggaccctgctcagaggctcctgtacagggatgtgatgctggagaactacagcaacttggtctctgtggggtatcatgttagcaaaccagatgtgattttcaaattggagcaaggagaagagccatggatagtggaggaattctcaaatcagaactacccagacattgatgatgccttagagaagaacaaggaaatccaagataaacatttgacacaaactgtattcttcagcaacaaaacactgattacagaaagagagaatgtatttggggaaacacttaatctgggcatgaatagtgttccctcaagaaaaatgccctataaatgtaatccaggaggaaacagtttgaaaactaattcagaagtaattgttgcaaagaaaagcaaagaaaacagaaagattcctgatggatacagtggatttgggaagcatgagaaaagtcatttgggaatgaaaaaatacagatacaatccaatgaggaaagccagcaatcaaaacgaaaatcttattctgcaccagaacattcagattttgaaacaaccgtttgactataataaatgtgggaaaaccttcttcaagagggcaattctcattacacaaaaggggagacagactgaaaggaaaccaaatgaatgtaatgaatgtaggaaaaccttttctaagagatctaccctcattgtacatcagagaattcatacaggggagaaaccgtatgtttgtagtgattgtaggaaaacttttcgtgtgaagacaagcctcactcgacaccgaagaattcatactggagagagaccctatgaatgcagtgaatgcaggaaaaccttcattgacaaatctgcccttattgtacaccagaaaattcatggaggggagaaatcctatgagtgtaatgaatgtggaaagaccttttttcggaagtcagccctggctgaacatttcaggtcacacacaggggagaagccttacgaatgcaaggaatgtggaaatgccttcagcaagaaatcgtatcttgttgtacatcaaagaactcacagaggagagaagccaaatgaatgtaaggaatgtgggaaaaccttcttctgtcagtcagcccttactgcgcatcagagaattcacacaggggaaaaaccctatgaatgtagtgaatgtgagaaaaccttcttttgtcaatctgccctcaatgtgcatcgaagaggtcatacaggagagaagccctatgaatgcagtcaatgtggaaaatttttatgtacgaaatcagccctcattgcacatcagataactcatagaggaaagaagtcttatgaatgtaatgaatgtgggaaatttttctgccataagtcaacactcactatacatcagagaacacacacaggagagaaacatggtgtgtttaataaatgtggtagaatctccattgtgaagtcaaactgcagtcagtgtaagagaatgaacacaaaggagaatctttatgagtgtagtgaacatgggcatgccgtcagcaaaaactcacacctcattgtacatcagagaactatatgggagagaccatatgaatgcaatgaatgtgggagaacctactgcaggaagtcagccctgactcaccatcagagaacacacacaggacagagaccctatgagtgtaatgaatgtgggaaaaccttctgtcagaagttctcctttgttgaacatcagcgaactcacactggggagaaaccatatgaatgtaatgaatgtgggaaatccttctgccataagtcagccttcagagtccatagaagaattcacacaggagagaaaccatatgaatgtaatcaatgtgggaaaacctaccgtcgcctgtggactctcactgaacatcagaaaatacacacaggagagaaaccttatgaatgtaacaaatgtgagaaaacatttcgccacaaatcaaactttcttttacatcagaaatcccacaaggaataagttccaacaaagtaataaattccaacaaagcaacaaatcaaataacttacacaatgctaaactgtgagtatgtatagaggagtaaaatcttataaatgtaatgaatatggaaaatttttctgccataagtcaaccctcaatgtaacatcagagaaatcatgtaggaaagaaataatttgtttaataaatgtattattcattgtgaactatgaaaatattcaacagcaattcaaaggttatgccaaatgtgcctcccttttaaaataatgaaacaaacattgtttaagttaaattgttacttggttcctccccacagtgttacttgatagtgtatgttacgaggtgtgaggatctgaccttcatttcaaatcaataccattgtttgatagttgagtaagttacagtttctcaatttatggtgtattttcagatttggcagattttttgttgtctgctaactccatagtcttctagtagtggactgtatacctttatctgcaaaggtgacaactcaggagaactaaccattgtactctatgcacccatggtaattataccccaggtgagcattttgtaaagctgagccagtgaaagcccttcctaagacctttctaa

SEQ ID NO: 74718 - DNA, 2915 bp, Homo sapiens
tgtcagaatgtatgctcctaaagagtaagattagtattttatgtgattagtaatccaggcaattggaatagctccaggacatggtataagctcagcacatttttaaaattcattttaaaaaatgaacacagtgacagatttttaattttctgccctcccacaattacatctctctatagctttccattagccatggcagtggtcttcttatagtttatgttaccatacatttgatatcactcaattttggtcacccaagattaaacattttctttcagataccagtttcattccaggacctgactgtgaacttcacccaagaggaatggcagcaactggaccctgctcagaggctcctgtacagggatgtgatgctggagaactacagcaacttggtctctgtggggtatcatgttagcaaaccagatgtgattttcaaattggagcaaggagaagagccatggatagtggaggaattctcaaatcagaactacccagacattgatgatgccttagagaagaacaaggaaatccaagataaacatttgacacaaactgtattcttcagcaacaaaacactgattacagaaagagagaatgtatttggggaaacacttaatctgggcatgaatagtgttccctcaagaaaaatgccctataaatgtaatccaggaggaaacagtttgaaaactaattcagaagtaattgttgcaaagaaaagcaaagaaaacagaaagattcctgatggatacagtggatttgggaagcatgagaaaagtcatttgggaatgaaaaaatacagatacaatccaatgaggaaagccagcaatcaaaacgaaaatcttattctgcaccagaacattcagattttgaaacaaccgtttgactataataaatgtgggaaaaccttcttcaagagggcaattctcattacacaaaaggggagacagactgaaaggaaaccaaatgaatgtaatgaatgtaggaaaaccttttctaagagatctaccctcattgtacatcagagaattcatacaggggagaaaccgtatgtttgtagtgattgtaggaaaacttttcgtgtgaagacaagcctcactcgacaccgaagaattcatactggagagagaccctatgaatgcagtgaatgcaggaaaaccttcattgacaaatctgcccttattgtacaccagaaaattcatggaggggagaaatcctatgagtgtaatgaatgtggaaagaccttttttcggaagtcagccctggctgaacatttcaggtcacacacaggggagaagccttacgaatgcaaggaatgtggaaatgccttcagcaagaaatcgtatcttgttgtacatcaaagaactcacagaggagagaagccaaatgaatgtaaggaatgtgggaaaaccttcttctgtcagtcagcccttactgcgcatcagagaattcacacaggggaaaaaccctatgaatgtagtgaatgtgagaaaaccttcttttgtcaatctgccctcaatgtgcatcgaagaggtcatacaggagagaagccctatgaatgcagtcaatgtggaaaatttttatgtacgaaatcagccctcattgcacatcagataactcatagaggaaagaagtcttatgaatgtaatgaatgtgggaaatttttctgccataagtcaacactcactatacatcagagaacacacacaggagagaaacatggtgtgtttaataaatgtggtagaatctccattgtgaagtcaaactgcagtcagtgtaagagaatgaacacaaaggagaatctttatgagtgtagtgaacatgggcatgccgtcagcaaaaactcacacctcattgtacatcagagaactatatgggagagaccatatgaatgcaatgaatgtgggagaacctactgcaggaagtcagccctgactcaccatcagagaacacacacaggacagagaccctatgagtgtaatgaatgtgggaaaaccttctgtcagaagttctcctttgttgaacatcagcgaactcacactggggagaaaccatatgaatgtaatgaatgtgggaaatccttctgccataagtcagccttcagagtccatagaagaattcacacaggagagaaaccatatgaatgtaatcaatgtgggaaaacctaccgtcgcctgtggactctcactgaacatcagaaaatacacacaggagagaaaccttatgaatgtaacaaatgtgagaaaacatttcgccacaaatcaaactttcttttacatcagaaatcccacaaggaataagttccaacaaagtaataaattccaacaaagcaacaaatcaaataacttacacaatgctaaactgtgagtatgtatagaggagtaaaatcttataaatgtaatgaatatggaaaatttttctgccataagtcaaccctcaatgtaacatcagagaaatcatgtaggaaagaaataatttgtttaataaatgtattattcattgtgaactatgaaaatattcaacagcaattcaaaggttatgccaaatgtgcctcccttttaaaataatgaaacaaacattgtttaagttaaattgttacttggttcctccccacagtgttacttgatagtgtatgttacgaggtgtgaggatctgaccttcatttcaaatcaataccattgtttgatagttgagtaagttacagtttctcaatttatggtgtattttcagatttggcagattttttgttgtctgctaactccatagtcttctagtagtggactgtatacctttatctgcaaaggtgacaactcaggagaactaaccattgtactctatgcacccatggtaattataccccaggtgagcattttgtaaagctgagccagtgaaagcccttcctaagacctttctaa

SEQ ID NO: 74719 - DNA, 242 bp, Homo sapiens
gtcttcccttttatttatccatactcaaagttaccaattggttccaaaagtgaacaattataggtaacacattttgagttcttgctgtctgctccatgttaaggactttacatagattagattatttatagctcacaacacttagagagtattttatagatgaaattgaggccgggcgcggtggctcacgcctgtaatcccagcactttgggaggccgaggagggtggatcacctgagatca

SEQ ID NO: 74720 - DNA, 449 bp, Homo sapiens
aggataaacatggactttgatacatctttcctaatttccttctcgtaattttcagttagaacttgaaacatgtgattaggtcaggaccagcttaaagctgaagggggccgtaaaaagtcctttcaggctgtcattttcaagatgaagatcgaagggcccagagctctagaacccgttagtgatgagtcaggacttgaagcccgaggtccgaacttcccccagtcacctgtcaccacgcggtctgtggacatgcctcctctctgagctacttccctgtgtgaaacggtgccagcctgcgttttacatagaaaagctgtaggaaccacattaaaagcatgtcattccaaatcttggttcaattttctaaaatatgaatggaagtaatatttttgccatttaaaaaataatacgatctgtgaaaataaatattgtattttcatattgggtag

SEQ ID NO: 74721 - DNA, 429 bp, Homo sapiens
aaacatgaaatctttccttgccctggtcctttaagaaaaagcattcatcccttgtgttgaccctttcctaaaaagtttgtttatgcaacctgcaaaagagtggaaggcagctcacacgcagacatgcagacgtgaatggagagatggtcacgagtgtgaccccagctctatcccagttgagtgcttaaagagcttttctctgggcaactgcttctctagcaccccataattagcctggtctctgaattgcatatagattgagtggctgggggaagaggagcaagagaatagctctagaagcaaataaaaattatgcagctgtctctagcaagaaaaagagagaatcaccaacagaaaattgggaaagaactgtgaccatacacagctttaaattctctttcacaaatctcatagattgagcaaaaaaaa

SEQ ID NO: 74722 - DNA, 273 bp, Homo sapiens
catgatagatacttccttaaatttttagttcatgtaagtgacatttatggttctgtgatgttccttgcttttcccgtatgcatcatcatgctttaatatccatcgctgccactcgtgtgcattcagtctgtttttcctccttactgcagagtgcttcgttttagccagccaccctcctggagaaggtatccaggctgcctctaactccacaacaacactgaatgcatagtctcaaacgtgttgccttacggcgctgtgtggagatttctctgg

SEQ ID NO: 74723 - DNA, 162 bp, Homo sapiens
agaggtcagggcacgtgatgctgcctggctgtgctgaagccgcaggtctgggaggctgggttgtgatacacgcttagagagagagctgttccctggggtcccagcgcagcttttcttggttctttatcttgactggataaatgactgtttctgagctcaggg

SEQ ID NO: 74724 - DNA, 1040 bp, Homo sapiens
tctggggaaggagggggagctggcagcaagggacactgcttagagccagtcctttggggatccacaagaccacaaccatcccctgtgccccctccccacgcctcccatgtctagaactttgggtcctaaggctctagcccacaagtcccctagaaaaacagtcttggccctgggtccccctgagcaaaatccctcccaaactgccctaatacccaaggacctctcattccctcttagggaccccctctcctgacccagcccactagaaacagaaactcaaacccagatgcaactcctagctccatcatttaggagctgtacaaccttgggcaagtaataaccttgctaagcctctgtttattcatctgtaaaaagggtctaataatgccttctttagagaattgctggaggctgtcattaatgagacatttatgtaaactgcttagtaggtgactaataagtgcaagcctcttccctcagggcctttgctacacaaaggcattggcaccatttgctcagtctcaggatcctggcctccaatctgagactgtgctccagaacttctcccacagacattttctctctacaacccccacctctcctccatcacaccacaggaaaggccttagtcccaggacacctcccctcttccctcacatacacacaccctgttccaagatccctttaccctcctttctttctgtctgtcttttcctgttatctagtcgctggcctctcctctgctatgcatacatttttttctctcggggacctgaactggggtgggggagaaaagtcaacatgagatagggagaaaacaaggttcagatctcaactctgacattcccttgccagctgtgtgactttaggcaagttaatgcacttccctgagcctctgtttccgcctctgtacatttcatttgataaacatttcttgagtgtctgctaggtgccagcactgttccagggcctggagataaacggaggtgaaaacacaggaaaaagccctgccctcttgtagttacagcaaaaaccaagat

SEQ ID NO: 74725 - DNA, 328 bp, Homo sapiens
ggcaagagcagtaatttttgagttttttagtcactgaaccctttcttgaaacccttaacatatagcaagaacataaaccaaaaaagcaaagttgctgtgcttgaaggtctcggattgggggcctgaacctgcctggccctactgctaaagcgcttgcctcaaagaaataagagcacagtttgaaacacctgcaatacagaatacaaaatatgcttcagacaaatctcttactcctaataaatttataatcttcctagagaacagttgaatgcagcacatcaatggagtgctaaattggttcagtcaagaaaatcagaaagtgcaaatt

SEQ ID NO: 74726 - DNA, 231 bp, Homo sapiens
tgctttgatgggcattttgtccaattctttgttcaaaacgccaagaacctggacaactttcagtcatcaccctctaccgctaacagactgggagcagtgtggtgtagtagctaagccccatggagtgattaagcgagcaggtaatctgggttcaatgtttggttttgctctccatatcagctatgtgaccttcagtaaaatctctggaagccttgcttttttctcatttga

SEQ ID NO: 74727 - DNA, 527 bp, Homo sapiens
cactccagcctgggtgacaaagtgagactccgtctcaaaaataaataaataaaataaaataaaatttaatgatcctagaatttattttgagagcattagaaaacacagataagtataaaaaccagtatcaaatcaactttactgatcaagctctgcttaggattctgtttcctccattttctcttttccattttatttgttcaacaggagagtcaccaaaaagtagagagcaatagaaggaggaggagaataggattcacatgtattgaatgtcttttatacaccaggtagcactaagctcttaacatattttatctcatctaatagatacaacactatgagatggaaattattcagctgctgatataatggagatcccaagagatcagagtgacttgcccagggtcacagaaccagtaatagacctgagttcaaattctgcctctatgtggcccataagcctatgctctttgcattgtagcatatgttttatttaaaacagcctttcccaattatctttcccaaaa

SEQ ID NO: 74728 - DNA, 392 bp, Homo sapiens
gaaatacgaggatattcacctcattttccatcttaaaagattgctcagtatcttcttggatctgaagtgaatggtgactttcagagttttgctatgctgttctattcctgacactcatggtgtgtgagttagaaatattgtttgacaagatttcaagatttgaatgctattacagacaaacctaagccagtatattattcataattattaattgttttaaataattactgatatctgtcagcagttagtggtgaggatcataaaatttctctgctgctgcatctgtatttagtatgagagcaagtctcagaaataatgctgtatctacactgtcatgtatttgccatttgtcatgagaatgtttaaaaacatttgcttgatgaaatttcagt

SEQ ID NO: 74729 - DNA, 602 bp, Homo sapiens
ggggtgggaggatcacttgagcctgggaggcggaggttgcaatgagctatgatcactcaaccggactcctgggtgacagagcaagactgtatctaaaaaaaaaaaaaaaaaagaagattctggaaccagattgacgtttaaataatttatctaatttatctgtgccttggtttccccttctataaaatgagcatgattttatacatgtaggattattgtgagagttttaaaaaagtactgtttttaagggcatagaacaatgcctaatacatatcaagtgctataaaacgattgatgatgatgatgatgtgtggtcatcttgttaaaatctagactccagttacaatgacaccctatctctacagcctcatccattgctcttgaactccaatctacactgtcctttagcctgttcctcataaggaccacccttgtacctttcatttatgggcctttgcagatggtaatgcctgtctccctgactagaatgtaagcttcataagagcagggacttctgtctgttttgttccccactctttcccaaacaactagttcaatcatatttgttcaataaataaatatctactgcaacaactagaaaa

SEQ ID NO: 74730 - DNA, 425 bp, Homo sapiens
agctgaagcttgagctgcttctctggagttctgcccccacggtgctgggaccaaaacagccgacttgacagcccgagggtgggaaggggagtgtgtgtcacctcgagagctgtgagtgcgttgacttggcgcagtggtcagccgagtttctcctgtcacccaccttcctccccacccacctcgctttcctcttagaccagtttggatggggttgtttactgatttagcctttaggtttacattctgctcagcccctggctcctcggaaatcagcaactttcaattaagggaagtggagagtgcatgtgtttgggtgacttcatacacagttcttcctgtaatgaattcggaaatcagacacaatgactggtatttgaaaggtgggatgacttcattttaataaagagaattcaccaacagcattt

SEQ ID NO: 74731 - DNA, 661 bp, Homo sapiens
tttttttttaagtatttttacattgcagtacttgttttgcttgttggtgatgtttgcttatttaatacattccgtcagggacagaaattacatgcttttttttctttctaggaagtgtgttgagttccccccttccccgacatttttttcttttttgggtggtggtgatggtagtggttatgtctgtttaaatgaagttgcttttacagcaccaaagacttaatcatccatttcctatataaaggtagctactttttgcatagacctcaagtatattgtagtgtaaaggtggaatttaaggaaaggtattaaattgaggctgtgttttagcttacaggcaagtaataaattgtatcatttatcttgaatgtatcatagataagctgctatataacgattgccacttcagatagctgtgaaattaggtgattaactagttgttatttagccttctaatttctgtataagtctaattacatgaatagaaattggggttttgattttttactttgcttttctgtttggagtgtcattgtaactactgtattgtaaatggtggaaaataattgcatttgttactttggggtgtgttatttgcatcagtattttatctctattaatgtttgtgctcatcactgcatattaaaaaaacttggatgta

SEQ ID NO: 74732 - DNA, 2326 bp, Homo sapiens
tttttttttaagtatttttacattgcagtacttgttttgcttgttggtgatgtttgcttatttaatacattccgtcagggacagaaattacatgcttttttttctttctaggaagtgtgttgagttccccccttccccgacatttttttcttttttgggtggtggtgatggtagtggttatgtctgtttaaatgaagttgcttttacagcaccaaagacttaatcatccatttcctatataaaggtagctactttttgcatagacctcaagtatattgtagtgtaaaggtggaatttaaggaaaggtattaaattgaggctgtgttttagcttacaggcaagtaataaattgtatcatttatcttgaatgtatcatagataagctgctatataacgattgccacttcagatagctgtgaaattaggtgattaactagttgttatttagccttctaatttctgtataagtctaattacatgaatagaaattggggttttgattttttactttgcttttctgtttggagtgtcattgtaactactgtattgtaaatggtggaaaataattgcatttgttactttggggtgtgttatttgcatcagtattttatctctattaatgtttgtgctcatcactgcatattaaaaaaacttggatgtatcagtgtaacttaattttttattttcatactggcattgtagacacttgagaaagctgtatcttgcaggcttgacttaacttttttccttaaaaatctggaatataatcttacagcatttactggaataaacagtacaaagcattggagtgtaaaactctagatgttttggatttacagcgtttctttgataaatgaattgtataccactagtacagctctagtacagcgttcacaataagctaataatggataagttttcttcactccattaacacaagcagtgttttatttaataatcatcaatgaaataaatgtgcctgaaattgattttaaaaattacagtattagatcataaagtaaaaaccagcagtacatttttagtcacactgaaaatgaaggacttaattttccccacaagtttcagtgtttttagtaattaattctatgcattttatacaaatagaaatatatatatataaaaaattaaatgtttaaaaaggagtagcctaagattaatttaaaagattatttacagatgacacatttatggggtcactatttaagtaaatttgctgccctccacagccttctaattttatttatatgttccagcagattattaggatctgcttacttcttaggaaagaatcaatgctggcaacacattgtttcagaaacaccaagtgcaaaggattgattgtatcacaacaggtacaaaactgacagagttttctttttgtttagggccatgtttactaccctgaaatgttgtattttttgtctttaatttccaagacttaaagcagtcttgttaaattgacataaatggtaaacttcaacattttcataatacagtattaatgtttgataaaggtatatcccagttaactacactgctctttaattgcaatcatgggcattttaatgtattttaaaataaatttcaaaattctgctaaattcttaatttagcatattgacaaagtaatctggatttataccttttaaaaaccattttgaccagttttcttcggttttaatgctttcttaaataaaacactgcatgatttccaagttgcatatttgcatactattttaatttgcaaaatgttttttaaatcaaatatcctgatatttagttgttttttttttcctccagcgtgtttaattaaatatgttactgtattagcaaaacattttcatttttaaaatctgctaattttaaacttggactgtgttaagtaaaagttaaatcatacactgcaaggtgtaggaagatttgttttaatgaatccagtgatacagatttgattactaagtttgaactgttaattgtttaacaattttagacttgtggctttctttctttggtttatttgtttttgcttttactcctatgctacactagtttgccatgtagcaattgcactgtgcaatattacaataaggactgggaaaattttatggatgtaatgtctattacggtttgcgatagtatttctctctagttctcagtgatttaaatgtgaccaagccttctgtactttgtcacaaaaagcgggttttccaggtgactattttggtgagtgtcaaaataagaatttatggtgtattactgtcgattcactttgaattaaaatatatatattgcagcaaaaaaattgt

SEQ ID NO: 74733 - DNA, 1649 bp, Homo sapiens
tttttttttaagtatttttacattgcagtacttgttttgcttgttggtgatgtttgcttatttaatacattccgtcagggacagaaattacatgcttttttttctttctaggaagtgtgttgagttccccccttccccgacatttttttcttttttgggtggtggtgatggtagtggttatgtctgtttaaatgaagttgcttttacagcaccaaagacttaatcatccatttcctatataaaggtagctactttttgcatagacctcaagtatattgtagtgtaaaggtggaatttaaggaaaggtattaaattgaggctgtgttttagcttacaggcaagtaataaattgtatcatttatcttgaatgtatcatagataagctgctatataacgattgccacttcagatagctgtgaaattaggtgattaactagttgttatttagccttctaatttctgtataagtctaattacatgaatagaaattggggttttgattttttactttgcttttctgtttggagtgtcattgtaactactgtattgtaaatggtggaaaataattgcatttgttactttggggtgtgttatttgcatcagtattttatctctattaatgtttgtgctcatcactgcatattaaaaaaacttggatgtatcagtgtaacttaattttttattttcatactggcattgtagacacttgagaaagctgtatcttgcaggcttgacttaacttttttccttaaaaatctggaatataatcttacagcatttactggaataaacagtacaaagcattggagtgtaaaactctagatgttttggatttacagcgtttctttgataaatgaattgtataccactagtacagctctagtacagcgttcacaataagctaataatggataagttttcttcactccattaacacaagcagtgttttatttaataatcatcaatgaaataaatgtgcctgaaattgattttaaaaattacagtattagatcataaagtaaaaaccagcagtacatttttagtcacactgaaaatgaaggacttaattttccccacaagtttcagtgtttttagtaattaattctatgcattttatacaaatagaaatatatatatataaaaaattaaatgtttaaaaaggagtagcctaagattaatttaaaagattatttacagatgacacatttatggggtcactatttaagtaaatttgctgccccctcttaatactcaccaaataaattctacttcctgtccacctaaaaaaaaaaaaaaaaaaaaaaaaaaaaaaaaaagaaaaaaaaagaaaaaagcaagagaagaaaggaaaaccaagcactgcgacaccacgacagaaacacagaggacgacctaatgaacgacggccggaacgaaacacacacaccccagagtcaacaaacgaaccacagagaggaaacaagaaacagcggagagaaacaacaacgcagagcagaatccacagcgacgaagacaaccacccctcgagagaaaaagaaccaaacagaataaagcgaaacaaagcaaatgcaaccaagacgcatgacgcaatataacgacacacagacgaaaacaagacgaccgaagagcaacaaacgaagcaataacaa

SEQ ID NO: 74734 - DNA, 1616 bp, Homo sapiens
tttttttttaagtatttttacattgcagtacttgttttgcttgttggtgatgtttgcttatttaatacattccgtcagggacagaaattacatgcttttttttctttctaggaagtgtgttgagttccccccttccccgacatttttttcttttttgggtggtggtgatggtagtggttatgtctgtttaaatgaagttgcttttacagcaccaaagacttaatcatccatttcctatataaaggtagctactttttgcatagacctcaagtatattgtagtgtaaaggtggaatttaaggaaaggtattaaattgaggctgtgttttagcttacaggcaagtaataaattgtatcatttatcttgaatgtatcatagataagctgctatataacgattgccacttcagatagctgtgaaattaggtgattaactagttgttatttagccttctaatttctgtataagtctaattacatgaatagaaattggggttttgattttttactttgcttttctgtttggagtgtcattgtaactactgtattgtaaatggtggaaaataattgcatttgttactttggggtgtgttatttgcatcagtattttatctctattaatgtttgtgctcatcactgcatattaaaaaaacttggatgtatcagtgtaacttaattttttattttcatactggcattgtagacacttgagaaagctgtatcttgcaggcttgacttaacttttttccttaaaaatctggaatataatcttacagcatttactggaataaacagtacaaagcattggagtgtaaaactctagatgttttggatttacagcgtttctttgataaatgaattgtataccactagtacagctctagtacagcgttcacaataagctaataatggataagttttcttcactccattaacacaagcagtgttttatttaataatcatcaatgaaataaatgtgcctgaaattgattttaaaaattacagtattagatcataaagtaaaaaccagcagtacatttttagtcacactgaaaatgaaggacttaattttccccacaagtttcagtgtttttagtaattaattctatgcattttatacaaatagaaatatatatatataaaaaattaaatgtttaaaaaggagtagcctaagattaatttaaaagattatttacagatgacacatttatggggtcactatttaagtaaatttgctgccctccacagccttctaattttatttatatgttccagcagattattaggatctgcttacttcttaggaaagaatcaatgctggcaacacattgtttcagaaacaccaagtgcaaaggattgattgtatcacaacaggtacaaaactgacagagttttctttttgtttagggccatgtttactaccctgaaatgttgtattttttgtctttaatttccaagacttaaagcagtcttgttaaattgacataaatggtaaacttcaacattttcataatacagtattaatgtttgataaaggtatatcccagttaactacactgctctttaatttattttaaaatacattaaaatgcccatgattgcaattaaaggtcgacc

SEQ ID NO: 74735 - DNA, 603 bp, Homo sapiens
agcttgcatctttcctatcaaggttgtaattcagtccatagtgttttgatgctttgcttgtccaccaagcatttcatatacatttgttcatttatttattcattcacagccactctcttcatagaccattaatggagacaaacattaatcaaattcttacacaagtaactgcattattctaatgtgtgataaataatacaaatgaagaatgtagaattctaaaatatagtgaaaaaagagaaaggaaggggaattttgctgtggaattgacatgtatacataaatctgaatgatgaggaggatgaaagtgtacgaaaggttaatttatgttgataggaatttttttaaagaaatcgtttaagccaaagttatagaagacaacacattggaggctaacatcataggcaaatgatgaagttggagaatgaagcaacttcctgaccatgttgcagttttggtcttatttacagagcaatgggaagtaattgaaaactttaatcacagtaggatcaagttagatatgcagtaatattacagatcattcaggctacagcatggagaatgaattggaggaggacacgagtggatctacagaaatgagtt

SEQ ID NO: 74736 - DNA, 358 bp, Homo sapiens
gagattttaacagcaattagttaggactactctctccactctaaaatttccttggacatacttcctgttatggtgtgtggtattagagacattgcatgcattgtttggatctggctaaaaagatttatgacataatttgcatggtttgcaatcacttcagagtatatctaagttattgctagatatcccagtatgcacgtagctcacaggaaaacacactttgtgcttatcatgtgactcattcaccatcatgacctaagggtgcagtatcctgatataaaccttgctcctgaagtatgttgataagagaggtgaaagtgaagcaaagcttcaaatatgtggagctagaaactactct

SEQ ID NO: 74737 - DNA, 441 bp, Homo sapiens
tgtaaagaaaaccaaagaatgatcaatagtgatgaaagttatcactatttctggataaaccatgttctacgatagcacataactggtgatagcttggagtcatgcgaagacctctccaagaaaatgaaatgtaaagtgatgacttaaatatggaaaaggaaccatttgattaaaaagccaaactatgaagcttcaaagacaggatgttaccttgtgcaaaaccctgacttggggaaaaactgtgtttcaagagtggaaagagccctgtctcattaggagtgagggtcttgaatggtgcctgtggttgtagacagcagagcagagctttagcatcctggagatttgtaattgtactccacaagtaactaaaggatttaaggcagaggagggaaagaatcttgcttacattacaaaaaataaaaaagaaaaagaagaaataaa

SEQ ID NO: 74738 - DNA, 2624 bp, Homo sapiens
  misc_feature (98)..(98): n is a, c, g, or t
  misc_feature (174)..(174): n is a, c, g, or t
  misc_feature (340)..(340): n is a, c, g, or t
  misc_feature (740)..(740): n is a, c, g, or t
  misc_feature (1332)..(1332): n is a, c, g, or t
acggtccgctgcctccatgtggagggagatacgggaagctgcatgtcaccacggagacttccttgttcgtgtctatatggttcatacatggccttccncttaattaaagatgtcttccgaggaacattttgtctaagaataacccagtggaaatctctcacataagaagtgatngaactacacatctgagtatgagcctgcatggcatagtgagtctgcaactgtgaactcgggaaatcctgtaccttcccgtgcagtcgctccccagccatgcaggtatttccagagcctggagatcccagactacctttcaaaagaatgaattccagacccagagagncccctggaggagattcatggcaagcagccgtacgaaataacagaagccccagagaggggaagcaatttcctgcctaagtcgtccatctgtcagtggcaaagctaggactggaactcaggattctccatccctcttcccaaacctggcactatcttcctggctttctgggtctggagtcccatgttagaggccctctgttttcagagcaggactcattgaatatgtgtgctctttctactcaagtgcttcaaggatccttcctggaaaagcctcggttccggaccagtgctgtcatggcctcaccatgtcatagaattcccatcatttcacttgtgactcccttcttcctaggacccgggcataaattcttgaagagttgatctgagtgacagactcccangctatgccaaaaacggcctcttatttcccaatgattgagaccttttatttgatcaatctcatgtgctcactggaccccagtgataccttcacatacctgacacctcagggaaacacagcttccgttcaagtcaagatccttgctatactgcaaactcttatgaaacgtctaggagaattttcaggctcctttgtatatggaaaaaggtcagaatgaagctccaaattcttcagcatgtgtaaaaacttaagacaaccatattttatttttgttttattttttatttttttcattgtttttttttttgagacagccttgctctgttgcctaggctggagtgcagtggcgcgatctcggctcattgcaacttccacctcctgggttcaagcgattcttgtgcctcagcctcccaagtagctggaattacaggcatgcaccaccattcacagctaatttttgtatttttagtagagatggggtttcaccatgttggccaggctggtctcgacctcctgacctcaggtgatccagtcgtcttggcctcccaaagtgctgggattacaggcatgagcccctgtgcccagccaacaantacattttaaagcaactttattctcaactgaatgacattttaatcactttcttgcccatgtggatatggataaggatattttgccaatattcttgtttgtgtttgactgtgatgctattgttatacaaagaatgggcaggtggagctaagcagaaagagacagtcgggtacctgtaccatggaaaatggaagagagccaagcagactgcatccttagggggcagggaggtcagtgcaagttgggacaaagcctagctgagtcggtgagcacttcatggcagactagtcaaattatatctcttggactaagatcttcattaaaggcctgcacctcagagacatttcagcctaccaaggtgcatcattatggaagactgggcatgataatagtaatttaaatgaagttaaaagagcagtctaaattagaacaggtattcacattccaatttctcttgagaagagcctctgttggataaagaaaactcgctgagcaaaataaatcgattggaggtaaactttaccagccctggagtgcaaggtttagaaacatgcacacatcccacggtgttaagggtcctgctgttttcttccatgtcatttcatcacagaacaattttctacagcaacctgatctaccttgtggcccagtaaggcatgttttgttttgagatggagtctcactctgtcgcccaggctgtagtgcagtggcgtgatctccgctcactgcaagcactgcctcccgggttcacgccattctcctgcctcagcctcccaagtagctgggactacaggcgcccgccaccatgcccggctaattttctgtatttttattagagacggggtttcaccatgttagccaggatggtctcgatctcctgacctctgggatctgcccgtttcggcctcccaaagtgctgggattacaggtgtgagccaccgctcccagccaagcatgtgagagttttaaatcaaatgttaccttgtccctattagccttaccactgctaaatatctacacggttccctgttaaggagagtttctaaatgactctcttgagaaatcctggataaatggagaatggagcatttttcctgcctctaagctttgctccactgcaatctttcacatgctgtgtatccagagggtgactgccagatagcttcttgaagaaagggaggaggaaacggtcattttcttgctgcgctttctaacacccaacagaggaaatgcacagcataggtgtgtgggagtttggctgacttatggtaaaaaataaacatggtttcctgtt

SEQ ID NO: 74739 - DNA, 354 bp, Homo sapiens
gattggtatacgggcaacaatggattgatagccttaatatagaaatagttccatcaggccagatgcagtggctcaattctgtaaacccagtgctctgcacagctaggaaggaagatcacttgggcccaggagttcaaggctccagtgagctatgatcacgccactgcctccagcctgggtgacagagtgaggccctgtctctaaaaaatgaaatagctccatcaagtcaataattaaaagttcaacagcccaacagaacaaaaattgtaaaagaacacaaatagaaaatgtacaaaataaatattaatgacccataaccctataagggaaagtttaacctctctagtatttttt

SEQ ID NO: 74740 - DNA, 360 bp, Homo sapiens
ggaggttgcagtgagccgagatcatgccagcctgggtgaaagagcaagactccatctcaaaaaacaaaacaaaacaaaagaaaacaaacaaacaaaacattgagaacatcctatcacccctaagagaaagcttgtatccatgagcagtcacttccccattccgcccttcctcccaacccaacaactactacatccactttctgtcttgatgaattgcctgggcatttcatagcaatgggaccctaccatatggagtcctttgcgtctggcttctttcacttagcacagcgttttcagggtcatccttgctgcagtatgtgtcagggcttcatttcttttcatggctgaataatgttccac

SEQ ID NO: 74741 - DNA, 461 bp, Homo sapiens
tttttttaacttgaaagaacagctaacagacagattagaacagaattggctatttgacagattttctcagatgaactgtgatagtcatttcaagggaagtagctgcaagcatttgttggctgaaataaaatttaagtttatcatggaaaattagaatttgaaaaaacttagagtttaccacttgacagtatcctaaatacatatgacttttctgatgagtgccgatattaatgaaggttatttaaaaaatattaaataatgtataattctttttatataacagttaaaaataaaaccatgagtactagaataaaacataggtggctctttaatcttggtttgtgaaggtattttttaaaataagaaaaaagcaagaaatcactgctaaatttgactattaaaattaatttatcacaggcacaaaaatgttagaaaactaatggcaatagcaaatatatata

SEQ ID NO: 74742 - DNA, 371 bp, Homo sapiens
aaagagacaaggtctctctctctcttgcccaggttggagtgcagtggcaccatgatagctcattgcagcctccaactcctgggctcaagggatccttctgcctcagcctcctgaagtacttgggaccacagtcacataccactatgcctggctaattttttaatttttaatttttattttttagagacagggtctcattttgttgcccaggctggtctcaaactcctggcttcaagcaatcctcccacctcagcttcctaaagtactgggattacaggtgtgagctacctgtgcctggcccaggttgcattttaaaataaggggtagggagcttttagatgaggcctcatggaataggtcacatttgtgca

SEQ ID NO: 74743 - DNA, 245 bp, Homo sapiens
agtctagggaaacaggccccacccccggagcttccccttgctgcccttggctcaggggcagcacccgcttcaactggcactccgctccatccatggtgctgctttaccactgcctccctggacctgctgatgccctaccccataccccgcccccagcctgctcctgctgaagccaggccagcatgaagtcctcaggaaggctgggatgagcctcccatctcatttctgaggggtctgagccccat

SEQ ID NO: 74744 - DNA, 668 bp, Homo sapiens
ctgcaaaatacattaacccaatcccaacatcctcaaaattcaaaagtccaaaatctcatcatcatataaattatctaaatcaggtataaatgagactctggatatggaccaggatgaggcaaaatttctatctgtgaacctgtgaaactagaaaacaagttatcttcttccaaaatacaatggtgggacaagcatgggtaaccgttatcgacattcccatttaaccggggaggaaaaaggaggaaagaaaagaatcactaatcccaagcaattttgaaatccagtaggacaaattccttcaggcttgaaggctttggctcaggcctctgccctcagggcctgaggctctaccctctgggctatcctttctttttcttgaagggtagcacatgttgcagttcagttttatcaacctatgctgccaggttcaaattttaaagtcttcctcgagcagcaagaaaagacaaattagctgtctttggctgtgttcctctcaatagccatatcagcagtgcgttctatcttcagcaacgtcttgcaaactaaatttgagtatgaggctttggttaagatcactgtgtataagatatggctggccaggagtggtggctcatgcctataattccagcactttgggaggccgaggcgggtgtatcacctgatgtcag

SEQ ID NO: 74745 - DNA, 614 bp, Homo sapiens
ctgcaaaatacattaacccaatcccaacatcctcaaaattcaaaagtccaaaatctcatcatcatataaattatctaaatcaggtataaatgagactctggatatggaccaggatgaggcaaaatttctatctgtgaacctgtgaaactagaaaacaagttatcttcttccaaaatacaatggtgggacaagcatgggtaaccgttatcgacattcccattgaaatccagtaggacaaattccttcaggcttgaaggctttggctcaggcctctgccctcagggcctgaggctctaccctctgggctatcctttctttttcttgaagggtagcacatgttgcagttcagttttatcaacctatgctgccaggttcaaattttaaagtcttcctcgagcagcaagaaaagacaaattagctgtctttggctgtgttcctctcaatagccatatcagcagtgcgttctatcttcagcaacgtcttgcaaactaaatttgagtatgaggctttggttaagatcactgtgtataagatatggctggccaggagtggtggctcatgcctataattccagcactttgggaggccgaggcgggtgtatcacctgatgtcag

SEQ ID NO: 74746 - DNA, 805 bp, Homo sapiens
agggcggggagtgaagaccctggactgtggtcagaccgagctgggcgagtaacggcttgaggtgcggcggagccctaactagggacagaattaaatatgggtgatgttgagaaaggcaagaagatttttattatgaagtgttcccagtgccacaccgttgaaaagggaggcaagcacaagactgggccaaatctccatggtctctttgggcggaagacaggtcaggcccctggatactcttacacagccgccaataagaacaaaggcatcatctggggagaggatacactgatggagtatttggagaatcccaagaagtacatccctggaacaaaaatgatctttgtcggcattaagaagaaggaagaaagggcagacttaatagcttatctcaaaaaagctactaatgagtaataattggccactgccttatttattacaaaacagaaatgtctcatgacttttttatgtgtaccatcctttaatagatctcatacaccagaattcagatcatgaatgactgacagaatattttgttgggcagtcctgatttaaaactaagactggcttgtggttaaatgaatatgttcagtttttgaattttaatagtaactccaattcagtaaatggtatcactgtttaccccttttaaagatatgattagacttcgttagtaatgttcaacttttcacaaagatggtgagtgccatcttaaaacttactggagattggtttatatttagatttatataactgggtttgtgaatatcttctaatactggggaaatgcttcctgtcttagaac

SEQ ID NO: 74747 - DNA, 147 bp, Homo sapiens
tggtaaggagtgaagaagtgttgctttcccagcctcctctccactgggaaaagaaagagagaggcaaatggggtgacgacgatacatcaaaccactttttgcccgtgtcttcctgggccaagaagaaatacttcaaaagcacagtgt

SEQ ID NO: 74748 - DNA, 287 bp, Homo sapiens
gaaacaagggactggtgacctgaactgccacccccctccctggtgctcagatgcaatgaaattgtgaggcaacaaatctatggctaggtaaagggtcaactccatttcagcaaatgtttcagatgttccttcccgcctagtaatgttccagctttaccccagccttaatcttttaaaatgtatattttccttggtgttgattttaaagtaattcgtatgtatttattacactgggtttgttgcagtaagccacctcgaatgttgctgtagaattaaagtaagcaaat

SEQ ID NO: 74749 - DNA, 687 bp, Homo sapiens
  misc_feature (2)..(2): n is a, c, g, or t
  misc_feature (684)..(685): n is a, c, g, or t
  misc_feature (687)..(687): n is a, c, g, or t
anacccagaacaaagacctgagtggttttggttctgttgtgtgagttgtagttcaaatattcgccttctgttcattaaaggcatactcagagcaatgctgggaaatacagcaatctgtcttgcatcaaagcaatcccacagtgagatctgcccagcatatattttcctggcatgatgtggtgagattcagtctaagcacgttacttcagttttgatatcacagggaaagcacagaacatatcttttcatagtaccacagatttttgctgcatcctgtaaatgacacatgttaccactttttggtggatgagctccagggctaacagagcctgcggtttgtagtgttcctagtgtgagaaagaggttgccctttctccagcgctctgtgctcccattcccctacattgactaatctaactactcagtaattcaaggatttctttcaaggagaggacaaaactcggctccacattgcataattctaacacccttgagagagagagagcacacatactgacatattcctaggatagaaaaaaatgggcaatgttttgaggaagttagtctatgatgagggagagattagaaagctggaaaagtgttgtaaaggttgttttactttaataaatgctggagtttgtttataagttataacaacaagctaatataagattttaattaagnngn

SEQ ID NO: 74750 - DNA, 789 bp, Homo sapiens
ggccacccacatagaagagacatagaagatctcccagctcttcctgggagcaaagctgtgcaacccagagcctcaagctgccgctttggcaggaaagccaactcccgcgtgctgaagtcactgaatgcacaccagagagaaacccacttcgcaggaagcaaatgctttgtctcatttacatttttcgcaggtgttctgggatgtgaaggggacgtgtccaacgtccaggtccttcgtcacagccataaaggaggccatgcgtgggacacgccctcattccaggcaatgtgagagacgccttcaccttgaccgtgttgctgcctctcgttccaaccgtgctcagaaccaggagccggcggggacggagccacagagcagccgcttccccgtgtccgcgcccctgtactgtcttcacactcgccatcaccttgcacaccctgcggcaccacacgaccgccacggagcctgtggggccctcctgtgtctcaaacccgagcccttccccggcgcccacatccaggttgccaactaggaggaggcaggcctggggcactggcaggaggacgggtgggcacaggaaaacctgcctgaagatgaggtcatgaggaaggcagcacagaaggatgggagaagaggccttaagacacataatgtgagcacctggatccagctgtgcctgaagccccttggacttccaggttatgtaagcccattccttacaaccctttgcatttgttttctgccccttgcaaataaaagaccatgacctttcacgctatgagcagctga

SEQ ID NO: 74751 - DNA, 436 bp, Homo sapiens
gcatcttatgatttatcacgatggcatctcttcctctttatgtcctccctctccttttctctcctctttattgttagtatctgaaacctctccagacctagaggagtgccaggtgcacagtaaacatccaatgaatatttgttgagtgatacaaatggtcaatggatattgctatgaaaaaaggacaaggctgctcttctcaaaatttcctcacagaaaaatacaataaaacattctgtaactttccggtaaaagcatcatataggtgaccctagatattggcatgtggacttgtttttgccaaataagtaagtaaagatgagaatattaatgtataattttgtgtaatttgcaaagaagaatctatggtatcatgaagtctggggagagagagagagagagagagagagtgtgtgtgtgtgtgtgtgtgtgtgtg

SEQ ID NO: 74752 - DNA, 1261 bp, Homo sapiens
ctgtttcaccttgtgtctgagctggtctgaaggctggttgttcagactgagcttcctgcctgcctgtaccccgccaacagcttcagaagaaggtgactggtggctgcctgaggaataccagtgggcaagagaattagcatttctggagcatctgctgtctgagcagcccctgggtgcgtccactttctgggcacgtgaggttgggccttggccgcctgagcccttgagttggtcacttgaaccttgggaatattgagatggacttcagcagaaatctttatgatattggggaacaactggacagtgaagatctggcctccctcaagttcctgagcctggactacattccgcaaaggaagcaagaacccatcaaggatgccttgatgttattccagagactccaggaaaagagaatgttggaggaaagcaatctgtccttcctgaaggagctgctcttccgaattaatagactggatttgctgattacctacctaaacactagaaaggaggagatggaaagggaacttcagacaccaggcagggctcaaatttctgcctacagggtcatgctctatcagatttcagaagaagtgagcagatcagaattgaggtcttttaagtttcttttgcaagaggaaatctccaaatgcaaactggatgatgacatgaacctgctggatattttcatagagatggagaagagggtcatcctgggagaaggaaagttggacatcctgaaaagagtctgtgcccaaatcaacaagagcctgctgaagataatcaacgactatgaagaattcagcaaagagagaagcagcagccttgaaggaagtcctgatgaattttcaaatggggaggagttgtgtggggtaatgacaatctcggactctccaagagaacaggatagtgaatcacagactttggacaaagtttaccaaatgaaaagcaaacctcggggatactgtctgatcatcaacaaaatttgtttgaaatcttttaaaaattcaaatgatttttacaagttttaaataagctctccccaaacttgctttatgccttcttattgcttttatgatatatatatgcttggctaactatatttgctttttgctaacaatgctctggggtctttttatgcatttgcatttgctctttcatctctgcttggattattttaaatcattaggaattaagttatctttaaaatttaagtatcttttttcaaaaacattttttaatagaataaaatatattttgttca

SEQ ID NO: 74753 - DNA, 1113 bp, Homo sapiens
  misc_feature (1104)..(1106): n is a, c, g, or t
  misc_feature (1113)..(1113): n is a, c, g, or t
ctgtttcaccttgtgtctgagctggtctgaaggctggttgttcagactgagcttcctgcctgcctgtaccccgccaacagcttcagaagaaggtgactggtggctgcctgaggaataccagtgggcaagagaattagcatttctggagcatctgctgtctgagcagcccctgggtgcgtccactttctgggcacgtgaggttgggccttggccgcctgagcccttgagttggtcacttgaaccttgggaatattgagattatattctcctgccttttaaaaagatggacttcagcagaaatctttatgatattggggaacaactggacagtgaagatctggcctccctcaagttcctgagcctggactacattccgcaaaggaagcaagaacccatcaaggatgccttgatgttattccagagactccaggaaaagagaatgttggaggaaagcaatctgtccttcctgaaggagctgctcttccgaattaatagactggatttgctgattacctacctaaacactagaaaggaggagatggaaagggaacttcagacaccaggcagggctcaaatttctgcctacagggtcatgctctatcagatttcagaagaagtgagcagatcagaattgaggtcttttaagtttcttttgcaagaggaaatctccaaatgcaaactggatgatgacatgaacctgctggatattttcatagagatggagaagagggtcatcctgggagaaggaaagttggacatcctgaaaagagtctgtgcccaaatcaacaagagcctgctgaagataatcaacgactatgaagaattcagcaaagagagaagcagcagccttgaaggaagtcctgatgaattttcaaatgactttggacaaagtttaccaaatgaaaagcaaacctcggggatactgtctgatcatcaacaatcacaattttgcaaaagcacgggagaaagtgcccaaacttcacagcattagggacaggaatggaacacacttggatgcagggtttgagaatgtttttagctggtggcaataaatattagaagcctgcagaatccagctacgaatatagagggttttgctcttgnnnttctggn

SEQ ID NO: 74754 - DNA, 802 bp, Homo sapiens
  misc_feature (793)..(795): n is a, c, g, or t
  misc_feature (802)..(802): n is a, c, g, or t
ctgtttcaccttgtgtctgagctggtctgaaggctggttgttcagactgagcttcctgcctgcctgtaccccgccaacagcttcagaagaaggtgactggtggctgcctgaggaataccagtgggcaagagaattagcatttctggagcatctgctgtctgagcagcccctgggtgcgtccactttctgggcacgtgaggttgggccttggccgcctgagcccttgagttggtcacttgaaccttgggaatattgagggtcatgctctatcagatttcagaagaagtgagcagatcagaattgaggtcttttaagtttcttttgcaagaggaaatctccaaatgcaaactggatgatgacatgaacctgctggatattttcatagagatggagaagagggtcatcctgggagaaggaaagttggacatcctgaaaagagtctgtgcccaaatcaacaagagcctgctgaagataatcaacgactatgaagaattcagcaaaggggaggagttgtgtggggtaatgacaatctcggactctccaagagaacaggatagtgaatcacagactttggacaaagtttaccaaatgaaaagcaaacctcggggatactgtctgatcatcaacaatcacaattttgcaaaagcacgggagaaagtgcccaaacttcacagcattagggacaggaatggaacacacttggatgcagggtttgagaatgtttttagctggtggcaataaatattagaagcctgcagaatccagctacgaatatagagggttttgctcttgnnnttctggn

SEQ ID NO: 74755 - DNA, 3633 bp, Homo sapiens
  misc_feature (2865)..(2865): n is a, c, g, or t
  misc_feature (2879)..(2879): n is a, c, g, or t
agctttgcggagctgggcggtgccgaggaggaggaggtggcggcctgggtctgacgcggccctgttcgagggggcctctcttgtttatttatttattttccgtgggtgcctccgagtgtgcgcgcgctctcgctacccggcggggagggggtggggggagggcccgggaaaagggggagttggagccggggtcgaaacgccgcgtgacttgtaggtgagagaacgccgagccgtcgccgcagcctccgccgccgagaagcccttgttcccgctgctgggaaggagagtctgtgccgacaagatggcggacggggagctgaacgtggacagcctcatcacccggctgctggaggtacgaggatgtcgtccaggaaagattgtgcagatgactgaagcagaagttcgaggcttatgtatcaagtctcgggagatctttctcagccagcctattcttttggaattggaagcaccgctgaaaatttgtggagatattcatggacagtatacagatttactgagattatttgaatatggaggtttcccaccagaagccaactatcttttcttaggagattatgtggacagaggaaagcagtctttggaaaccatttgtttgctattggcttataaaatcaaatatccagagaacttctttctcttaagaggaaaccatgagtgtgctagcatcaatcgcatttatggattctatgatgaatgcaaacgaagatttaatattaaattgtggaagaccttcactgattgttttaactgtctgcctatagcagccattgtggatgagaagatcttctgttgtcatggaggattgtcaccagacctgcaatctatggagcagattcggagaattatgagacctactgatgtccctgatacaggtttgctctgtgatttgctatggtctgatccagataaggatgtgcaaggctggggagaaaatgatcgtggtgtttcctttacttttggagctgatgtagtcagtaaatttctgaatcgtcatgatttagatttgatttgtcgagctcatcaggtggtggaagatggatatgaattttttgctaaacgacagttggtaaccttattttcagccccaaattactgtggcgagtttgataatgctggtggaatgatgagtgtggatgaaactttgatgtgttcatttcagatattgaaaccatctgaaaagaaagctaaataccagtatggtggactgaattctggacgtcctgtcactccacctcgaacagctaatccgccgaagaaaaggtgaagaaaggaattctgtaaagaaaccatcagatttgttaaggacatacttcataatatataagtgtgcactgtaaaaccatccagccatttgacaccctttatgatgtcacacctttaacttaaggagacgggtaaaggatcttaaatttttttctaatagaaagatgtgctacactgtattgtaataagtatactctgttatagtcaacaaagttaaatccaaattcaaaattatccattaaagttacatcttcatgtatcacaatttttaaagttgaaaagcatcccagttaaactagatgtgatagttaaaccagatgaaagcatgatgatccatctgtgtaatgtggttttagtgttgcttggttgtttaattattttgagcttgttttgtttttgtttgttttcactagaataatggcaaatacttctaatttttttccctaaacatttttaaaagtgaaatatgggaagagctttacagacattcaccaactattattttcccttgtttatctacttagatatctgtttaatcttactaagaaaactttcgcctcattacattaaaaaggaattttagagattgattgttttaaaaaaaaatacgcacattgtccaatccagtgattttaatcatacagtttgactgggcaaactttacagctgatagtgaatattttgctttatacaggaattgacactgatttggatttgtgcactctaatttttaacttattgatgctctattgtgcagtagcatttcatttaagataaggctcatatagtattacccaactagttggtaatgtgattatgtggtaccttggctttaggttttcattcgcacggaacaccttttggcatgcttaacttcctggtaacaccttcacctgcattggttttctttttcttttttctttctttttttttttttttttttttttgagttgttgtttgtttttagatccacagtacatgagaatccttttttgacaagccttggaaagctgacactgtctctttttcctccctctatacgaaggatgtatttaaatgaatgctggtcagtgggacattttgtcaactatgggtattgggtgcttaactgtctaatattgccatgtgaatgttgtatacgattgtaaggcttatgtcactaaagatttttattctgattttttcataatcaaaggtcatatgatactgtatagacaagctttgtagtgaagtatagtagcaataatttctgtacctgatcaagtttattgcagcctttcttttcctatttcttttttttaagggttagtattaacaaatggcaatgagtagaaaagttaacatgaagattttagaaggagagaacttacaggacacagatttgtgattctttgactgtgacactattggatgtgattctaaaagcttttattgagcattgtcaaatttgtaagcttcatagggatggacatcatatctataatgcccttctatatgtgctaccatagatgtgacatttttgaccttaatatcgtctttgaaaatgttaaattgagaaacctgttaacttacattttatgnattggcacattgtnttacttactgcaagagatatttcattttcagcacagtgcaaaagttctttaaaatgcatatgtctttttttctaattccgttttgttttaaagcacattttaaatgtagttttctcatttagtaaaagttgtctaattgatatgaagcctgactgattttttttttccttacagtgagacatttaagcacacattttattcacatagatactatgtccttgacatattgaaatgattcttttctgaaagtattcatgatctgcatatgatgtattaggttaggtcacaaaggttttatctgaggtgatttaaataacttcctgattggagtgtgtaagctgagcgatttctaataaaattttagttgtacacttttagtagtcatagtgaagcaggtctagaaaataagcctttggcagggaaaaagggcaatgttgattaatctcagtattaaaccacattaatctgtatcccattgtctggcttttgtaaattcatccaggtcaagactaagtatgttggttaataggaatccttttttttttttaaagactaaatgtgaaaaaataatcactacttaagctaattaatattggtcattaaatttaaaggatggaaatttatcatgtttaaaaattattcaagcactcttaaaaccacttaaacagcctccagtcataaaaatgtgttctttacaaatatttgcttggcaacacgacttgaaataaataaaactttgtttcttaggagaaaa

SEQ ID NO: 74756 - DNA, 473 bp, Homo sapiens
tttgatgtgttcatttcagatattgaaaccatctgaaaagaaagctaaataccagtatggtggactgaattctggacgtcctgtcactccacctcgaacagctaatccgccgaagaaaaggcgaagaaaggaattctgtaaagaaaccatcagatttgttaaggacatacttcataatatataagtgtgctagcatcaatcgcatttatggattctatgatgaatgcaaacgaagatttaatattaaattgtggaagaccttcactgattgttttaactgtctgcctatagcagccattgtggatgagaagatcttctgttgtcatggaggtagactagtaaatttgccttacagattttttttttcttctattattcggaaaatacctataataatcaagaggctgtgggaaaacaaagcagtgcttgtatgaaaactcaagtgattaaaactgttttaaacatgactaaac

SEQ ID NO: 74757 - DNA, 3018 bp, Homo sapiens
  misc_feature (2865)..(2865): n is a, c, g, or t
  misc_feature (2879)..(2879): n is a, c, g, or t
agctttgcggagctgggcggtgccgaggaggaggaggtggcggcctgggtctgacgcggccctgttcgagggggcctctcttgtttatttatttattttccgtgggtgcctccgagtgtgcgcgcgctctcgctacccggcggggagggggtggggggagggcccgggaaaagggggagttggagccggggtcgaaacgccgcgtgacttgtaggtgagagaacgccgagccgtcgccgcagcctccgccgccgagaagcccttgttcccgctgctgggaaggagagtctgtgccgacaagatggcggacggggagctgaacgtggacagcctcatcacccggctgctggaggtacgaggatgtcgtccaggaaagattgtgcagatgactgaagcagaagttcgaggcttatgtatcaagtctcgggagatctttctcagccagcctattcttttggaattggaagcaccgctgaaaatttgtggagatattcatggacagtatacagatttactgagattatttgaatatggaggtttcccaccagaagccaactatcttttcttaggagattatgtggacagaggaaagcagtctttggaaaccatttgtttgctattggcttataaaatcaaatatccagagaacttctttctcttaagaggaaaccatgagtgtgctagcatcaatcgcatttatggattctatgatgaatgcaaacgaagatttaatattaaattgtggaagaccttcactgattgttttaactgtctgcctatagcagccattgtggatgagaagatcttctgttgtcatggaggattgtcaccagacctgcaatctatggagcagattcggagaattatgagacctactgatgtccctgatacaggtttgctctgtgatttgctatggtctgatccagataaggatgtgcaaggctggggagaaaatgatcgtggtgtttcctttacttttggagctgatgtagtcagtaaatttctgaatcgtcatgatttagatttgatttgtcgagctcatcaggtggtggaagatggatatgaattttttgctaaacgacagttggtaaccttattttcagccccaaattactgtggcgagtttgataatgctggtggaatgatgagtgtggatgaaactttgatgtgttcatttcagatattgaaaccatctgaaaagaaagctaaataccagtatggtggactgaattctggacgtcctgtcactccacctcgaacagctaatccgccgaagaaaaggtgaagaaaggaattctgtaaagaaaccatcagatttgttaaggacatacttcataatatataagtgtgcactgtaaaaccatccagccatttgacaccctttatgatgtcacacctttaacttaaggagacgggtaaaggatcttaaatttttttctaatagaaagatgtgctacactgtattgtaataagtatactctgttatagtcaacaaagttaaatccaaattcaaaattatccattaaagttacatcttcatgtatcacaatttttaaagttgaaaagcatcccagttaaactagatgtgatagttaaaccagatgaaagcatgatgatccatctgtgtaatgtggttttagtgttgcttggttgtttaattattttgagcttgttttgtttttgtttgttttcactagaataatggcaaatacttctaatttttttccctaaacatttttaaaagtgaaatatgggaagagctttacagacattcaccaactattattttcccttgtttatctacttagatatctgtttaatcttactaagaaaactttcgcctcattacattaaaaaggaattttagagattgattgttttaaaaaaaaatacgcacattgtccaatccagtgattttaatcatacagtttgactgggcaaactttacagctgatagtgaatattttgctttatacaggaattgacactgatttggatttgtgcactctaatttttaacttattgatgctctattgtgcagtagcatttcatttaagataaggctcatatagtattacccaactagttggtaatgtgattatgtggtaccttggctttaggttttcattcgcacggaacaccttttggcatgcttaacttcctggtaacaccttcacctgcattggttttctttttcttttttctttctttttttttttttttttttttttgagttgttgtttgtttttagatccacagtacatgagaatccttttttgacaagccttggaaagctgacactgtctctttttcctccctctatacgaaggatgtatttaaatgaatgctggtcagtgggacattttgtcaactatgggtattgggtgcttaactgtctaatattgccatgtgaatgttgtatacgattgtaaggcttatgtcactaaagatttttattctgattttttcataatcaaaggtcatatgatactgtatagacaagctttgtagtgaagtatagtagcaataatttctgtacctgatcaagtttattgcagcctttcttttcctatttcttttttttaagggttagtattaacaaatggcaatgagtagaaaagttaacatgaagattttagaaggagagaacttacaggacacagatttgtgattctttgactgtgacactattggatgtgattctaaaagcttttattgagcattgtcaaatttgtaagcttcatagggatggacatcatatctataatgcccttctatatgtgctaccatagatgtgacatttttgaccttaatatcgtctttgaaaatgttaaattgagaaacctgttaacttacattttatgnattggcacattgtnttacttactgcaagagatatttcattttcagcacagtgcaaaagttctttaaaatgcatatgtctttttttctaattccgttttgttttaaagcacattttaaatgtagttttctcatttagtaaaagttgtctaattg

SEQ ID NO: 74758 - DNA, 2886 bp, Homo sapiens
  misc_feature (2733)..(2733): n is a, c, g, or t
  misc_feature (2747)..(2747): n is a, c, g, or t
agcgggagagctgcgtgacgcggcggcgcgcaagggacgtgcggagtgagtggcgctgcgggtggggccgtcggcggcgctggtgagagaacgccgagccgtcgccgcagcctccgccgccgagaagcccttgttcccgctgctgggaaggagagtctgtgccgacaagatggcggacggggagctgaacgtggacagcctcatcacccggctgctggaggtacgaggatgtcgtccaggaaagattgtgcagatgactgaagcagaagttcgaggcttatgtatcaagtctcgggagatctttctcagccagcctattcttttggaattggaagcaccgctgaaaatttgtggagatattcatggacagtatacagatttactgagattatttgaatatggaggtttcccaccagaagccaactatcttttcttaggagattatgtggacagaggaaagcagtctttggaaaccatttgtttgctattggcttataaaatcaaatatccagagaacttctttctcttaagaggaaaccatgagtgtgctagcatcaatcgcatttatggattctatgatgaatgcaaacgaagatttaatattaaattgtggaagaccttcactgattgttttaactgtctgcctatagcagccattgtggatgagaagatcttctgttgtcatggaggattgtcaccagacctgcaatctatggagcagattcggagaattatgagacctactgatgtccctgatacaggtttgctctgtgatttgctatggtctgatccagataaggatgtgcaaggctggggagaaaatgatcgtggtgtttcctttacttttggagctgatgtagtcagtaaatttctgaatcgtcatgatttagatttgatttgtcgagctcatcaggtggtggaagatggatatgaattttttgctaaacgacagttggtaaccttattttcagccccaaattactgtggcgagtttgataatgctggtggaatgatgagtgtggatgaaactttgatgtgttcatttcagatattgaaaccatctgaaaagaaagctaaataccagtatggtggactgaattctggacgtcctgtcactccacctcgaacagctaatccgccgaagaaaaggtgaagaaaggaattctgtaaagaaaccatcagatttgttaaggacatacttcataatatataagtgtgcactgtaaaaccatccagccatttgacaccctttatgatgtcacacctttaacttaaggagacgggtaaaggatcttaaatttttttctaatagaaagatgtgctacactgtattgtaataagtatactctgttatagtcaacaaagttaaatccaaattcaaaattatccattaaagttacatcttcatgtatcacaatttttaaagttgaaaagcatcccagttaaactagatgtgatagttaaaccagatgaaagcatgatgatccatctgtgtaatgtggttttagtgttgcttggttgtttaattattttgagcttgttttgtttttgtttgttttcactagaataatggcaaatacttctaatttttttccctaaacatttttaaaagtgaaatatgggaagagctttacagacattcaccaactattattttcccttgtttatctacttagatatctgtttaatcttactaagaaaactttcgcctcattacattaaaaaggaattttagagattgattgttttaaaaaaaaatacgcacattgtccaatccagtgattttaatcatacagtttgactgggcaaactttacagctgatagtgaatattttgctttatacaggaattgacactgatttggatttgtgcactctaatttttaacttattgatgctctattgtgcagtagcatttcatttaagataaggctcatatagtattacccaactagttggtaatgtgattatgtggtaccttggctttaggttttcattcgcacggaacaccttttggcatgcttaacttcctggtaacaccttcacctgcattggttttctttttcttttttctttctttttttttttttttttttttttgagttgttgtttgtttttagatccacagtacatgagaatccttttttgacaagccttggaaagctgacactgtctctttttcctccctctatacgaaggatgtatttaaatgaatgctggtcagtgggacattttgtcaactatgggtattgggtgcttaactgtctaatattgccatgtgaatgttgtatacgattgtaaggcttatgtcactaaagatttttattctgattttttcataatcaaaggtcatatgatactgtatagacaagctttgtagtgaagtatagtagcaataatttctgtacctgatcaagtttattgcagcctttcttttcctatttcttttttttaagggttagtattaacaaatggcaatgagtagaaaagttaacatgaagattttagaaggagagaacttacaggacacagatttgtgattctttgactgtgacactattggatgtgattctaaaagcttttattgagcattgtcaaatttgtaagcttcatagggatggacatcatatctataatgcccttctatatgtgctaccatagatgtgacatttttgaccttaatatcgtctttgaaaatgttaaattgagaaacctgttaacttacattttatgnattggcacattgtnttacttactgcaagagatatttcattttcagcacagtgcaaaagttctttaaaatgcatatgtctttttttctaattccgttttgttttaaagcacattttaaatgtagttttctcatttagtaaaagttgtctaattg

SEQ ID NO: 74759 - DNA, 964 bp, Homo sapiens
agctttgcggagctgggcggtgccgaggaggaggaggtggcggcctgggtctgacgcggccctgttcgagggggcctctcttgtttatttatttattttccgtgggtgcctccgagtgtgcgcgcgctctcgctacccggcggggagggggtggggggagggcccgggaaaagggggagttggagccggggtcgaaacgccgcgtgacttgtaggtgagagaacgccgagccgtcgccgcagcctccgccgccgagaagcccttgttcccgctgctgggaaggagagtctgtgccgacaagatggcggacggggagctgaacgtggacagcctcatcacccggctgctggaggtacgaggatgtcgtccaggaaagattgtgcagatgactgaagcagaagttcgaggcttatgtatcaagtctcgggagatctttctcagccagcctattcttttggaattggaagcaccgctgaaaatttgtggagatattcatggacagtatacagatttactgagattatttgaatatggaggtttcccaccagaagccaactatcttttcttaggagattatgtggacagaggaaagcagtctttggaaaccatttgtttgctattggcttataaaatcaaatatccagagaacttctttctcttaagaggaaaccatgagtgtgctagcatcaatcgcatttatggattctatgatgaatgcaaacgaagatttaatattaaattgtggaagaccttcactgattgttttaactgtctgcctatagcagccattgtggatgagaagatcttctgttgtcatggaggtagactagtaaatttgccttacagattttttttttcttctattattcggaaaatacctataataatcaagaggctgtgggaaaacaaagcagtgcttgtatgaaaactcaagtgattaaaactgttttaaacatgactaaac

SEQ ID NO: 74760 - DNA, 3142 bp, Homo sapiens
  misc_feature (2374)..(2374): n is a, c, g, or t
  misc_feature (2388)..(2388): n is a, c, g, or t
tttgatgtgttcatttcagatattgaaaccatctgaaaagaaagctaaataccagtatggtggactgaattctggacgtcctgtcactccacctcgaacagctaatccgccgaagaaaaggcgaagaaaggaattctgtaaagaaaccatcagatttgttaaggacatacttcataatatataagtgtgctagcatcaatcgcatttatggattctatgatgaatgcaaacgaagatttaatattaaattgtggaagaccttcactgattgttttaactgtctgcctatagcagccattgtggatgagaagatcttctgttgtcatggaggattgtcaccagacctgcaatctatggagcagattcggagaattatgagacctactgatgtccctgatacaggtttgctctgtgatttgctatggtctgatccagataaggatgtgcaaggctggggagaaaatgatcgtggtgtttcctttacttttggagctgatgtagtcagtaaatttctgaatcgtcatgatttagatttgatttgtcgagctcatcaggtggtggaagatggatatgaattttttgctaaacgacagttggtaaccttattttcagccccaaattactgtggcgagtttgataatgctggtggaatgatgagtgtggatgaaactttgatgtgttcatttcagatattgaaaccatctgaaaagaaagctaaataccagtatggtggactgaattctggacgtcctgtcactccacctcgaacagctaatccgccgaagaaaaggtgaagaaaggaattctgtaaagaaaccatcagatttgttaaggacatacttcataatatataagtgtgcactgtaaaaccatccagccatttgacaccctttatgatgtcacacctttaacttaaggagacgggtaaaggatcttaaatttttttctaatagaaagatgtgctacactgtattgtaataagtatactctgttatagtcaacaaagttaaatccaaattcaaaattatccattaaagttacatcttcatgtatcacaatttttaaagttgaaaagcatcccagttaaactagatgtgatagttaaaccagatgaaagcatgatgatccatctgtgtaatgtggttttagtgttgcttggttgtttaattattttgagcttgttttgtttttgtttgttttcactagaataatggcaaatacttctaatttttttccctaaacatttttaaaagtgaaatatgggaagagctttacagacattcaccaactattattttcccttgtttatctacttagatatctgtttaatcttactaagaaaactttcgcctcattacattaaaaaggaattttagagattgattgttttaaaaaaaaatacgcacattgtccaatccagtgattttaatcatacagtttgactgggcaaactttacagctgatagtgaatattttgctttatacaggaattgacactgatttggatttgtgcactctaatttttaacttattgatgctctattgtgcagtagcatttcatttaagataaggctcatatagtattacccaactagttggtaatgtgattatgtggtaccttggctttaggttttcattcgcacggaacaccttttggcatgcttaacttcctggtaacaccttcacctgcattggttttctttttcttttttctttctttttttttttttttttttttttgagttgttgtttgtttttagatccacagtacatgagaatccttttttgacaagccttggaaagctgacactgtctctttttcctccctctatacgaaggatgtatttaaatgaatgctggtcagtgggacattttgtcaactatgggtattgggtgcttaactgtctaatattgccatgtgaatgttgtatacgattgtaaggcttatgtcactaaagatttttattctgattttttcataatcaaaggtcatatgatactgtatagacaagctttgtagtgaagtatagtagcaataatttctgtacctgatcaagtttattgcagcctttcttttcctatttcttttttttaagggttagtattaacaaatggcaatgagtagaaaagttaacatgaagattttagaaggagagaacttacaggacacagatttgtgattctttgactgtgacactattggatgtgattctaaaagcttttattgagcattgtcaaatttgtaagcttcatagggatggacatcatatctataatgcccttctatatgtgctaccatagatgtgacatttttgaccttaatatcgtctttgaaaatgttaaattgagaaacctgttaacttacattttatgnattggcacattgtnttacttactgcaagagatatttcattttcagcacagtgcaaaagttctttaaaatgcatatgtctttttttctaattccgttttgttttaaagcacattttaaatgtagttttctcatttagtaaaagttgtctaattgatatgaagcctgactgattttttttttccttacagtgagacatttaagcacacattttattcacatagatactatgtccttgacatattgaaatgattcttttctgaaagtattcatgatctgcatatgatgtattaggttaggtcacaaaggttttatctgaggtgatttaaataacttcctgattggagtgtgtaagctgagcgatttctaataaaattttagttgtacacttttagtagtcatagtgaagcaggtctagaaaataagcctttggcagggaaaaagggcaatgttgattaatctcagtattaaaccacattaatctgtatcccattgtctggcttttgtaaattcatccaggtcaagactaagtatgttggttaataggaatccttttttttttttaaagactaaatgtgaaaaaataatcactacttaagctaattaatattggtcattaaatttaaaggatggaaatttatcatgtttaaaaattattcaagcactcttaaaaccacttaaacagcctccagtcataaaaatgtgttctttacaaatatttgcttggcaacacgacttgaaataaataaaactttgtttcttaggagaaaa

SEQ ID NO: 74761 - DNA, 2919 bp, Homo sapiens
  misc_feature (2151)..(2151): n is a, c, g, or t
  misc_feature (2165)..(2165): n is a, c, g, or t
agctttgcggagctgggcggtgccgaggaggaggaggtggcggcctgggtctgacgcggccctgttcgagggggcctctcttgtttatttatttattttccgtgggtgcctccgagtgtgcgcgcgctctcgctacccggcggggagggggtggggggagggcccgggaaaagggggagttggagccggggtcgaaacgccgcgtgacttgtaggtgagagaacgccgagccgtcgccgcagcctccgccgccgagaagcccttgttcccgctgctgggaaggagagtctgtgccgacaagatggcggacggggagctgaacgtggacagcctcatcacccggctgctggaggcagccattgtggatgagaagatcttctgttgtcatggaggattgtcaccagacctgcaatctatggagcagattcggagaattatgagacctactgatgtccctgatacaggtatattgaaaccatctgaaaagaaagctaaataccagtatggtggactgaattctggacgtcctgtcactccacctcgaacagctaatccgccgaagaaaaggtgaagaaaggaattctgtaaagaaaccatcagatttgttaaggacatacttcataatatataagtgtgcactgtaaaaccatccagccatttgacaccctttatgatgtcacacctttaacttaaggagacgggtaaaggatcttaaatttttttctaatagaaagatgtgctacactgtattgtaataagtatactctgttatagtcaacaaagttaaatccaaattcaaaattatccattaaagttacatcttcatgtatcacaatttttaaagttgaaaagcatcccagttaaactagatgtgatagttaaaccagatgaaagcatgatgatccatctgtgtaatgtggttttagtgttgcttggttgtttaattattttgagcttgttttgtttttgtttgttttcactagaataatggcaaatacttctaatttttttccctaaacatttttaaaagtgaaatatgggaagagctttacagacattcaccaactattattttcccttgtttatctacttagatatctgtttaatcttactaagaaaactttcgcctcattacattaaaaaggaattttagagattgattgttttaaaaaaaaatacgcacattgtccaatccagtgattttaatcatacagtttgactgggcaaactttacagctgatagtgaatattttgctttatacaggaattgacactgatttggatttgtgcactctaatttttaacttattgatgctctattgtgcagtagcatttcatttaagataaggctcatatagtattacccaactagttggtaatgtgattatgtggtaccttggctttaggttttcattcgcacggaacaccttttggcatgcttaacttcctggtaacaccttcacctgcattggttttctttttcttttttctttctttttttttttttttttttttttgagttgttgtttgtttttagatccacagtacatgagaatccttttttgacaagccttggaaagctgacactgtctctttttcctccctctatacgaaggatgtatttaaatgaatgctggtcagtgggacattttgtcaactatgggtattgggtgcttaactgtctaatattgccatgtgaatgttgtatacgattgtaaggcttatgtcactaaagatttttattctgattttttcataatcaaaggtcatatgatactgtatagacaagctttgtagtgaagtatagtagcaataatttctgtacctgatcaagtttattgcagcctttcttttcctatttcttttttttaagggttagtattaacaaatggcaatgagtagaaaagttaacatgaagattttagaaggagagaacttacaggacacagatttgtgattctttgactgtgacactattggatgtgattctaaaagcttttattgagcattgtcaaatttgtaagcttcatagggatggacatcatatctataatgcccttctatatgtgctaccatagatgtgacatttttgaccttaatatcgtctttgaaaatgttaaattgagaaacctgttaacttacattttatgnattggcacattgtnttacttactgcaagagatatttcattttcagcacagtgcaaaagttctttaaaatgcatatgtctttttttctaattccgttttgttttaaagcacattttaaatgtagttttctcatttagtaaaagttgtctaattgatatgaagcctgactgattttttttttccttacagtgagacatttaagcacacattttattcacatagatactatgtccttgacatattgaaatgattcttttctgaaagtattcatgatctgcatatgatgtattaggttaggtcacaaaggttttatctgaggtgatttaaataacttcctgattggagtgtgtaagctgagcgatttctaataaaattttagttgtacacttttagtagtcatagtgaagcaggtctagaaaataagcctttggcagggaaaaagggcaatgttgattaatctcagtattaaaccacattaatctgtatcccattgtctggcttttgtaaattcatccaggtcaagactaagtatgttggttaataggaatccttttttttttttaaagactaaatgtgaaaaaataatcactacttaagctaattaatattggtcattaaatttaaaggatggaaatttatcatgtttaaaaattattcaagcactcttaaaaccacttaaacagcctccagtcataaaaatgtgttctttacaaatatttgcttggcaacacgacttgaaataaataaaactttgtttcttaggagaaaa

SEQ ID NO: 74762 - DNA, 3204 bp, Homo sapiens
  misc_feature (2436)..(2436): n is a, c, g, or t
  misc_feature (2450)..(2450): n is a, c, g, or t
agctttgcggagctgggcggtgccgaggaggaggaggtggcggcctgggtctgacgcggccctgttcgagggggcctctcttgtttatttatttattttccgtgggtgcctccgagtgtgcgcgcgctctcgctacccggcggggagggggtggggggagggcccgggaaaagggggagttggagccggggtcgaaacgccgcgtgacttgtaggtgagagaacgccgagccgtcgccgcagcctccgccgccgagaagcccttgttcccgctgctgggaaggagagtctgtgccgacaagatggcggacggggagctgaacgtggacagcctcatcacccggctgctggaggcagccattgtggatgagaagatcttctgttgtcatggaggattgtcaccagacctgcaatctatggagcagattcggagaattatgagacctactgatgtccctgatacaggtttgctctgtgatttgctatggtctgatccagataaggatgtgcaaggctggggagaaaatgatcgtggtgtttcctttacttttggagctgatgtagtcagtaaatttctgaatcgtcatgatttagatttgatttgtcgagctcatcaggtggtggaagatggatatgaattttttgctaaacgacagttggtaaccttattttcagccccaaattactgtggcgagtttgataatgctggtggaatgatgagtgtggatgaaactttgatgtgttcatttcagatattgaaaccatctgaaaagaaagctaaataccagtatggtggactgaattctggacgtcctgtcactccacctcgaacagctaatccgccgaagaaaaggtgaagaaaggaattctgtaaagaaaccatcagatttgttaaggacatacttcataatatataagtgtgcactgtaaaaccatccagccatttgacaccctttatgatgtcacacctttaacttaaggagacgggtaaaggatcttaaatttttttctaatagaaagatgtgctacactgtattgtaataagtatactctgttatagtcaacaaagttaaatccaaattcaaaattatccattaaagttacatcttcatgtatcacaatttttaaagttgaaaagcatcccagttaaactagatgtgatagttaaaccagatgaaagcatgatgatccatctgtgtaatgtggttttagtgttgcttggttgtttaattattttgagcttgttttgtttttgtttgttttcactagaataatggcaaatacttctaatttttttccctaaacatttttaaaagtgaaatatgggaagagctttacagacattcaccaactattattttcccttgtttatctacttagatatctgtttaatcttactaagaaaactttcgcctcattacattaaaaaggaattttagagattgattgttttaaaaaaaaatacgcacattgtccaatccagtgattttaatcatacagtttgactgggcaaactttacagctgatagtgaatattttgctttatacaggaattgacactgatttggatttgtgcactctaatttttaacttattgatgctctattgtgcagtagcatttcatttaagataaggctcatatagtattacccaactagttggtaatgtgattatgtggtaccttggctttaggttttcattcgcacggaacaccttttggcatgcttaacttcctggtaacaccttcacctgcattggttttctttttcttttttctttctttttttttttttttttttttttgagttgttgtttgtttttagatccacagtacatgagaatccttttttgacaagccttggaaagctgacactgtctctttttcctccctctatacgaaggatgtatttaaatgaatgctggtcagtgggacattttgtcaactatgggtattgggtgcttaactgtctaatattgccatgtgaatgttgtatacgattgtaaggcttatgtcactaaagatttttattctgattttttcataatcaaaggtcatatgatactgtatagacaagctttgtagtgaagtatagtagcaataatttctgtacctgatcaagtttattgcagcctttcttttcctatttcttttttttaagggttagtattaacaaatggcaatgagtagaaaagttaacatgaagattttagaaggagagaacttacaggacacagatttgtgattctttgactgtgacactattggatgtgattctaaaagcttttattgagcattgtcaaatttgtaagcttcatagggatggacatcatatctataatgcccttctatatgtgctaccatagatgtgacatttttgaccttaatatcgtctttgaaaatgttaaattgagaaacctgttaacttacattttatgnattggcacattgtnttacttactgcaagagatatttcattttcagcacagtgcaaaagttctttaaaatgcatatgtctttttttctaattccgttttgttttaaagcacattttaaatgtagttttctcatttagtaaaagttgtctaattgatatgaagcctgactgattttttttttccttacagtgagacatttaagcacacattttattcacatagatactatgtccttgacatattgaaatgattcttttctgaaagtattcatgatctgcatatgatgtattaggttaggtcacaaaggttttatctgaggtgatttaaataacttcctgattggagtgtgtaagctgagcgatttctaataaaattttagttgtacacttttagtagtcatagtgaagcaggtctagaaaataagcctttggcagggaaaaagggcaatgttgattaatctcagtattaaaccacattaatctgtatcccattgtctggcttttgtaaattcatccaggtcaagactaagtatgttggttaataggaatccttttttttttttaaagactaaatgtgaaaaaataatcactacttaagctaattaatattggtcattaaatttaaaggatggaaatttatcatgtttaaaaattattcaagcactcttaaaaccacttaaacagcctccagtcataaaaatgtgttctttacaaatatttgcttggcaacacgacttgaaataaataaaactttgtttcttaggagaaaa

SEQ ID NO: 74763 - DNA, 632 bp, Homo sapiens
agctttgcggagctgggcggtgccgaggaggaggaggtggcggcctgggtctgacgcggccctgttcgagggggcctctcttgtttatttatttattttccgtgggtgcctccgagtgtgcgcgcgctctcgctacccggcggggagggggtggggggagggcccgggaaaagggggagttggagccggggtcgaaacgccgcgtgacttgtaggtgagagaacgccgagccgtcgccgcagcctccgccgccgagaagcccttgttcccgctgctgggaaggagagtctgtgccgacaagatggcggacggggagctgaacgtggacagcctcatcacccggctgctggaggtacgaggatgtcgtccaggaaagattgtgcagatgactgaagcagaagttcgaggcttatgtatcaagtctcgggagatctttctcagccagcctattcttttggaattggaagcaccgctgaaaatttgtgaagatttcatggacatttatcacttccccagtcaataatcttataatttcctatgactgtctcttaatctcgttaatcccggcatcttcttaagctgaggatgtatgtcgcctctgatcctgtgatgattgtgtatctgccaccaag

SEQ ID NO: 74764 - DNA, 2855 bp, Homo sapiens
  misc_feature (2702)..(2702): n is a, c, g, or t
  misc_feature (2716)..(2716): n is a, c, g, or t
cctgcctcagcctcccgagcagccggggtcgaaacgccgcgtgacttgtaggtgagagaacgccgagccgtcgccgcagcctccgccgccgagaagcccttgttcccgctgctgggaaggagagtctgtgccgacaagatggcggacggggagctgaacgtggacagcctcatcacccggctgctggaggtacgaggatgtcgtccaggaaagattgtgcagatgactgaagcagaagttcgaggcttatgtatcaagtctcgggagatctttctcagccagcctattcttttggaattggaagcaccgctgaaaatttgtggagatattcatggacagtatacagatttactgagattatttgaatatggaggtttcccaccagaagccaactatcttttcttaggagattatgtggacagaggaaagcagtctttggaaaccatttgtttgctattggcttataaaatcaaatatccagagaacttctttctcttaagaggaaaccatgagtgtgctagcatcaatcgcatttatggattctatgatgaatgcaaacgaagatttaatattaaattgtggaagaccttcactgattgttttaactgtctgcctatagcagccattgtggatgagaagatcttctgttgtcatggaggattgtcaccagacctgcaatctatggagcagattcggagaattatgagacctactgatgtccctgatacaggtttgctctgtgatttgctatggtctgatccagataaggatgtgcaaggctggggagaaaatgatcgtggtgtttcctttacttttggagctgatgtagtcagtaaatttctgaatcgtcatgatttagatttgatttgtcgagctcatcaggtggtggaagatggatatgaattttttgctaaacgacagttggtaaccttattttcagccccaaattactgtggcgagtttgataatgctggtggaatgatgagtgtggatgaaactttgatgtgttcatttcagatattgaaaccatctgaaaagaaagctaaataccagtatggtggactgaattctggacgtcctgtcactccacctcgaacagctaatccgccgaagaaaaggtgaagaaaggaattctgtaaagaaaccatcagatttgttaaggacatacttcataatatataagtgtgcactgtaaaaccatccagccatttgacaccctttatgatgtcacacctttaacttaaggagacgggtaaaggatcttaaatttttttctaatagaaagatgtgctacactgtattgtaataagtatactctgttatagtcaacaaagttaaatccaaattcaaaattatccattaaagttacatcttcatgtatcacaatttttaaagttgaaaagcatcccagttaaactagatgtgatagttaaaccagatgaaagcatgatgatccatctgtgtaatgtggttttagtgttgcttggttgtttaattattttgagcttgttttgtttttgtttgttttcactagaataatggcaaatacttctaatttttttccctaaacatttttaaaagtgaaatatgggaagagctttacagacattcaccaactattattttcccttgtttatctacttagatatctgtttaatcttactaagaaaactttcgcctcattacattaaaaaggaattttagagattgattgttttaaaaaaaaatacgcacattgtccaatccagtgattttaatcatacagtttgactgggcaaactttacagctgatagtgaatattttgctttatacaggaattgacactgatttggatttgtgcactctaatttttaacttattgatgctctattgtgcagtagcatttcatttaagataaggctcatatagtattacccaactagttggtaatgtgattatgtggtaccttggctttaggttttcattcgcacggaacaccttttggcatgcttaacttcctggtaacaccttcacctgcattggttttctttttcttttttctttctttttttttttttttttttttttgagttgttgtttgtttttagatccacagtacatgagaatccttttttgacaagccttggaaagctgacactgtctctttttcctccctctatacgaaggatgtatttaaatgaatgctggtcagtgggacattttgtcaactatgggtattgggtgcttaactgtctaatattgccatgtgaatgttgtatacgattgtaaggcttatgtcactaaagatttttattctgattttttcataatcaaaggtcatatgatactgtatagacaagctttgtagtgaagtatagtagcaataatttctgtacctgatcaagtttattgcagcctttcttttcctatttcttttttttaagggttagtattaacaaatggcaatgagtagaaaagttaacatgaagattttagaaggagagaacttacaggacacagatttgtgattctttgactgtgacactattggatgtgattctaaaagcttttattgagcattgtcaaatttgtaagcttcatagggatggacatcatatctataatgcccttctatatgtgctaccatagatgtgacatttttgaccttaatatcgtctttgaaaatgttaaattgagaaacctgttaacttacattttatgnattggcacattgtnttacttactgcaagagatatttcattttcagcacagtgcaaaagttctttaaaatgcatatgtctttttttctaattccgttttgttttaaagcacattttaaatgtagttttctcatttagtaaaagttgtctaattg

SEQ ID NO: 74765 - DNA, 3441 bp, Homo sapiens
  misc_feature (2673)..(2673): n is a, c, g, or t
  misc_feature (2687)..(2687): n is a, c, g, or t
gaactccgcgggtaagtcgaggcggccgcgggcgcggggtccagggacaccggagagccccaggcggcactaggggttctccgtccccaaagagccagccggggtggcgcgagcctagcgataaggcaccgggagcgaggaatgtgcccatcctcaggccgtacgaggatgtcgtccaggaaagattgtgcagatgactgaagcagaagttcgaggcttatgtatcaagtctcgggagatctttctcagccagcctattcttttggaattggaagcaccgctgaaaatttgtggagatattcatggacagtatacagatttactgagattatttgaatatggaggtttcccaccagaagccaactatcttttcttaggagattatgtggacagaggaaagcagtctttggaaaccatttgtttgctattggcttataaaatcaaatatccagagaacttctttctcttaagaggaaaccatgagtgtgctagcatcaatcgcatttatggattctatgatgaatgcaaacgaagatttaatattaaattgtggaagaccttcactgattgttttaactgtctgcctatagcagccattgtggatgagaagatcttctgttgtcatggaggattgtcaccagacctgcaatctatggagcagattcggagaattatgagacctactgatgtccctgatacaggtttgctctgtgatttgctatggtctgatccagataaggatgtgcaaggctggggagaaaatgatcgtggtgtttcctttacttttggagctgatgtagtcagtaaatttctgaatcgtcatgatttagatttgatttgtcgagctcatcaggtggtggaagatggatatgaattttttgctaaacgacagttggtaaccttattttcagccccaaattactgtggcgagtttgataatgctggtggaatgatgagtgtggatgaaactttgatgtgttcatttcagatattgaaaccatctgaaaagaaagctaaataccagtatggtggactgaattctggacgtcctgtcactccacctcgaacagctaatccgccgaagaaaaggtgaagaaaggaattctgtaaagaaaccatcagatttgttaaggacatacttcataatatataagtgtgcactgtaaaaccatccagccatttgacaccctttatgatgtcacacctttaacttaaggagacgggtaaaggatcttaaatttttttctaatagaaagatgtgctacactgtattgtaataagtatactctgttatagtcaacaaagttaaatccaaattcaaaattatccattaaagttacatcttcatgtatcacaatttttaaagttgaaaagcatcccagttaaactagatgtgatagttaaaccagatgaaagcatgatgatccatctgtgtaatgtggttttagtgttgcttggttgtttaattattttgagcttgttttgtttttgtttgttttcactagaataatggcaaatacttctaatttttttccctaaacatttttaaaagtgaaatatgggaagagctttacagacattcaccaactattattttcccttgtttatctacttagatatctgtttaatcttactaagaaaactttcgcctcattacattaaaaaggaattttagagattgattgttttaaaaaaaaatacgcacattgtccaatccagtgattttaatcatacagtttgactgggcaaactttacagctgatagtgaatattttgctttatacaggaattgacactgatttggatttgtgcactctaatttttaacttattgatgctctattgtgcagtagcatttcatttaagataaggctcatatagtattacccaactagttggtaatgtgattatgtggtaccttggctttaggttttcattcgcacggaacaccttttggcatgcttaacttcctggtaacaccttcacctgcattggttttctttttcttttttctttctttttttttttttttttttttttgagttgttgtttgtttttagatccacagtacatgagaatccttttttgacaagccttggaaagctgacactgtctctttttcctccctctatacgaaggatgtatttaaatgaatgctggtcagtgggacattttgtcaactatgggtattgggtgcttaactgtctaatattgccatgtgaatgttgtatacgattgtaaggcttatgtcactaaagatttttattctgattttttcataatcaaaggtcatatgatactgtatagacaagctttgtagtgaagtatagtagcaataatttctgtacctgatcaagtttattgcagcctttcttttcctatttcttttttttaagggttagtattaacaaatggcaatgagtagaaaagttaacatgaagattttagaaggagagaacttacaggacacagatttgtgattctttgactgtgacactattggatgtgattctaaaagcttttattgagcattgtcaaatttgtaagcttcatagggatggacatcatatctataatgcccttctatatgtgctaccatagatgtgacatttttgaccttaatatcgtctttgaaaatgttaaattgagaaacctgttaacttacattttatgnattggcacattgtnttacttactgcaagagatatttcattttcagcacagtgcaaaagttctttaaaatgcatatgtctttttttctaattccgttttgttttaaagcacattttaaatgtagttttctcatttagtaaaagttgtctaattgatatgaagcctgactgattttttttttccttacagtgagacatttaagcacacattttattcacatagatactatgtccttgacatattgaaatgattcttttctgaaagtattcatgatctgcatatgatgtattaggttaggtcacaaaggttttatctgaggtgatttaaataacttcctgattggagtgtgtaagctgagcgatttctaataaaattttagttgtacacttttagtagtcatagtgaagcaggtctagaaaataagcctttggcagggaaaaagggcaatgttgattaatctcagtattaaaccacattaatctgtatcccattgtctggcttttgtaaattcatccaggtcaagactaagtatgttggttaataggaatccttttttttttttaaagactaaatgtgaaaaaataatcactacttaagctaattaatattggtcattaaatttaaaggatggaaatttatcatgtttaaaaattattcaagcactcttaaaaccacttaaacagcctccagtcataaaaatgtgttctttacaaatatttgcttggcaacacgacttgaaataaataaaactttgtttcttaggagaaaa

SEQ ID NO: 74766 - DNA, 1886 bp, Homo sapiens
  misc_feature (1118)..(1118): n is a, c, g, or t
  misc_feature (1132)..(1132): n is a, c, g, or t
agctttgcggagctgggcggtgccgaggaggaggaggtggcggcctgggtctgacgcggccctgttcgagggggcctctcttgtttatttatttattttccgtgggtgcctccgagtgtgcgcgcgctctcgctacccggcggggagggggtggggggagggcccgggaaaagggggagttggagccggggtcgaaacgccgcgtgacttgtaggtgagagaacgccgagccgtcgccgcagcctccgccgccgagaagcccttgttcccgctgctgggaaggagagtctgtgccgacaagatggcggacggggagctgaacgtggacagcctcatcacccggctgctggaggtacgaggatgtcgtccaggaaagattgtgcagatgactgaagcagaagttcgaggcttatgtatcaagtctcgggagatctttctcagccagcctattcttttggaattggaagcaccgctgaaaatttgtggagaaattcatggacaatatacagatttacatgagaatccttttttgacaagccttggaaagctgacactgtctctttttcctccctctatacgaaggatgtatttaaatgaatgctggtcagtgggacattttgtcaactatgggtattgggtgcttaactgtctaatattgccatgtgaatgttgtatacgattgtaaggcttatgtcactaaagatttttattctgattttttcataatcaaaggtcatatgatactgtatagacaagctttgtagtgaagtatagtagcaataatttctgtacctgatcaagtttattgcagcctttcttttcctatttcttttttttaagggttagtattaacaaatggcaatgagtagaaaagttaacatgaagattttagaaggagagaacttacaggacacagatttgtgattctttgactgtgacactattggatgtgattctaaaagcttttattgagcattgtcaaatttgtaagcttcatagggatggacatcatatctataatgcccttctatatgtgctaccatagatgtgacatttttgaccttaatatcgtctttgaaaatgttaaattgagaaacctgttaacttacattttatgnattggcacattgtnttacttactgcaagagatatttcattttcagcacagtgcaaaagttctttaaaatgcatatgtctttttttctaattccgttttgttttaaagcacattttaaatgtagttttctcatttagtaaaagttgtctaattgatatgaagcctgactgattttttttttccttacagtgagacatttaagcacacattttattcacatagatactatgtccttgacatattgaaatgattcttttctgaaagtattcatgatctgcatatgatgtattaggttaggtcacaaaggttttatctgaggtgatttaaataacttcctgattggagtgtgtaagctgagcgatttctaataaaattttagttgtacacttttagtagtcatagtgaagcaggtctagaaaataagcctttggcagggaaaaagggcaatgttgattaatctcagtattaaaccacattaatctgtatcccattgtctggcttttgtaaattcatccaggtcaagactaagtatgttggttaataggaatccttttttttttttaaagactaaatgtgaaaaaataatcactacttaagctaattaatattggtcattaaatttaaaggatggaaatttatcatgtttaaaaattattcaagcactcttaaaaccacttaaacagcctccagtcataaaaatgtgttctttacaaatatttgcttggcaacacgacttgaaataaataaaactttgtttcttaggagaaaa

SEQ ID NO: 74767 - DNA, 2911 bp, Homo sapiens
  misc_feature (2143)..(2143): n is a, c, g, or t
  misc_feature (2157)..(2157): n is a, c, g, or t
ttgtttgtaggcgtggttgtcgtggatggggggagtgcgtgcgcctaccggctgctggagcagccattgtggatgagaagatcttctgttgtcatggaggattgtcaccagacctgcaatctatggagcagattcggagaattatgagacctactgatgtccctgatacaggtttgctctgtgatttgctatggtctgatccagataaggatgtgcaaggctggggagaaaatgatcgtggtgtttcctttacttttggagctgatgtagtcagtaaatttctgaatcgtcatgatttagatttgatttgtcgagctcatcaggtggtggaagatggatatgaattttttgctaaacgacagttggtaaccttattttcagccccaaattactgtggcgagtttgataatgctggtggaatgatgagtgtggatgaaactttgatgtgttcatttcagatattgaaaccatctgaaaagaaagctaaataccagtatggtggactgaattctggacgtcctgtcactccacctcgaacagctaatccgccgaagaaaaggtgaagaaaggaattctgtaaagaaaccatcagatttgttaaggacatacttcataatatataagtgtgcactgtaaaaccatccagccatttgacaccctttatgatgtcacacctttaacttaaggagacgggtaaaggatcttaaatttttttctaatagaaagatgtgctacactgtattgtaataagtatactctgttatagtcaacaaagttaaatccaaattcaaaattatccattaaagttacatcttcatgtatcacaatttttaaagttgaaaagcatcccagttaaactagatgtgatagttaaaccagatgaaagcatgatgatccatctgtgtaatgtggttttagtgttgcttggttgtttaattattttgagcttgttttgtttttgtttgttttcactagaataatggcaaatacttctaatttttttccctaaacatttttaaaagtgaaatatgggaagagctttacagacattcaccaactattattttcccttgtttatctacttagatatctgtttaatcttactaagaaaactttcgcctcattacattaaaaaggaattttagagattgattgttttaaaaaaaaatacgcacattgtccaatccagtgattttaatcatacagtttgactgggcaaactttacagctgatagtgaatattttgctttatacaggaattgacactgatttggatttgtgcactctaatttttaacttattgatgctctattgtgcagtagcatttcatttaagataaggctcatatagtattacccaactagttggtaatgtgattatgtggtaccttggctttaggttttcattcgcacggaacaccttttggcatgcttaacttcctggtaacaccttcacctgcattggttttctttttcttttttctttctttttttttttttttttttttttgagttgttgtttgtttttagatccacagtacatgagaatccttttttgacaagccttggaaagctgacactgtctctttttcctccctctatacgaaggatgtatttaaatgaatgctggtcagtgggacattttgtcaactatgggtattgggtgcttaactgtctaatattgccatgtgaatgttgtatacgattgtaaggcttatgtcactaaagatttttattctgattttttcataatcaaaggtcatatgatactgtatagacaagctttgtagtgaagtatagtagcaataatttctgtacctgatcaagtttattgcagcctttcttttcctatttcttttttttaagggttagtattaacaaatggcaatgagtagaaaagttaacatgaagattttagaaggagagaacttacaggacacagatttgtgattctttgactgtgacactattggatgtgattctaaaagcttttattgagcattgtcaaatttgtaagcttcatagggatggacatcatatctataatgcccttctatatgtgctaccatagatgtgacatttttgaccttaatatcgtctttgaaaatgttaaattgagaaacctgttaacttacattttatgnattggcacattgtnttacttactgcaagagatatttcattttcagcacagtgcaaaagttctttaaaatgcatatgtctttttttctaattccgttttgttttaaagcacattttaaatgtagttttctcatttagtaaaagttgtctaattgatatgaagcctgactgattttttttttccttacagtgagacatttaagcacacattttattcacatagatactatgtccttgacatattgaaatgattcttttctgaaagtattcatgatctgcatatgatgtattaggttaggtcacaaaggttttatctgaggtgatttaaataacttcctgattggagtgtgtaagctgagcgatttctaataaaattttagttgtacacttttagtagtcatagtgaagcaggtctagaaaataagcctttggcagggaaaaagggcaatgttgattaatctcagtattaaaccacattaatctgtatcccattgtctggcttttgtaaattcatccaggtcaagactaagtatgttggttaataggaatccttttttttttttaaagactaaatgtgaaaaaataatcactacttaagctaattaatattggtcattaaatttaaaggatggaaatttatcatgtttaaaaattattcaagcactcttaaaaccacttaaacagcctccagtcataaaaatgtgttctttacaaatatttgcttggcaacacgacttgaaataaataaaactttgtttcttaggagaaaa

SEQ ID NO: 74768 - DNA, 369 bp, Homo sapiens
ttttttgtaaaagtcaacctagaactatacacaaatacaaacatgcctaaaatttatgcaaatatgtgacattctcttataaattttcctttatgttcttattcttagtgagttagttggttgtgttagttttctctggtgtgacacactagtattcatggtatgacaaaaatatgtcattacacatgtgcacacacacagagatcctgtgtcaaagtgtggttttgattcaaaaaagtaaaaatataagcatcattatggacatagggataagtattcaacttctttttagaaattcaattgattttgcacttatcctacaaaggtaggatagcttgaattcctagctggagtcctaatgagagaatg

SEQ ID NO: 74769 - DNA, 388 bp, Homo sapiens
catctccctcccactacccagaaaagctagcaagagtgagcatctccaagcaagatggggtacaattttatgttgcacaatcgtatcccatcagctttgccatattctactggttagaagcaattaacaagtctcacccacactcaaggggaggggatttacacaagacatgaatagcataaggtgggtgtattagtctgttcttacacggctgtaaaggattgcctaagactgggaaatttgtaaagaaaagatgtttaattggctcacagtgccacgggctgtacaagaagcaaggctgaagaagcttcaggaaactttcaatcatggcagaaggtgaaggggaaactggcaagtcttacatgacaggagcaggacaaagagagag

SEQ ID NO: 74770 - DNA, 533 bp, Homo sapiens
tcccaaagtgctgggattacaggcgtgagccaccgcggctggtcaataaatgtattttttaaaaagcatgacctaacggagctcatgaaacacttatgggtgtatcttagatgccagacatgggttttaaatttatcaacctgtttagttgtcttagcagccctatgcagtttctgtaaattttctttgattttacagatggggcaataaggcatggagtggttaagttgctaattcaatgtacttccttctagttagtgttcttaaattagtaactgtcaaggccaggatttgaacccaggtaatccaattgtacgggctatatcctatatatcctatgcatagcctatgctcccccttaatttggtgctggtcctgcaggggttaaaaaaaattggctcagcaaggtggctcccagcttacaccagtaatcccagcacttggggaggccaaggcaggtggatagccctgagttcagaagttctagacctgcctggacaatgtggcaaaaccccatctctaccaagaatcca

SEQ ID NO: 74771 - DNA, 487 bp, Homo sapiens
agatgtttatggcatttaatcaaattatcttcaactcttatctccatttgtttcagatccttgcctagttgctccaacccacccttcttactgagaagcaaagcaacagggattatgtacatatcttctttgaattaagtgttcttgctatcacagccgcgaaatccctccatcaccttttaccattgaccactaaatgttagagtaggtagctaagaagacataagcagggcaggagaagggtcccccaccaggaatgtcaggcaaccatcaggtgatggttaggcagctgttaaactgtctctctaaaataataattggttgcagcgagcacgagggaaaggcagtctcccaaaagatagaaaacacctggccgggcgctgtggctcacgcctgtaatcccagcactttgggaggccaaggcgggtggatcacaaggtcaggagatcgagaccatcctggctaacgtggtgaaacctgtctctac

SEQ ID NO: 74772 - DNA, 513 bp, Homo sapiens
atgacaaccctcttcagcaggaagtagatggagggaatgcatacccactttcccttagtcggctatgtcatagtttacacttttgcactagccttttaacaaaccagtacttgaaaaaattaactaacatgctagaaatcacgtacaaattgacagtggggattgtggcaggccaggtttccattagcaaccagaacagtcagttttcactaatcctttactataactctgatgaatatataagttaaacattaaagaactggagaaactggtaactaagtacaatggctggaatgcaaaaacaaacccattaagaccccagaccctaatgattagatacagattgaaagaaacactcctgcttgtaggtgcactcccacacataggcagagagcttaaaatgtgtatatgcactagaaaaaatattgtaactgcgttggtctgatgagttactctgaccttctccttgtaactggttgcaaaaataaactttctttttccccagtctgtctg

SEQ ID NO: 74773 - DNA, 577 bp, Homo sapiens
agtaaatctggaaacagaattggaaaaaatagctttgccccatcatgataggtttcttctgctagtgaaagattaaagctcgaagtatgtgaatagctgagaacagcacagagaaaggttgattgcttcccctccgacagttccaattgattgaaaaaagcctaatttaaagttctgtttgttctatgtcttaaaccatcagaattctcttttgggacctgaggaatgctctggaggaaaaagaatccaaggataaaaagtcattgcaagccaacaattgttcctaatcctcacaaaatgctggagaaattaaatttattctttattgctcaaagtgttacctaggtcactgggcgatgggaaaattggactggaagtcgagtaggcgcaagctttgttttgtgtctagatgcttaaccttagacacgacaaggcatcttagagtgttgtgggaacttggttcagagcattaacaccaagacttttattaccccggatttataataggctgtgctgtcaggagatgaaaatgttgtgtttacatttcagtgttaaatgatcatttaattaacaccta

SEQ ID NO: 74774 - DNA, 334 bp, Homo sapiens
ggatcctcgaactcctgacctcaggtaatctggccaccttggcttctcaaagtgctgggattacaggcatgagccaccacacccaaccaacaagggactaatatgtagaatagtcagttctactataaggcatgcattcatagaaatcacagcaatatgcaaaatcctgcagtcaaaaaccacaaggcttacagagaaaacaggattgtgtcacaatcctcgtaaactttgtcggtgatgcttaaagaaaaagataagaacagaatacaaaggagagaacagtttcacacgggctaggtggttaagaggggggggggggggggggggggaattc

SEQ ID NO: 74775 - DNA, 443 bp, Homo sapiens
ggagggctcagtgttcattttagcagagatgcagctgaagaaaagccatggtattttagcatttaatagtatttagtgtggatttaaaactaaatgataaacacacattgctaaaatgtttaatttcaataaagttaaaatttaatttttagatatacttcattactcagaagacaaaacattaaaaatactgggaatcattcactgaattccacttctagtggtttattctacaaaaacaatcaaaatggatatatctttgtgtttaaagatgttcaccatagcattgtgtaaaagcaaacaaaaaaccaagagaagtgtttttaaaaaattagaaactttctgaatgcacagttgatatttatttatgtcttatttatttaattaatttatttatttatgagacagaatcttactctgtcgcccaggctgtctcagtgacg

SEQ ID NO: 74776 - DNA, 449 bp, Homo sapiens
ttgtcagctgttatcggagacaattctgaggtccaacttggggatgcttccctccagagactattccccttttccaggcgagaccaccctcggccccctcagtgacccttgagacccctggtttaagcagcccctaggcagagaaacatacttgttccctggccgcaggctggctctctgtccctgtgtgtgtccagggagttatctgctttcccaaccacttcccttcatcatccaggcctccacactactctgtctgtttgtttacttagagacagagtcttgctctgccgcccagtctgagtgcagtggtgagctcctagctctctgcagcctcgccctcccaggctggggcaggagaatggcgtgaacctgggaggcaaagcttgcagtgagccaagatcacgccactgcactccagcttgggcgaaagagcgaggctccgtctc

SEQ ID NO: 74777 - DNA, 362 bp, Homo sapiens
ccgcacctggcctctttttttttttttcccagattttaagttgcccagctggatcatggggtatacttctaaaaatcattaccctagcacctccatagatttatatgctctgtaattacctaaggttgatctatctcttctttcctcattcccatagggtaagcaataaatggaggcagtgataatttggacttgaggaaaggatgtgactgttgctgcttggtacaaattctaacacaggcaggtgcttaataagtgagagtaagtggcaggctgtgttttcttcatagaattctctgactttttccccccccgagatagagcctcactctgtcacccaggctggagtgcagtggtgcaat

SEQ ID NO: 74778 - DNA, 575 bp, Homo sapiens
gtaggggtgggatttgctgtgctagaccacttggctccctggcttcagccccctttccaggagagtgaatggttctgtcttgctggcattccaggtgtcactgaggtatgaaaaaaaaaactgcagctagctcagtgtctgcccaaatggccacccagatttgtgcttgaaacccagatccctggtggcataggcaccggagggaatctcctggtctgctggttgcgaagacttgcggggaaaagcatagtatctgggccagggtgcactgttcctcatggcacagtccctcatggcttcccttggctaggggagggagttcccagaccccttgtgcttcccaggtgaggtgacaccctaccctgcttcagctcgctgtctgtgggctgcacccactgtctatccagtcccagtgaggtgaaccgggtacctctgttggaaatgcagaaatcacccgccttctgtgttgatctctctgtgagctgcagaccggagctgttccttttttggccatcttgccctggttcctagtcaagcattttttaagagaggattttcatatagtaaaaaaaaaa

SEQ ID NO: 74779 - DNA, 416 bp, Homo sapiens
atctccctgactgcactctcttccctttgctttataacatttatcacaatctgcagttactttaagtcagcatttggttatttcactgcaggacctacccaaagaggcaacatacagaatcctaccttcagtaccctctctccattttcatttaatcattctgtagcctatctcctaaataaacatagaagttaaataaatacattgtgcttcaggtaaagtctcatagctttcttgccaaggaactcgttgttcctaagttctgagacagagcaagtatgaatggtctactcatttattgccactaaagtgtaaccctcaaggggatactctgtcttgttcctagttgtattccttatacctagcagagtaactgaaacaaccagaggatcaataaagatttgcagaaaaataaa

SEQ ID NO: 74780 - DNA, 427 bp, Homo sapiens
gggacccgcagcagtgccctgtgtccttcctagggggccgcgttggcagcatggcctgcgcacaggtgccagtgtctcagagaaggggccaagccgcacctgctgctctgcccacacttctcccatgcgctgtactctgggccgtgcggctgcacgggtcctgttgcttaatgttgtgggtccatccgtgcccagtgtggctgggcagctgactctgctacatgttaaagaccagcctggccaacatggggaaacccgtctctactaaaactacaaaaattagccaggcatggtggcgcatgcctgtagtcctggctactcgggaggctgaggcaggagaatgtcttgaacctaggaggcggaggttgcagtgagccaagatcgcgccacagcactccagcctgggcaacagcaagactccacctca

SEQ ID NO: 74781 - DNA, 703 bp, Homo sapiens
gtttattttggaaatgacttaaagttgttgatatgggtctttttctccctgagtgattacaacttctcattctaatgatgggaaagtctacagtcatctctgccacttctaacgtggggtggccccaattcccctccattgatgattggaggggaatcgcttgttgtcacatcgaatcctagaaccctgtgagactggaaggaatttaatttgaaattgccgtgcgtaccagttctgctctgggctggagaaacaatcctgctgcagatccatctagtgacattaatctttctttgacttaatttggttttcatccctaaagtaggggcccagaggacgctccctgcctcacaggactaggggacgattaatgagtcactcttagaagagcatttggagctcctcagatggaacaaatggcatctttttaacactctgcattccagggcacttttcaaaaaggcatttctgtccttacctcagcagcagctgacttgtgctaaaaagaaaacggaaacctttcccccacaaacatctgtaaataaactatttttctgtctttataatcgtgttaaagtgtcacatgggggaaatgttccagctctagagcagctgtgaaagttagaaatgcactcacacatacgcgctcacacacacacacaactcatccactaataaaatgtttctacacttgctcttggga

SEQ ID NO: 74782 - DNA, 409 bp, Homo sapiens
aaaatgaataatttttactgctgcatcaagaacattcttaagtgaaaccggtactccaaccccaatttgggtggtgatgaagaatacaattcagcgcttcttacagctttgctcgatccctcctaaggcttcagcagtgtctacacaccattgcttttacaccattggtacaaatgttgacatggtgcaaaaagcaagtaacatcttagtgtcattacgaaaatagttttgatctcacagatgccctgaaagagggacatccaggtttctgcccaccacattgtgaaaattgatgattctagataatacaaaatggcttctgttactgttctggtggtttaaaaacaacaaaaaacctcatttagttctctacctagaagagtgaattgcaactctcatcttgtgcttt

SEQ ID NO: 74783 - DNA, 838 bp, Homo sapiens
tgtgttttttattcttgggttgtttgtccacagtggagtggcctccttgggacacaccctgagctgggtcctagagcagccagtcgcctgtggacagtgctgtgggaggcaggctgaccttggggtgcaggggtgggtccaggagggaggtgggggactgcgtggaaggagcagctcaggtctgacctccgcagtctgacagtgcctttccagtcctggggagttaggttctggtgcatttgttgaagaatctcagtctctgtgtggcttggaaagtgcccttgctgtgagctggtttgtgactgaaagtgaaacaaattatagccttgggaagctcatctggcttttagtttccattttggccagatatgtttgttacatagtctccctgcttggctggtaagttgtgtttgttacatagtctccctgcttggctggtcagatgtgtttgttacatacgtctccctacttgttctgcagcttctgtgtttagtatacatttgagcctccttttctccttttcctacaggggaaagccaccagggtgggtggcgagcctgggatcaccagagctgtgatgtccaaaattcaggtctctgagcggcccctgatgttcctgttggacactcctggcgtgctggctcctcggattgaaagtgtggagacaggcctgaagctggccctgtgtggaacggtgctggaccacctggtcggggaggagaccatggctgactacctgctgtacaccctcaacaaacaccagcgctttgggtgagtgcagtgaatgcagggcagctggggcccctcctcctagtcacctcatttaaaaaaaaaaaac

SEQ ID NO: 74784 - DNA, 907 bp, Homo sapiens
tcgctgaggcgtccttctgttttccagggctgaagaagatgcagagcagcctgaagctggtggactgtatcatcgaggtccacgatgcccggatcccactttcaggccgcaaccctctgtttcaggaaacccttgggcttaagcctcacttgctggtcctcaacaagatggacttggcggatcttacagagcagcagaaaattatgcaacacttagaaggagaaggcctaaaaaatgtcatttttaccaactgtgtaaaggatgaaaatgtcaagcagatcatcccgatggtcactgaactgattgggagaagccaccgctaccaccgaaaagagaacctggagtactgtatcatggtcattggggtccccaacgtgggcaagtcctccctcatcaactccctccggaggcagcacctcaggaaagggtactggcgcgtgcggctgatcacctcaggaaaggtactggcgcgtgtggctgatgtgctgatgccaccatctttcttggaggggacgtgcccgaggagcactgccagtcttctgctgaccccgcagccccagagcacatcttgtctcgttcagtccagttcacaggagggctgaacagtgggaccaggtcgttctgtgaatttcacacttaatttttctctcttttaaaatctttaacatgaagatggcttttctaaactttgatatttgttcatttatttaaatccctttggccgggtgcatggctcacgcctgtaatcccagcactttgagaggccgaggcgggcggatcatgaggtcaggagattgagaccattcttgctgaaacggtgaaaccccgtctctactaaaaatacgaaaaattaggtgggtgtggtggcgggcacctgtagtcccagccacttaggaggctgaggcag

SEQ ID NO: 74785 - DNA, 3715 bp, Homo sapiens
gccggaagcccgcagtgccggaggcccgcagcgccggaacctcagaggcgggtcgcagcggcgcagaggaggtcagctgcgggagcgtttccggggacggtgccgccatgagattgaccccgcgcgcgctgtgcagcgccgcccaggccgcctggcgggagaacttccccctgtgcggtcgcgacgtggcgcgctggttcccgggccacatggccaaggggctgaagaagatgcagagcagcctgaagctggtggactgtatcatcgaggtccacgatgcccggatcccactttcaggccgcaaccctctgtttcaggaaacccttgggcttaagcctcacttgctggtcctcaacaagatggacttggcggatcttacagagcagcagaaaattatgcaacacttagaaggagaaggcctaaaaaatgtcatttttaccaactgtgtaaaggatgaaaatgtcaagcagatcatcccgatggtcactgaactgattgggagaagccaccgctaccaccgaaaagagaacctggagtactgtatcatggtcattggggtccccaacgtgggcaagtcctccctcatcaactccctccggaggcagcacctcaggaaagggaaagccaccagggtgggtggcgagcctgggatcaccagagctgtgatgtccaaaattcaggtctctgagcggcccctgatgttcctgttggacactcctggcgtgctggctcctcggattgaaagtgtggagacaggcctgaagctggccctgtgtggaacggtgctggaccacctggtcggggaggagaccatggctgactacctgctgtacaccctcaacaaacaccagcgctttgggtacgtgcagcactacggcctgggcagtgcctgtgacaacgtagagcgcgtgctgaagagtgtggctgtgaagctggggaagacgcagaaggtgaaggtgctcacgggcacgggtaacgtgaacgttattcagcctaactatcctgcggcagcccgtgacttcctgcagactttccgccgtgggctgctgggttccgtgatgctggacctcgacgtcctgcggggccaccccccggctgagactttgccctgaacttgtccgggtagggagggccggaggcatgtggcctcccagacctcctgacctgggtggttgaggctcaagacagctcacccggtccagaagctccatgctggtcactagggtgctgtgctctctggcgccccacagcctggccagctccagggaccccagttgcagggcccaagcaggtgggagtggacaccaggcttcccagtggacgtccctgagcagctccgcatgcttggttctcccggagcttcctgctcaggcctcttgagaaatggatgctgtctcagaaggagttaaagctataacctgtaacctttaaaatctccagttaaagggcctgtttcttactggcctgtgaggtgcaccgtagtgccttgggcctgtgtgttaaagctgctctcaccagtggaacctaagaaatgagcaggttggcagctagggtttgtgttggaggctttcggtccagtgtcttgcagtcctacaacaagtgagaggcttgctgccatcagagaggtttatttcacacttacaggcacacacagacacagaccagagactcccagcagcagagcccaagcactggcttcgcccctcagtgccctggggcatgttcagggcagggttgagggggacgccctgcacatggctttgctgtgcaatgactggaaggccgcccggcatgggcagtagagacccctggcctctgagcaccttctagctcactggtagtgggattctgcattagtggggctgagagatgtgggggcccctccagccccattatagtgcacctgaaggggtccacagcctgtgtcctagaagagggaagaggaaggaaggtgggtggggctggtagtatggactaaggtgctgcaggacctggggccagggacatcctgtgcagaagctccggctgcctctttgcggtggtggcctgaccgtcccacagcagcctccaccagggccctggtgctcagtggcccctctttgctggctggctgcctctgctgccccataccccacacactcatcagcctgaagttagcccctgagtgccacctgcatcgtgccataaccctgaccgcctggggcaggaagtattcaggttggctgtgtcagatgctaatgtgctgaatcaacagtcattgcagatcacgaagtgtccatcataactggaacattccatcagcttgcagtgctgtggtgtgtgagggtctggtgcagctcagcccattttccaggtgggcatctgcaaagttgagggggctccggtgggtctctctgctgtgaggagactcagaccaccccctgcctcctgggggaaatgtcagaagggcttctctgcctatgaggatctggggcagggcttggccttggcctgctggtcttggaggcgttgagcttggtctggaaggggtggaggagcgtctgggctcactgggccaggggcattgctggcagtgtggacgggaggctgcagggcgctgcctcctgtggcttagtgccctggagctagagagcagtgcttggttgagtcctgccaacagcttccagatcctcacccaggccagaacccaggccagctggggaaggcagaggctggcagggcccgtggtgggtgctggtcttgactttggtgtccactgagtcccgaggctcaggcccaggagggatgcagtccggctgagggcgaggctgtccccaggacatggagagggtgagatcccaaggccacggggggggggcagggagaacccctcctaccctggatgagtgggtgactggagagctagagaacgtggcagacccaagacctctcagtgctgagcccatggaggatgccccaggctggcgggactgggaagcagagggctggtcttaacacaggtgtgtccagtgctggaggcaagtccttgtcgtgactgtccagcgccactccatgtctctcctgtccttggatgttggggggctcagcctcttgcatgggtgtcctgctgggcgctgggccccgccactggccccctgcttgctttggggtctgagttagctcctggctccactgagcaggccgtcagctgccagcccaccacgcggatacccaggccctgttccgaggcctggaacagctgcttccgaagaaggggctgccttcagggaaatgcgtgcaccgtgcagcctgtgctgtgcccagggaggcctcttcagcgggattggcagttgctgtgccctgagaacaggcagaactgtgtgatccctgaatgtgaacctgaagttcaaaggacttggaaagctctggaatgtgttggtttttcccccccaaaatgggtcctaaggagggtaaagtgacttgtttcaagttgttggagcaaagtgggtctctcacggatctcggcctgagggtgtgggggagaaggcctggacagcccctcagggcagggtgtgttttcccaccagccgcagagagccaggatggacgttcctcggacggacggttttcctgcttgggaatgttcctgggctgtgagatccactcttctgggcaggtggttagcacctaacgtttttccctcacttccccccaaattcttaagtcctttggtcca

SEQ ID NO: 74786 - DNA, 3742 bp, Homo sapiens
gccggaagcccgcagtgccggaggcccgcagcgccggaacctcagaggcgggtcgcagcggcgcagaggaggtcagctgcgggagcgtttccggggacggtgccgccatgagattgaccccgcgcgcgctgtgcagcgccgcccaggccgcctggcgggagaacttccccctgtgcggtcgcgacgtggcgcgctggttcccgggccacatggccaaggggctgaagaagatgcagagcagcctgaagctggtggactgtatcatcgaggtccacgatgcccggatcccactttcaggccgcaaccctctgtttcaggaaacccttgggcttaagcctcacttgctggtcctcaacaagatggacttggcggatcttacagagcagcagaaaattatgcaacacttagaaggagaaggcctaaaaaatgtcatttttaccaactgtgtaaaggatgaaaatgtcaagcagatcatcccgatggtcactgaactgattgggagaagccaccgctaccaccgaaaagagaacctggagtactgtatcatggtcattggggtccccaacgtgggcaagtcctccctcatcaactccctccggaggcagcacctcaggaaagggaaagccaccagggtgggtggcgagcctgggatcaccagagctgtgatgtccaaaattcaggtctctgagcggcccctgatgttcctgttggacactcctggcgtgctggctcctcggattgaaagtgtggagacaggcctgaagctggccctgtgtgtgctcacctcggctgctgcttccacaggaacggtgctggaccacctggtcggggaggagaccatggctgactacctgctgtacaccctcaacaaacaccagcgctttgggtacgtgcagcactacggcctgggcagtgcctgtgacaacgtagagcgcgtgctgaagagtgtggctgtgaagctggggaagacgcagaaggtgaaggtgctcacgggcacgggtaacgtgaacgttattcagcctaactatcctgcggcagcccgtgacttcctgcagactttccgccgtgggctgctgggttccgtgatgctggacctcgacgtcctgcggggccaccccccggctgagactttgccctgaacttgtccgggtagggagggccggaggcatgtggcctcccagacctcctgacctgggtggttgaggctcaagacagctcacccggtccagaagctccatgctggtcactagggtgctgtgctctctggcgccccacagcctggccagctccagggaccccagttgcagggcccaagcaggtgggagtggacaccaggcttcccagtggacgtccctgagcagctccgcatgcttggttctcccggagcttcctgctcaggcctcttgagaaatggatgctgtctcagaaggagttaaagctataacctgtaacctttaaaatctccagttaaagggcctgtttcttactggcctgtgaggtgcaccgtagtgccttgggcctgtgtgttaaagctgctctcaccagtggaacctaagaaatgagcaggttggcagctagggtttgtgttggaggctttcggtccagtgtcttgcagtcctacaacaagtgagaggcttgctgccatcagagaggtttatttcacacttacaggcacacacagacacagaccagagactcccagcagcagagcccaagcactggcttcgcccctcagtgccctggggcatgttcagggcagggttgagggggacgccctgcacatggctttgctgtgcaatgactggaaggccgcccggcatgggcagtagagacccctggcctctgagcaccttctagctcactggtagtgggattctgcattagtggggctgagagatgtgggggcccctccagccccattatagtgcacctgaaggggtccacagcctgtgtcctagaagagggaagaggaaggaaggtgggtggggctggtagtatggactaaggtgctgcaggacctggggccagggacatcctgtgcagaagctccggctgcctctttgcggtggtggcctgaccgtcccacagcagcctccaccagggccctggtgctcagtggcccctctttgctggctggctgcctctgctgccccataccccacacactcatcagcctgaagttagcccctgagtgccacctgcatcgtgccataaccctgaccgcctggggcaggaagtattcaggttggctgtgtcagatgctaatgtgctgaatcaacagtcattgcagatcacgaagtgtccatcataactggaacattccatcagcttgcagtgctgtggtgtgtgagggtctggtgcagctcagcccattttccaggtgggcatctgcaaagttgagggggctccggtgggtctctctgctgtgaggagactcagaccaccccctgcctcctgggggaaatgtcagaagggcttctctgcctatgaggatctggggcagggcttggccttggcctgctggtcttggaggcgttgagcttggtctggaaggggtggaggagcgtctgggctcactgggccaggggcattgctggcagtgtggacgggaggctgcagggcgctgcctcctgtggcttagtgccctggagctagagagcagtgcttggttgagtcctgccaacagcttccagatcctcacccaggccagaacccaggccagctggggaaggcagaggctggcagggcccgtggtgggtgctggtcttgactttggtgtccactgagtcccgaggctcaggcccaggagggatgcagtccggctgagggcgaggctgtccccaggacatggagagggtgagatcccaaggccacggggggggggcagggagaacccctcctaccctggatgagtgggtgactggagagctagagaacgtggcagacccaagacctctcagtgctgagcccatggaggatgccccaggctggcgggactgggaagcagagggctggtcttaacacaggtgtgtccagtgctggaggcaagtccttgtcgtgactgtccagcgccactccatgtctctcctgtccttggatgttggggggctcagcctcttgcatgggtgtcctgctgggcgctgggccccgccactggccccctgcttgctttggggtctgagttagctcctggctccactgagcaggccgtcagctgccagcccaccacgcggatacccaggccctgttccgaggcctggaacagctgcttccgaagaaggggctgccttcagggaaatgcgtgcaccgtgcagcctgtgctgtgcccagggaggcctcttcagcgggattggcagttgctgtgccctgagaacaggcagaactgtgtgatccctgaatgtgaacctgaagttcaaaggacttggaaagctctggaatgtgttggtttttcccccccaaaatgggtcctaaggagggtaaagtgacttgtttcaagttgttggagcaaagtgggtctctcacggatctcggcctgagggtgtgggggagaaggcctggacagcccctcagggcagggtgtgttttcccaccagccgcagagagccaggatggacgttcctcggacggacggttttcctgcttgggaatgttcctgggctgtgagatccactcttctgggcaggtggttagcacctaacgtttttccctcacttccccccaaattcttaagtcctttggtcca

SEQ ID NO: 74787 - DNA, 4188 bp, Homo sapiens
tgtgttttttattcttgggttgtttgtccacagtggagtggcctccttgggacacaccctgagctgggtcctagagcagccagtcgcctgtggacagtgctgtgggaggcaggctgaccttggggtgcaggggtgggtccaggagggaggtgggggactgcgtggaaggagcagctcaggtctgacctccgcagtctgacagtgcctttccagtcctggggagttaggttctggtgcatttgttgaagaatctcagtctctgtgtggcttggaaagtgcccttgctgtgagctggtttgtgactgaaagtgaaacaaattatagccttgggaagctcatctggcttttagtttccattttggccagatatgtttgttacatagtctccctgcttggctggtaagttgtgtttgttacatagtctccctgcttggctggtcagatgtgtttgttacatacgtctccctacttgttctgcagcttctgtgtttagtatacatttgagcctccttttctccttttcctacaggggaaagccaccagggtgggtggcgagcctgggatcaccagagctgtgatgtccaaaattcagaggtggagtcctcaggggccaggcccagcactctgtcaagagctctgcaggcgtctggcacctgccgacctctgtgtggcttccggctgctgaccacgcttccctcccctccactcagtgtccccgctgagcacccccggggcaggcactgcccctgcccttattccacagtcgtcatagtctttgcgccaaacctttggggaaggcacgctgttttccccatttccagatgaggaggccactgtccagggccatgcagtggtcaggacagacctgagtgtggcgccccccgccccacacctccactcccttccttgtgttctccttgggagcagaagacaagctgttgggacctgacgcttttatttattctccaaattaagtgggaattagatcctctggggaaccctggagcttggtgagagtgacgctgccatggggttgggtccctgaggccttcctcggagcattgggtgccaggggctgcccaggcttcctgagtggcccacctgggtgggaggctgccaccgcggcctgatcatgccctctgtgcccacacaggtctctgagcggcccctgatgttcctgttggacactcctggcgtgctggctcctcggattgaaagtgtggagacaggcctgaagctggccctgtgtggaacggtgctggaccacctggtcggggaggagaccatggctgactacctgctgtacaccctcaacaaacaccagcgctttgggtacgtgcagcactacggcctgggcagtgcctgtgacaacgtagagcgcgtgctgaagagtgtggctgtgaagctggggaagacgcagaaggtgaaggtgctcacgggcacgggtaacgtgaacgttattcagcctaactatcctgcggcagcccgtgacttcctgcagactttccgccgtgggctgctgggttccgtgatgctggacctcgacgtcctgcggggccaccccccggctgagactttgccctgaacttgtccgggtagggagggccggaggcatgtggcctcccagacctcctgacctgggtggttgaggctcaagacagctcacccggtccagaagctccatgctggtcactagggtgctgtgctctctggcgccccacagcctggccagctccagggaccccagttgcagggcccaagcaggtgggagtggacaccaggcttcccagtggacgtccctgagcagctccgcatgcttggttctcccggagcttcctgctcaggcctcttgagaaatggatgctgtctcagaaggagttaaagctataacctgtaacctttaaaatctccagttaaagggcctgtttcttactggcctgtgaggtgcaccgtagtgccttgggcctgtgtgttaaagctgctctcaccagtggaacctaagaaatgagcaggttggcagctagggtttgtgttggaggctttcggtccagtgtcttgcagtcctacaacaagtgagaggcttgctgccatcagagaggtttatttcacacttacaggcacacacagacacagaccagagactcccagcagcagagcccaagcactggcttcgcccctcagtgccctggggcatgttcagggcagggttgagggggacgccctgcacatggctttgctgtgcaatgactggaaggccgcccggcatgggcagtagagacccctggcctctgagcaccttctagctcactggtagtgggattctgcattagtggggctgagagatgtgggggcccctccagccccattatagtgcacctgaaggggtccacagcctgtgtcctagaagagggaagaggaaggaaggtgggtggggctggtagtatggactaaggtgctgcaggacctggggccagggacatcctgtgcagaagctccggctgcctctttgcggtggtggcctgaccgtcccacagcagcctccaccagggccctggtgctcagtggcccctctttgctggctggctgcctctgctgccccataccccacacactcatcagcctgaagttagcccctgagtgccacctgcatcgtgccataaccctgaccgcctggggcaggaagtattcaggttggctgtgtcagatgctaatgtgctgaatcaacagtcattgcagatcacgaagtgtccatcataactggaacattccatcagcttgcagtgctgtggtgtgtgagggtctggtgcagctcagcccattttccaggtgggcatctgcaaagttgagggggctccggtgggtctctctgctgtgaggagactcagaccaccccctgcctcctgggggaaatgtcagaagggcttctctgcctatgaggatctggggcagggcttggccttggcctgctggtcttggaggcgttgagcttggtctggaaggggtggaggagcgtctgggctcactgggccaggggcattgctggcagtgtggacgggaggctgcagggcgctgcctcctgtggcttagtgccctggagctagagagcagtgcttggttgagtcctgccaacagcttccagatcctcacccaggccagaacccaggccagctggggaaggcagaggctggcagggcccgtggtgggtgctggtcttgactttggtgtccactgagtcccgaggctcaggcccaggagggatgcagtccggctgagggcgaggctgtccccaggacatggagagggtgagatcccaaggccacggggggggggcagggagaacccctcctaccctggatgagtgggtgactggagagctagagaacgtggcagacccaagacctctcagtgctgagcccatggaggatgccccaggctggcgggactgggaagcagagggctggtcttaacacaggtgtgtccagtgctggaggcaagtccttgtcgtgactgtccagcgccactccatgtctctcctgtccttggatgttggggggctcagcctcttgcatgggtgtcctgctgggcgctgggccccgccactggccccctgcttgctttggggtctgagttagctcctggctccactgagcaggccgtcagctgccagcccaccacgcggatacccaggccctgttccgaggcctggaacagctgcttccgaagaaggggctgccttcagggaaatgcgtgcaccgtgcagcctgtgctgtgcccagggaggcctcttcagcgggattggcagttgctgtgccctgagaacaggcagaactgtgtgatccctgaatgtgaacctgaagttcaaaggacttggaaagctctggaatgtgttggtttttcccccccaaaatgggtcctaaggagggtaaagtgacttgtttcaagttgttggagcaaagtgggtctctcacggatctcggcctgagggtgtgggggagaaggcctggacagcccctcagggcagggtgtgttttcccaccagccgcagagagccaggatggacgttcctcggacggacggttttcctgcttgggaatgttcctgggctgtgagatccactcttctgggcaggtggttagcacctaacgtttttccctcacttccccccaaattcttaagtcctttggtcca

SEQ ID NO: 74788 - DNA, 4146 bp, Homo sapiens
tgtgttttttattcttgggttgtttgtccacagtggagtggcctccttgggacacaccctgagctgggtcctagagcagccagtcgcctgtggacagtgctgtgggaggcaggctgaccttggggtgcaggggtgggtccaggagggaggtgggggactgcgtggaaggagcagctcaggtctgacctccgcagtctgacagtgcctttccagtcctggggagttaggttctggtgcatttgttgaagaatctcagtctctgtgtggcttggaaagtgcccttgctgtgagctggtttgtgactgaaagtgaaacaaattatagccttgggaagctcatctggcttttagtttccattttggccagatatgtttgttacatagtctccctgcttggctggtaagttgtgtttgttacatagtctccctgcttggctggtcagatgtgtttgttacatacgtctccctacttgttctgcagcttctgtgtttagtatacatttgagcctccttttctccttttcctacaggggaaagccaccagggtgggtggcgagcctgggatcaccagagctgtgatgtccaaaattcagctctgcaggcgtctggcacctgccgacctctgtgtggcttccggctgctgaccacgcttccctcccctccactcagtgtccccgctgagcacccccggggcaggcactgcccctgcccttattccacagtcgtcatagtctttgcgccaaacctttggggaaggcacgctgttttccccatttccagatgaggaggccactgtccagggccatgcagtggtcaggacagacctgagtgtggcgccccccgccccacacctccactcccttccttgtgttctccttgggagcagaagacaagctgttgggacctgacgcttttatttattctccaaattaagtgggaattagatcctctggggaaccctggagcttggtgagagtgacgctgccatggggttgggtccctgaggccttcctcggagcattgggtgccaggggctgcccaggcttcctgagtggcccacctgggtgggaggctgccaccgcggcctgatcatgccctctgtgcccacacaggtctctgagcggcccctgatgttcctgttggacactcctggcgtgctggctcctcggattgaaagtgtggagacaggcctgaagctggccctgtgtggaacggtgctggaccacctggtcggggaggagaccatggctgactacctgctgtacaccctcaacaaacaccagcgctttgggtacgtgcagcactacggcctgggcagtgcctgtgacaacgtagagcgcgtgctgaagagtgtggctgtgaagctggggaagacgcagaaggtgaaggtgctcacgggcacgggtaacgtgaacgttattcagcctaactatcctgcggcagcccgtgacttcctgcagactttccgccgtgggctgctgggttccgtgatgctggacctcgacgtcctgcggggccaccccccggctgagactttgccctgaacttgtccgggtagggagggccggaggcatgtggcctcccagacctcctgacctgggtggttgaggctcaagacagctcacccggtccagaagctccatgctggtcactagggtgctgtgctctctggcgccccacagcctggccagctccagggaccccagttgcagggcccaagcaggtgggagtggacaccaggcttcccagtggacgtccctgagcagctccgcatgcttggttctcccggagcttcctgctcaggcctcttgagaaatggatgctgtctcagaaggagttaaagctataacctgtaacctttaaaatctccagttaaagggcctgtttcttactggcctgtgaggtgcaccgtagtgccttgggcctgtgtgttaaagctgctctcaccagtggaacctaagaaatgagcaggttggcagctagggtttgtgttggaggctttcggtccagtgtcttgcagtcctacaacaagtgagaggcttgctgccatcagagaggtttatttcacacttacaggcacacacagacacagaccagagactcccagcagcagagcccaagcactggcttcgcccctcagtgccctggggcatgttcagggcagggttgagggggacgccctgcacatggctttgctgtgcaatgactggaaggccgcccggcatgggcagtagagacccctggcctctgagcaccttctagctcactggtagtgggattctgcattagtggggctgagagatgtgggggcccctccagccccattatagtgcacctgaaggggtccacagcctgtgtcctagaagagggaagaggaaggaaggtgggtggggctggtagtatggactaaggtgctgcaggacctggggccagggacatcctgtgcagaagctccggctgcctctttgcggtggtggcctgaccgtcccacagcagcctccaccagggccctggtgctcagtggcccctctttgctggctggctgcctctgctgccccataccccacacactcatcagcctgaagttagcccctgagtgccacctgcatcgtgccataaccctgaccgcctggggcaggaagtattcaggttggctgtgtcagatgctaatgtgctgaatcaacagtcattgcagatcacgaagtgtccatcataactggaacattccatcagcttgcagtgctgtggtgtgtgagggtctggtgcagctcagcccattttccaggtgggcatctgcaaagttgagggggctccggtgggtctctctgctgtgaggagactcagaccaccccctgcctcctgggggaaatgtcagaagggcttctctgcctatgaggatctggggcagggcttggccttggcctgctggtcttggaggcgttgagcttggtctggaaggggtggaggagcgtctgggctcactgggccaggggcattgctggcagtgtggacgggaggctgcagggcgctgcctcctgtggcttagtgccctggagctagagagcagtgcttggttgagtcctgccaacagcttccagatcctcacccaggccagaacccaggccagctggggaaggcagaggctggcagggcccgtggtgggtgctggtcttgactttggtgtccactgagtcccgaggctcaggcccaggagggatgcagtccggctgagggcgaggctgtccccaggacatggagagggtgagatcccaaggccacggggggggggcagggagaacccctcctaccctggatgagtgggtgactggagagctagagaacgtggcagacccaagacctctcagtgctgagcccatggaggatgccccaggctggcgggactgggaagcagagggctggtcttaacacaggtgtgtccagtgctggaggcaagtccttgtcgtgactgtccagcgccactccatgtctctcctgtccttggatgttggggggctcagcctcttgcatgggtgtcctgctgggcgctgggccccgccactggccccctgcttgctttggggtctgagttagctcctggctccactgagcaggccgtcagctgccagcccaccacgcggatacccaggccctgttccgaggcctggaacagctgcttccgaagaaggggctgccttcagggaaatgcgtgcaccgtgcagcctgtgctgtgcccagggaggcctcttcagcgggattggcagttgctgtgccctgagaacaggcagaactgtgtgatccctgaatgtgaacctgaagttcaaaggacttggaaagctctggaatgtgttggtttttcccccccaaaatgggtcctaaggagggtaaagtgacttgtttcaagttgttggagcaaagtgggtctctcacggatctcggcctgagggtgtgggggagaaggcctggacagcccctcagggcagggtgtgttttcccaccagccgcagagagccaggatggacgttcctcggacggacggttttcctgcttgggaatgttcctgggctgtgagatccactcttctgggcaggtggttagcacctaacgtttttccctcacttccccccaaattcttaagtcctttggtcca

SEQ ID NO: 74789 - DNA, 3133 bp, Homo sapiens
tatccggtcactgcgtacgtaagacacggagcggtgggaaagccaccagggtgggtggcgagcctgggatcaccagagctgtgatgtccaaaattcaggtctctgagcggcccctgatgttcctgttggacactcctggcgtgctggctcctcggattgaaagtgtggagacaggcctgaagctggccctgtgtggaacggtgctggaccacctggtcggggaggagaccatggctgactacctgctgtacaccctcaacaaacaccagcgctttgggtacgtgcagcactacggcctgggcagtgcctgtgacaacgtagagcgcgtgctgaagagtgtggctgtgaagctggggaagacgcagaaggtgaaggtgctcacgggcacgggtaacgtgaacgttattcagcctaactatcctgcggcagcccgtgacttcctgcagactttccgccgtgggctgctgggttccgtgatgctggacctcgacgtcctgcggggccaccccccggctgagactttgccctgaacttgtccgggtagggagggccggaggcatgtggcctcccagacctcctgacctgggtggttgaggctcaagacagctcacccggtccagaagctccatgctggtcactagggtgctgtgctctctggcgccccacagcctggccagctccagggaccccagttgcagggcccaagcaggtgggagtggacaccaggcttcccagtggacgtccctgagcagctccgcatgcttggttctcccggagcttcctgctcaggcctcttgagaaatggatgctgtctcagaaggagttaaagctataacctgtaacctttaaaatctccagttaaagggcctgtttcttactggcctgtgaggtgcaccgtagtgccttgggcctgtgtgttaaagctgctctcaccagtggaacctaagaaatgagcaggttggcagctagggtttgtgttggaggctttcggtccagtgtcttgcagtcctacaacaagtgagaggcttgctgccatcagagaggtttatttcacacttacaggcacacacagacacagaccagagactcccagcagcagagcccaagcactggcttcgcccctcagtgccctggggcatgttcagggcagggttgagggggacgccctgcacatggctttgctgtgcaatgactggaaggccgcccggcatgggcagtagagacccctggcctctgagcaccttctagctcactggtagtgggattctgcattagtggggctgagagatgtgggggcccctccagccccattatagtgcacctgaaggggtccacagcctgtgtcctagaagagggaagaggaaggaaggtgggtggggctggtagtatggactaaggtgctgcaggacctggggccagggacatcctgtgcagaagctccggctgcctctttgcggtggtggcctgaccgtcccacagcagcctccaccagggccctggtgctcagtggcccctctttgctggctggctgcctctgctgccccataccccacacactcatcagcctgaagttagcccctgagtgccacctgcatcgtgccataaccctgaccgcctggggcaggaagtattcaggttggctgtgtcagatgctaatgtgctgaatcaacagtcattgcagatcacgaagtgtccatcataactggaacattccatcagcttgcagtgctgtggtgtgtgagggtctggtgcagctcagcccattttccaggtgggcatctgcaaagttgagggggctccggtgggtctctctgctgtgaggagactcagaccaccccctgcctcctgggggaaatgtcagaagggcttctctgcctatgaggatctggggcagggcttggccttggcctgctggtcttggaggcgttgagcttggtctggaaggggtggaggagcgtctgggctcactgggccaggggcattgctggcagtgtggacgggaggctgcagggcgctgcctcctgtggcttagtgccctggagctagagagcagtgcttggttgagtcctgccaacagcttccagatcctcacccaggccagaacccaggccagctggggaaggcagaggctggcagggcccgtggtgggtgctggtcttgactttggtgtccactgagtcccgaggctcaggcccaggagggatgcagtccggctgagggcgaggctgtccccaggacatggagagggtgagatcccaaggccacggggggggggcagggagaacccctcctaccctggatgagtgggtgactggagagctagagaacgtggcagacccaagacctctcagtgctgagcccatggaggatgccccaggctggcgggactgggaagcagagggctggtcttaacacaggtgtgtccagtgctggaggcaagtccttgtcgtgactgtccagcgccactccatgtctctcctgtccttggatgttggggggctcagcctcttgcatgggtgtcctgctgggcgctgggccccgccactggccccctgcttgctttggggtctgagttagctcctggctccactgagcaggccgtcagctgccagcccaccacgcggatacccaggccctgttccgaggcctggaacagctgcttccgaagaaggggctgccttcagggaaatgcgtgcaccgtgcagcctgtgctgtgcccagggaggcctcttcagcgggattggcagttgctgtgccctgagaacaggcagaactgtgtgatccctgaatgtgaacctgaagttcaaaggacttggaaagctctggaatgtgttggtttttcccccccaaaatgggtcctaaggagggtaaagtgacttgtttcaagttgttggagcaaagtgggtctctcacggatctcggcctgagggtgtgggggagaaggcctggacagcccctcagggcagggtgtgttttcccaccagccgcagagagccaggatggacgttcctcggacggacggttttcctgcttgggaatgttcctgggctgtgagatccactcttctgggcaggtggttagcacctaacgtttttccctcacttccccccaaattcttaagtcctttggtcca

SEQ ID NO: 74790 - DNA, 926 bp, Homo sapiens
gccggaagcccgcagtgccggaggcccgcagcgccggaacctcagaggcgggtcgcagcggcgcagaggaggtcagctgcgggagcgtttccggggacggtgccgccatgagattgaccccgcgcgcgctgtgcagcgccgcccaggccgcctggcgggagaacttccccctgtgcggtcgcgacgtggcgcgctggttcccgggccacatggccaaggggctgaagaagatgcagagcagcctgaagctggtggactgtatcatcgaggtccacgatgcccggatcccactttcaggccgcaaccctctgtttcaggaaacccttgggcttaagcctcacttgctggtcctcaacaagatggacttggcggatcttacagagcagcagaaaattatgcaacacttagaaggagaaggcctaaaaaatgtcatttttaccaactgtgtaaaggatgaaaatgtcaagcagatcatcccgatggtcactgaactgattgggagaagccaccgctaccaccgaaaagagaacctggagtactgtatcatggtcattggggtccccaacgtgggcaagtcctccctcatcaactccctccggaggcagcacctcaggaaagggaaagccaccagggtgggtggcgagcctgggatcaccagagctgtgatgtccaaaattcaggtctctgagcggcccctgatgttcctgttggacactcctggcgtgctggctcctcggattgaaagtgtggagacaggcctgaagctggccctgtgtggaacggtgctggaccacctggtcggggaggagaccatggctgactacctgctgtacaccctcaacaaacaccagcgctttgggtgagtgcagtgaatgcagggcagctggggcccctcctcctagtcacctcatttaaaaaaaaaaaac

SEQ ID NO: 74791 - DNA, 2626 bp, Homo sapiens
tttaccttaattttgccacatcccactttcaggccgcaaccctctgtttcaggaaacccttgggcttaagcctcacttgctggtcctcaacaagatggacttggcggatcttacagagcagcagaaaattatgcaacacttagaaggagaaggcctaaaaaatgtcatttttaccaactaacctggagtactgtatcatggtcattggggtccccaacgtgggcaagtcctccctcatcaactccctccggaggcagcacctcaggaaagcttcctgctcaggcctcttgagaaatggatgctgtctcagaaggagttaaagctataacctgtaacctttaaaatctccagttaaagggcctgtttcttactggcctgtgaggtgcaccgtagtgccttgggcctgtgtgttaaagctgctctcaccagtggaacctaagaaatgagcaggttggcagctagggtttgtgttggaggctttcggtccagtgtcttgcagtcctacaacaagtgagaggcttgctgccatcagagaggtttatttcacacttacaggcacacacagacacagaccagagactcccagcagcagagcccaagcactggcttcgcccctcagtgccctggggcatgttcagggcagggttgagggggacgccctgcacatggctttgctgtgcaatgactggaaggccgcccggcatgggcagtagagacccctggcctctgagcaccttctagctcactggtagtgggattctgcattagtggggctgagagatgtgggggcccctccagccccattatagtgcacctgaaggggtccacagcctgtgtcctagaagagggaagaggaaggaaggtgggtggggctggtagtatggactaaggtgctgcaggacctggggccagggacatcctgtgcagaagctccggctgcctctttgcggtggtggcctgaccgtcccacagcagcctccaccagggccctggtgctcagtggcccctctttgctggctggctgcctctgctgccccataccccacacactcatcagcctgaagttagcccctgagtgccacctgcatcgtgccataaccctgaccgcctggggcaggaagtattcaggttggctgtgtcagatgctaatgtgctgaatcaacagtcattgcagatcacgaagtgtccatcataactggaacattccatcagcttgcagtgctgtggtgtgtgagggtctggtgcagctcagcccattttccaggtgggcatctgcaaagttgagggggctccggtgggtctctctgctgtgaggagactcagaccaccccctgcctcctgggggaaatgtcagaagggcttctctgcctatgaggatctggggcagggcttggccttggcctgctggtcttggaggcgttgagcttggtctggaaggggtggaggagcgtctgggctcactgggccaggggcattgctggcagtgtggacgggaggctgcagggcgctgcctcctgtggcttagtgccctggagctagagagcagtgcttggttgagtcctgccaacagcttccagatcctcacccaggccagaacccaggccagctggggaaggcagaggctggcagggcccgtggtgggtgctggtcttgactttggtgtccactgagtcccgaggctcaggcccaggagggatgcagtccggctgagggcgaggctgtccccaggacatggagagggtgagatcccaaggccacggggggggggcagggagaacccctcctaccctggatgagtgggtgactggagagctagagaacgtggcagacccaagacctctcagtgctgagcccatggaggatgccccaggctggcgggactgggaagcagagggctggtcttaacacaggtgtgtccagtgctggaggcaagtccttgtcgtgactgtccagcgccactccatgtctctcctgtccttggatgttggggggctcagcctcttgcatgggtgtcctgctgggcgctgggccccgccactggccccctgcttgctttggggtctgagttagctcctggctccactgagcaggccgtcagctgccagcccaccacgcggatacccaggccctgttccgaggcctggaacagctgcttccgaagaaggggctgccttcagggaaatgcgtgcaccgtgcagcctgtgctgtgcccagggaggcctcttcagcgggattggcagttgctgtgccctgagaacaggcagaactgtgtgatccctgaatgtgaacctgaagttcaaaggacttggaaagctctggaatgtgttggtttttcccccccaaaatgggtcctaaggagggtaaagtgacttgtttcaagttgttggagcaaagtgggtctctcacggatctcggcctgagggtgtgggggagaaggcctggacagcccctcagggcagggtgtgttttcccaccagccgcagagagccaggatggacgttcctcggacggacggttttcctgcttgggaatgttcctgggctgtgagatccactcttctgggcaggtggttagcacctaacgtttttccctcacttccccccaaattcttaagtcctttggtcca

SEQ ID NO: 74792 - DNA, 467 bp, Homo sapiens
ttgctgccagaccttcctcgaagcttagtgtgagagctgtaatagtgcacagctgacaggcactggtcaccattccaccctgccccatgagtggccttccctttccccatttgacggaccagggcagagaggttggtcgcaggtgccaggcaggagtgggggccgggaccacagccgagtgccgtcctcttggttagtgtctttgtcagtggctggcctcttcctcacggcacggtgtctttgggctaggactggaagggatgtgtttgaacttggcaggaacatagatgtggctgtttccagtgctcacctcggctgctgcttccacaggaacggtgctggaccacctggtcggggaggagaccatggctgactacctgctgtacaccctcaacaaacaccagcgctttgggtgagtgcagtgaatgcagggcagctggggcccctcctcctagtcacctcattta

SEQ ID NO: 74793 - DNA, 3567 bp, Homo sapiens
gccggaagcccgcagtgccggaggcccgcagcgccggaacctcagaggcgggtcgcagcggcgcagaggagggctgaagaagatgcagagcagcctgaagctggtggactgtatcatcgaggtccacgatgcccggatcccactttcaggccgcaaccctctgtttcaggaaacccttgggcttaagcctcacttgctggtcctcaacaagatggacttggcggatcttacagagcagcagaaaattatgcaacacttagaaggagaaggcctaaaaaatgtcatttttaccaactgtgtaaaggatgaaaatgtcaagcagatcatcccgatggtcactgaactgattgggagaagccaccgctaccaccgaaaagagaacctggagtactgtatcatggtcattggggtccccaacgtgggcaagtcctccctcatcaactccctccggaggcagcacctcaggaaagggaaagccaccagggtgggtggcgagcctgggatcaccagagctgtgatgtccaaaattcaggtctctgagcggcccctgatgttcctgttggacactcctggcgtgctggctcctcggattgaaagtgtggagacaggcctgaagctggccctgtgtggaacggtgctggaccacctggtcggggaggagaccatggctgactacctgctgtacaccctcaacaaacaccagcgctttgggtacgtgcagcactacggcctgggcagtgcctgtgacaacgtagagcgcgtgctgaagagtgtggctgtgaagctggggaagacgcagaaggtgaaggtgctcacgggcacgggtaacgtgaacgttattcagcctaactatcctgcggcagcccgtgacttcctgcagactttccgccgtgggctgctgggttccgtgatgctggacctcgacgtcctgcggggccaccccccggctgagactttgccctgaacttgtccgggtagggagggccggaggcatgtggcctcccagacctcctgacctgggtggttgaggctcaagacagctcacccggtccagaagctccatgctggtcactagggtgctgtgctctctggcgccccacagcctggccagctccagggaccccagttgcagggcccaagcaggtgggagtggacaccaggcttcccagtggacgtccctgagcagctccgcatgcttggttctcccggagcttcctgctcaggcctcttgagaaatggatgctgtctcagaaggagttaaagctataacctgtaacctttaaaatctccagttaaagggcctgtttcttactggcctgtgaggtgcaccgtagtgccttgggcctgtgtgttaaagctgctctcaccagtggaacctaagaaatgagcaggttggcagctagggtttgtgttggaggctttcggtccagtgtcttgcagtcctacaacaagtgagaggcttgctgccatcagagaggtttatttcacacttacaggcacacacagacacagaccagagactcccagcagcagagcccaagcactggcttcgcccctcagtgccctggggcatgttcagggcagggttgagggggacgccctgcacatggctttgctgtgcaatgactggaaggccgcccggcatgggcagtagagacccctggcctctgagcaccttctagctcactggtagtgggattctgcattagtggggctgagagatgtgggggcccctccagccccattatagtgcacctgaaggggtccacagcctgtgtcctagaagagggaagaggaaggaaggtgggtggggctggtagtatggactaaggtgctgcaggacctggggccagggacatcctgtgcagaagctccggctgcctctttgcggtggtggcctgaccgtcccacagcagcctccaccagggccctggtgctcagtggcccctctttgctggctggctgcctctgctgccccataccccacacactcatcagcctgaagttagcccctgagtgccacctgcatcgtgccataaccctgaccgcctggggcaggaagtattcaggttggctgtgtcagatgctaatgtgctgaatcaacagtcattgcagatcacgaagtgtccatcataactggaacattccatcagcttgcagtgctgtggtgtgtgagggtctggtgcagctcagcccattttccaggtgggcatctgcaaagttgagggggctccggtgggtctctctgctgtgaggagactcagaccaccccctgcctcctgggggaaatgtcagaagggcttctctgcctatgaggatctggggcagggcttggccttggcctgctggtcttggaggcgttgagcttggtctggaaggggtggaggagcgtctgggctcactgggccaggggcattgctggcagtgtggacgggaggctgcagggcgctgcctcctgtggcttagtgccctggagctagagagcagtgcttggttgagtcctgccaacagcttccagatcctcacccaggccagaacccaggccagctggggaaggcagaggctggcagggcccgtggtgggtgctggtcttgactttggtgtccactgagtcccgaggctcaggcccaggagggatgcagtccggctgagggcgaggctgtccccaggacatggagagggtgagatcccaaggccacggggggggggcagggagaacccctcctaccctggatgagtgggtgactggagagctagagaacgtggcagacccaagacctctcagtgctgagcccatggaggatgccccaggctggcgggactgggaagcagagggctggtcttaacacaggtgtgtccagtgctggaggcaagtccttgtcgtgactgtccagcgccactccatgtctctcctgtccttggatgttggggggctcagcctcttgcatgggtgtcctgctgggcgctgggccccgccactggccccctgcttgctttggggtctgagttagctcctggctccactgagcaggccgtcagctgccagcccaccacgcggatacccaggccctgttccgaggcctggaacagctgcttccgaagaaggggctgccttcagggaaatgcgtgcaccgtgcagcctgtgctgtgcccagggaggcctcttcagcgggattggcagttgctgtgccctgagaacaggcagaactgtgtgatccctgaatgtgaacctgaagttcaaaggacttggaaagctctggaatgtgttggtttttcccccccaaaatgggtcctaaggagggtaaagtgacttgtttcaagttgttggagcaaagtgggtctctcacggatctcggcctgagggtgtgggggagaaggcctggacagcccctcagggcagggtgtgttttcccaccagccgcagagagccaggatggacgttcctcggacggacggttttcctgcttgggaatgttcctgggctgtgagatccactcttctgggcaggtggttagcacctaacgtttttccctcacttccccccaaattcttaagtcctttggtcca

SEQ ID NO: 74794 - DNA, 1659 bp, Homo sapiens
gccggaagcccgcagtgccggaggcccgcagcgccggaacctcagaggcgggtcgcagcggcgcagaggaggtcagctgcgggagcgtttccggggacggtgccgccatgagattgaccccgcgcgcgctgtgcagcgccgcccaggccgcctggcgggagaacttccccctgtgcggtcgcgacgtggcgcgctggttcccgggccacatggccaaggggctgaagaagatgcagagcagcctgaagctggtggactgtatcatcgaggtccacgatgcccggatcccactttcaggccgcaaccctctgtttcaggaaacccttgggcttaagcctcacttgctggtcctcaacaagatggacttggcggatcttacagagcagcagaaaattatgcaacacttagaaggagaaggcctaaaaaatgtcatttttaccaactgtgtaaaggatgaaaatgtcaagcagatcatcccgatggtcactgaactgattgggagaagccaccgctaccaccgaaaagagaacctggagtactgtatcatggtcattggggtccccaacgtgggcaagtcctccctcatcaactccctccggaggcagcacctcaggaaagggaaagccaccagggtgggtggcgagcctgggatcaccagagctgtgatgtccaaaattcaggtctctgagcggcccctgatgttcctgttggacactcctggcgtgctggctcctcggattgaaagtgtggagacaggcctgaagctggccctgtgtggaacggtgctggaccacctggtcggggaggagaccatggctgactacctgctgtacaccctcaacaaacaccagcgctttgggtacgtgcagcactacggcctgggcagtgcctgtgacaacgtagagcgcgtgctgaagagtgtggctgtgaagctggggaagacgcagaaggtgaaggtgctcacgggcacgggtaacgtgaacgttattcagcctaactatcctgcggcagcccgtgacttcctgcagactttccgccgtgggctgctgggttccgtgatgctggacctcgacgtcctgcggggccaccccccggctgagactttgccctgaacttgtccgggtagggagggccggaggcatgtggcctcccagacctcctgacctgggtggttgaggctcaagacagctcacccggtccagaagctccatgctggtcactagggtgctgtgctctctggcgccccacagcctggccagctccagggaccccagttgcagggcccaagcaggtgggagtggacaccaggcttcccagtggacgtccctgagcagctccgcatgcttggttctcccggagcttcctgctcaggcctcttgagaaatggatgctgtctcagaaggagttaaagctataacctgtaacctttaaaatctccagttaaagggcctgtttcttactgggcacaaaaaaaaaaaaataaaaaaaaaaaaaaaagggggggctaaatttctcgggggggcccttctcacagtttttaaagggcctaggaaggtttaaaaaacggggtacaaacggagagagattgtttagacactctgggtggacccacaagcggataatattgtatttggtatcataataataaggggtacgcca

SEQ ID NO: 74795 - DNA, 4276 bp, Homo sapiens
gccggaagcccgcagtgccggaggcccgcagcgccggaacctcagaggcgggtcgcagcggcgcagaggaggtcagctgcgggagcgtttccggggacggtgccgccatgagattgaccccgcgcgcgctgtgcagcgccgcccaggccgcctggcgggagaacttccccctgtgcggtcgcgacgtggcgcgctggttcccgggccacatggccaaggggctgaagaagatgcagagcagcctgaagctggtggactgtatcatcgaggtccacgatgcccggatcccactttcaggccgcaaccctctgtttcaggaaacccttgggcttaagcctcacttgctggtcctcaacaagatggacttggcggatcttacagagcagcagaaaattatgcaacacttagaaggagaaggcctaaaaaatgtcatttttaccaactgtgtaaaggatgaaaatgtcaagcagatcatcccgatggtcactgaactgattgggagaagccaccgctaccaccgaaaagagaacctggagtactgtatcatggtcattggggtccccaacgtgggcaagtcctccctcatcaactccctccggaggcagcacctcaggaaagggaaagccaccagggtgggtggcgagcctgggatcaccagagctgtgatgtccaaaattcagaggtggagtcctcaggggccaggcccagcactctgtcaagagctctgcaggcgtctggcacctgccgacctctgtgtggcttccggctgctgaccacgcttccctcccctccactcagtgtccccgctgagcacccccggggcaggcactgcccctgcccttattccacagtcgtcatagtctttgcgccaaacctttggggaaggcacgctgttttccccatttccagatgaggaggccactgtccagggccatgcagtggtcaggacagacctgagtgtggcgccccccgccccacacctccactcccttccttgtgttctccttgggagcagaagacaagctgttgggacctgacgcttttatttattctccaaattaagtgggaattagatcctctggggaaccctggagcttggtgagagtgacgctgccatggggttgggtccctgaggccttcctcggagcattgggtgccaggggctgcccaggcttcctgagtggcccacctgggtgggaggctgccaccgcggcctgatcatgccctctgtgcccacacaggtctctgagcggcccctgatgttcctgttggacactcctggcgtgctggctcctcggattgaaagtgtggagacaggcctgaagctggccctgtgtggaacggtgctggaccacctggtcggggaggagaccatggctgactacctgctgtacaccctcaacaaacaccagcgctttgggtacgtgcagcactacggcctgggcagtgcctgtgacaacgtagagcgcgtgctgaagagtgtggctgtgaagctggggaagacgcagaaggtgaaggtgctcacgggcacgggtaacgtgaacgttattcagcctaactatcctgcggcagcccgtgacttcctgcagactttccgccgtgggctgctgggttccgtgatgctggacctcgacgtcctgcggggccaccccccggctgagactttgccctgaacttgtccgggtagggagggccggaggcatgtggcctcccagacctcctgacctgggtggttgaggctcaagacagctcacccggtccagaagctccatgctggtcactagggtgctgtgctctctggcgccccacagcctggccagctccagggaccccagttgcagggcccaagcaggtgggagtggacaccaggcttcccagtggacgtccctgagcagctccgcatgcttggttctcccggagcttcctgctcaggcctcttgagaaatggatgctgtctcagaaggagttaaagctataacctgtaacctttaaaatctccagttaaagggcctgtttcttactggcctgtgaggtgcaccgtagtgccttgggcctgtgtgttaaagctgctctcaccagtggaacctaagaaatgagcaggttggcagctagggtttgtgttggaggctttcggtccagtgtcttgcagtcctacaacaagtgagaggcttgctgccatcagagaggtttatttcacacttacaggcacacacagacacagaccagagactcccagcagcagagcccaagcactggcttcgcccctcagtgccctggggcatgttcagggcagggttgagggggacgccctgcacatggctttgctgtgcaatgactggaaggccgcccggcatgggcagtagagacccctggcctctgagcaccttctagctcactggtagtgggattctgcattagtggggctgagagatgtgggggcccctccagccccattatagtgcacctgaaggggtccacagcctgtgtcctagaagagggaagaggaaggaaggtgggtggggctggtagtatggactaaggtgctgcaggacctggggccagggacatcctgtgcagaagctccggctgcctctttgcggtggtggcctgaccgtcccacagcagcctccaccagggccctggtgctcagtggcccctctttgctggctggctgcctctgctgccccataccccacacactcatcagcctgaagttagcccctgagtgccacctgcatcgtgccataaccctgaccgcctggggcaggaagtattcaggttggctgtgtcagatgctaatgtgctgaatcaacagtcattgcagatcacgaagtgtccatcataactggaacattccatcagcttgcagtgctgtggtgtgtgagggtctggtgcagctcagcccattttccaggtgggcatctgcaaagttgagggggctccggtgggtctctctgctgtgaggagactcagaccaccccctgcctcctgggggaaatgtcagaagggcttctctgcctatgaggatctggggcagggcttggccttggcctgctggtcttggaggcgttgagcttggtctggaaggggtggaggagcgtctgggctcactgggccaggggcattgctggcagtgtggacgggaggctgcagggcgctgcctcctgtggcttagtgccctggagctagagagcagtgcttggttgagtcctgccaacagcttccagatcctcacccaggccagaacccaggccagctggggaaggcagaggctggcagggcccgtggtgggtgctggtcttgactttggtgtccactgagtcccgaggctcaggcccaggagggatgcagtccggctgagggcgaggctgtccccaggacatggagagggtgagatcccaaggccacggggggggggcagggagaacccctcctaccctggatgagtgggtgactggagagctagagaacgtggcagacccaagacctctcagtgctgagcccatggaggatgccccaggctggcgggactgggaagcagagggctggtcttaacacaggtgtgtccagtgctggaggcaagtccttgtcgtgactgtccagcgccactccatgtctctcctgtccttggatgttggggggctcagcctcttgcatgggtgtcctgctgggcgctgggccccgccactggccccctgcttgctttggggtctgagttagctcctggctccactgagcaggccgtcagctgccagcccaccacgcggatacccaggccctgttccgaggcctggaacagctgcttccgaagaaggggctgccttcagggaaatgcgtgcaccgtgcagcctgtgctgtgcccagggaggcctcttcagcgggattggcagttgctgtgccctgagaacaggcagaactgtgtgatccctgaatgtgaacctgaagttcaaaggacttggaaagctctggaatgtgttggtttttcccccccaaaatgggtcctaaggagggtaaagtgacttgtttcaagttgttggagcaaagtgggtctctcacggatctcggcctgagggtgtgggggagaaggcctggacagcccctcagggcagggtgtgttttcccaccagccgcagagagccaggatggacgttcctcggacggacggttttcctgcttgggaatgttcctgggctgtgagatccactcttctgggcaggtggttagcacctaacgtttttccctcacttccccccaaattcttaagtcctttggtcca

SEQ ID NO: 74796 - DNA, 3627 bp, Homo sapiens
tgtgttttttattcttgggttgtttgtccacagtggagtggcctccttgggacacaccctgagctgggtcctagagcagccagtcgcctgtggacagtgctgtgggaggcaggctgaccttggggtgcaggggtgggtccaggagggaggtgggggactgcgtggaaggagcagctcaggtctgacctccgcagtctgacagtgcctttccagtcctggggagttaggttctggtgcatttgttgaagaatctcagtctctgtgtggcttggaaagtgcccttgctgtgagctggtttgtgactgaaagtgaaacaaattatagccttgggaagctcatctggcttttagtttccattttggccagatatgtttgttacatagtctccctgcttggctggtaagttgtgtttgttacatagtctccctgcttggctggtcagatgtgtttgttacatacgtctccctacttgttctgcagcttctgtgtttagtatacatttgagcctccttttctccttttcctacaggggaaagccaccagggtgggtggcgagcctgggatcaccagagctgtgatgtccaaaattcaggtctctgagcggcccctgatgttcctgttggacactcctggcgtgctggctcctcggattgaaagtgtggagacaggcctgaagctggccctgtgtggaacggtgctggaccacctggtcggggaggagaccatggctgactacctgctgtacaccctcaacaaacaccagcgctttgggtacgtgcagcactacggcctgggcagtgcctgtgacaacgtagagcgcgtgctgaagagtgtggctgtgaagctggggaagacgcagaaggtgaaggtgctcacgggcacgggtaacgtgaacgttattcagcctaactatcctgcggcagcccgtgacttcctgcagactttccgccgtgggctgctgggttccgtgatgctggacctcgacgtcctgcggggccaccccccggctgagactttgccctgaacttgtccgggtagggagggccggaggcatgtggcctcccagacctcctgacctgggtggttgaggctcaagacagctcacccggtccagaagctccatgctggtcactagggtgctgtgctctctggcgccccacagcctggccagctccagggaccccagttgcagggcccaagcaggtgggagtggacaccaggcttcccagtggacgtccctgagcagctccgcatgcttggttctcccggagcttcctgctcaggcctcttgagaaatggatgctgtctcagaaggagttaaagctataacctgtaacctttaaaatctccagttaaagggcctgtttcttactggcctgtgaggtgcaccgtagtgccttgggcctgtgtgttaaagctgctctcaccagtggaacctaagaaatgagcaggttggcagctagggtttgtgttggaggctttcggtccagtgtcttgcagtcctacaacaagtgagaggcttgctgccatcagagaggtttatttcacacttacaggcacacacagacacagaccagagactcccagcagcagagcccaagcactggcttcgcccctcagtgccctggggcatgttcagggcagggttgagggggacgccctgcacatggctttgctgtgcaatgactggaaggccgcccggcatgggcagtagagacccctggcctctgagcaccttctagctcactggtagtgggattctgcattagtggggctgagagatgtgggggcccctccagccccattatagtgcacctgaaggggtccacagcctgtgtcctagaagagggaagaggaaggaaggtgggtggggctggtagtatggactaaggtgctgcaggacctggggccagggacatcctgtgcagaagctccggctgcctctttgcggtggtggcctgaccgtcccacagcagcctccaccagggccctggtgctcagtggcccctctttgctggctggctgcctctgctgccccataccccacacactcatcagcctgaagttagcccctgagtgccacctgcatcgtgccataaccctgaccgcctggggcaggaagtattcaggttggctgtgtcagatgctaatgtgctgaatcaacagtcattgcagatcacgaagtgtccatcataactggaacattccatcagcttgcagtgctgtggtgtgtgagggtctggtgcagctcagcccattttccaggtgggcatctgcaaagttgagggggctccggtgggtctctctgctgtgaggagactcagaccaccccctgcctcctgggggaaatgtcagaagggcttctctgcctatgaggatctggggcagggcttggccttggcctgctggtcttggaggcgttgagcttggtctggaaggggtggaggagcgtctgggctcactgggccaggggcattgctggcagtgtggacgggaggctgcagggcgctgcctcctgtggcttagtgccctggagctagagagcagtgcttggttgagtcctgccaacagcttccagatcctcacccaggccagaacccaggccagctggggaaggcagaggctggcagggcccgtggtgggtgctggtcttgactttggtgtccactgagtcccgaggctcaggcccaggagggatgcagtccggctgagggcgaggctgtccccaggacatggagagggtgagatcccaaggccacggggggggggcagggagaacccctcctaccctggatgagtgggtgactggagagctagagaacgtggcagacccaagacctctcagtgctgagcccatggaggatgccccaggctggcgggactgggaagcagagggctggtcttaacacaggtgtgtccagtgctggaggcaagtccttgtcgtgactgtccagcgccactccatgtctctcctgtccttggatgttggggggctcagcctcttgcatgggtgtcctgctgggcgctgggccccgccactggccccctgcttgctttggggtctgagttagctcctggctccactgagcaggccgtcagctgccagcccaccacgcggatacccaggccctgttccgaggcctggaacagctgcttccgaagaaggggctgccttcagggaaatgcgtgcaccgtgcagcctgtgctgtgcccagggaggcctcttcagcgggattggcagttgctgtgccctgagaacaggcagaactgtgtgatccctgaatgtgaacctgaagttcaaaggacttggaaagctctggaatgtgttggtttttcccccccaaaatgggtcctaaggagggtaaagtgacttgtttcaagttgttggagcaaagtgggtctctcacggatctcggcctgagggtgtgggggagaaggcctggacagcccctcagggcagggtgtgttttcccaccagccgcagagagccaggatggacgttcctcggacggacggttttcctgcttgggaatgttcctgggctgtgagatccactcttctgggcaggtggttagcacctaacgtttttccctcacttccccccaaattcttaagtcctttggtcca

SEQ ID NO: 74797 - DNA, 3035 bp, Homo sapiens
gccggaagcccgcagtgccggaggcccgcagcgccggaacctcagaggcgggtcgcagcggcgcagaggaggtcagctgcgggagcgtttccggggacggtgccgccatgagattgaccccgcgcgcgctgtgcagcgccgcccaggccgcctggcgggagaacttccccctgtgcggtcgcgacgtggcgcgctggttcccgggccacatggccaaggggctgaagaagatgcagagcagcctgaagctggtggactgtatcatcgaggtccacgatgcccggatcccactttcaggccgcaaccctctgtttcaggaaacccttgggcttaagcctcacttgctggtcctcaacaagatggacttggcggatcttacagagcagcagaaaattatgcaacacttagaaggagaaggcctaaaaaatgtcatttttaccaactgtgtaaaggatgaaaatgtcaagcagatcatcccgatggtcactgaactgattgggagaagccaccgctaccaccgaaaagagaacctggagtactgtatcatggtcattggggtccccaacgtgggcaagtcctccctcatcaactccctccggaggcagcacctcaggaaagtggacaccaggcttcccagtggacgtccctgagcagctccgcatgcttggttctcccggagcttcctgctcaggcctcttgagaaatggatgctgtctcagaaggagttaaagctataacctgtaacctttaaaatctccagttaaagggcctgtttcttactggcctgtgaggtgcaccgtagtgccttgggcctgtgtgttaaagctgctctcaccagtggaacctaagaaatgagcaggttggcagctagggtttgtgttggaggctttcggtccagtgtcttgcagtcctacaacaagtgagaggcttgctgccatcagagaggtttatttcacacttacaggcacacacagacacagaccagagactcccagcagcagagcccaagcactggcttcgcccctcagtgccctggggcatgttcagggcagggttgagggggacgccctgcacatggctttgctgtgcaatgactggaaggccgcccggcatgggcagtagagacccctggcctctgagcaccttctagctcactggtagtgggattctgcattagtggggctgagagatgtgggggcccctccagccccattatagtgcacctgaaggggtccacagcctgtgtcctagaagagggaagaggaaggaaggtgggtggggctggtagtatggactaaggtgctgcaggacctggggccagggacatcctgtgcagaagctccggctgcctctttgcggtggtggcctgaccgtcccacagcagcctccaccagggccctggtgctcagtggcccctctttgctggctggctgcctctgctgccccataccccacacactcatcagcctgaagttagcccctgagtgccacctgcatcgtgccataaccctgaccgcctggggcaggaagtattcaggttggctgtgtcagatgctaatgtgctgaatcaacagtcattgcagatcacgaagtgtccatcataactggaacattccatcagcttgcagtgctgtggtgtgtgagggtctggtgcagctcagcccattttccaggtgggcatctgcaaagttgagggggctccggtgggtctctctgctgtgaggagactcagaccaccccctgcctcctgggggaaatgtcagaagggcttctctgcctatgaggatctggggcagggcttggccttggcctgctggtcttggaggcgttgagcttggtctggaaggggtggaggagcgtctgggctcactgggccaggggcattgctggcagtgtggacgggaggctgcagggcgctgcctcctgtggcttagtgccctggagctagagagcagtgcttggttgagtcctgccaacagcttccagatcctcacccaggccagaacccaggccagctggggaaggcagaggctggcagggcccgtggtgggtgctggtcttgactttggtgtccactgagtcccgaggctcaggcccaggagggatgcagtccggctgagggcgaggctgtccccaggacatggagagggtgagatcccaaggccacggggggggggcagggagaacccctcctaccctggatgagtgggtgactggagagctagagaacgtggcagacccaagacctctcagtgctgagcccatggaggatgccccaggctggcgggactgggaagcagagggctggtcttaacacaggtgtgtccagtgctggaggcaagtccttgtcgtgactgtccagcgccactccatgtctctcctgtccttggatgttggggggctcagcctcttgcatgggtgtcctgctgggcgctgggccccgccactggccccctgcttgctttggggtctgagttagctcctggctccactgagcaggccgtcagctgccagcccaccacgcggatacccaggccctgttccgaggcctggaacagctgcttccgaagaaggggctgccttcagggaaatgcgtgcaccgtgcagcctgtgctgtgcccagggaggcctcttcagcgggattggcagttgctgtgccctgagaacaggcagaactgtgtgatccctgaatgtgaacctgaagttcaaaggacttggaaagctctggaatgtgttggtttttcccccccaaaatgggtcctaaggagggtaaagtgacttgtttcaagttgttggagcaaagtgggtctctcacggatctcggcctgagggtgtgggggagaaggcctggacagcccctcagggcagggtgtgttttcccaccagccgcagagagccaggatggacgttcctcggacggacggttttcctgcttgggaatgttcctgggctgtgagatccactcttctgggcaggtggttagcacctaacgtttttccctcacttccccccaaattcttaagtcctttggtcca

SEQ ID NO: 74798 - DNA, 1487 bp, Homo sapiens
gccggaagcccgcagtgccggaggcccgcagcgccggaacctcagaggcgggtcgcagcggcgcagaggaggtcagctgcgggagcgtttccggggacggtgccgccatgagattgaccccgcgcgcgctgtgcagcgccgcccaggccgcctggcgggagaacttccccctgtgcggtcgcgacgtggcgcgctggttcccgggccacatggccaaggggctgaagaagatgcagagcagcctgaagctggtggactgtatcatcgaggtccacgatgcccggatcccactttcaggccgcaaccctctgtttcaggaaacccttgggcttaagcctcacttgctggtcctcaacaagatggacttggcggatcttacagagcagcagaaaattatgcaacacttagaaggagaaggcctaaaaaatgtcatttttaccaactgtgtaaaggatgaaaatgtcaagcagatcatcccgatggtcactgaactgattgggagaagccaccgctaccaccgaaaagagaacctggagtactgtatcatggtcattggggtccccaacgtgggcaagtcctccctcatcaactccctccggaggcagcacctcaggaaagggaaagccaccagggtgggtggcgagcctgggatcaccagagctgtgatgtccaaaattcagaggtggagtcctcaggggccaggcccagcactctgtcaagagctctgcaggcgtctggcacctgccgacctctgtgtggcttccggctgctgaccacgcttccctcccctccactcagtgtccccgctgagcacccccggggcaggcactgcccctgcccttattccacagtcgtcatagtctttgcgccaaacctttggggaaggcacgctgttttccccatttccagatgaggaggccactgtccagggccatgcagtggtcaggacagacctgagtgtggcgccccccgccccacacctccactcccttccttgtgttctccttgggagcagaagacaagctgttgggacctgacgcttttatttattctccaaattaagtgggaattagatcctctggggaaccctggagcttggtgagagtgacgctgccatggggttgggtccctgaggccttcctcggagcattgggtgccaggggctgcccaggcttcctgagtggcccacctgggtgggaggctgccaccgcggcctgatcatgccctctgtgcccacacaggtctctgagcggcccctgatgttcctgttggacactcctggcgtgctggctcctcggattgaaagtgtggagacaggcctgaagctggccctgtgtggaacggtgctggaccacctggtcggggaggagaccatggctgactacctgctgtacaccctcaacaaacaccagcgctttgggtgagtgcagtgaatgcagggcagctggggcccctcctcctagtcacctcatttaaaaaaaaaaaac

SEQ ID NO: 74799 - DNA, 662 bp, Homo sapiens
cgtatctgaaagactctctggaacacaaccagaatcatgtttggccaaatgtcctggcaccctggtgctcggtcacagtgacaagtacaagtaactatcacacatgccctttgtcatattggtgatttccactgtttttctcccaaactgcagcttatatttgttctcttaatactgttgagcaaaaacttttaatttttataaagtcgaatttatcaatgttttctttaatggtttgtgtttattgataataaagaacactttgcctaactctgtgtcatgaagattttgtcttatattttctgctatactttttctagttttatagtttatatttagttgcataatccattttgagttagtttttgagttagtattgaggttcaggtgaatttttttcctttggggataaaaaaaaaacaaattgtgtaaaaaaaagttgtttctaaacaatttgttgacaagagaatgccttctccactgaatcatatttgcacctttgtcaatccattgggtggttgagactggtgagaggactgtcctggtgtttggacagagagacagggcatgaagtagggtggttcttatgggaaaaattaaggaagacacatttttccatgaggaataggaaatccccaagcacaattggtggtaccctctac

SEQ ID NO: 74800 - DNA, 116 bp, Homo sapiens
ccagggtgttactgattcagataacttctgagagtacagaagagtttcctgaggatggcgtggccatgctgcctgtacgtaaaacaggacttgacagtgatctggacggagagaat

SEQ ID NO: 74801 - DNA, 561 bp, Homo sapiens
gggttcaagcaattctcctgcctcagcctccccagtagctgggactacaggtgtgcaccactacacccagctaatttttgtatttttagttgagactgggtttcaccatgttggccaggatggttttgatctcttgacttcgtgatctgcctgccttggcctcccaaagtgctgggattacaggtgggagccaccatgcctggctcgaggacctatactttaaaaaatttcacacctggaaaatattttctctaaaaaagctaggatatttcttttaaaaaaccaagaatataatgaaattattgtaattcatctgtttcctttttttctgtggctattagggaatttagaactaaactgaattttctttcataggaaatatgtgaacctagaaattctgttgcatttgtttcttttttttacaaataaaaaatttaagctatatgtgaagttaaaattatttcaaatacttttagaatcaagtggaatataaattatgaatatgtaaaatagctaatggtactatacatcttccaggtcatcctggcagaaatggctttt

SEQ ID NO: 74802 - DNA, 474 bp, Homo sapiens
gagattatccaacaccctaggaggactgttaatactctcagtgataaaaacttaacagcatagaaattcttcaagttacagctgagctgacagtatattaagaaaatgttgttgaaatcagaagtccattcagggcatgcattcttagagagaagtttgtggcaaagcctttgtttgccttaggagctctcttttgagaccagagttgcagagtttggcaattaactagtctggaaggtgaggggagacagattctaagttctgaggaaggagaaagtctaatcagaaattccctcataaaatcagaaactgtgaaagacacccaaggtgatagcctcagcagacaaaatcgacaaaaagccctagcacatcactgccctactcaaaaccccctttgcattcagacaaatgtgcaaactcctccagagggagcccacccatgtgatccactacaaagcctgagtctcaactcat

SEQ ID NO: 74803 - DNA, 220 bp, Homo sapiens
gcactgcactccagcctagactacagagcgagactccatttccaaaaatacatcagaactttctatttattgaaatggtaatttgacaaagggaaaacagcattctctttttattcttaaagagttacttatggccttaaatcaaaaacatattgtcatcatttacagtgtagctccatgtagagataaccaggtctttgacttaagggaaaactgtcac

SEQ ID NO: 74804 - DNA, 325 bp, Homo sapiens
aaaataaaaacaatacaaaggagataaaaatagggggtgtttgtgaaaagggatctttagcttttatgattgaacattaactacatttgtttgaagttgatttcacaaaagtaaatctcagactaaagatgtgaagtacaaccatgactatcagttttgattgttattaggtatttttgaagactgatggtgacttaacaacagcagggactgacttcagtgaaaacaatgacaacttacccaaactgaaatatctaaatgagtattatcatttcgtagtcccttcttcaataagttttatactaaatccagttttgctagcata

SEQ ID NO: 74805 - DNA, 315 bp, Homo sapiens
gagccactgcgcccagctgcctctagacttttcttgtctatgtgccctaagcctgcttctaagacctgtgtgggtctcttcattttctttgttttcctgagggcaggtatgtagaatcctaagcttgagttgtggccaagcatagcgctgctgaaagtacagacagagcttgcatgtgcacatgaggcccttgcaatgcgggatcgaattaggatgggaagagaagcacagtaagagactgaagatctgctcttcccatgctgccaccatccagtggctaactctgaggtgtctgagaattcttaatttgaacct

SEQ ID NO: 74806 - DNA, 388 bp, Homo sapiens
gaaggaatgacaggactaagaggtctgggcatgctgaaggggtggaaaaggaaaaccaacaggcttggagcaaagaaagcaaagggtggagtgatagaaaaggcaggagctggccaggcgctgtgactcacacctgtaatcccagcactttgggaggccaaggcaggtggatcatgaggtcgagagagcgagaccatcctggtcaacatggtaaaaccccgtctctactaagaatacaaaaattagctgggcatgtggcgcatgtctgtaatcccagctactgggaaggctgaggcaggacaatcgcttgaacccaggaggcggaggttgccatgagccgagattgcactgctgcactccatcctggtgacagagcgagactccatct

SEQ ID NO: 74807 - DNA, 281 bp, Homo sapiens
aattaaataatgtcattgccttctagaaattaatcatcaaagatagtaatcatgtggagagaaataataagatacatatttagcaaatgcagaacaataaattagtaaatcatttacattatttgtttaaaagagatgaaggaagagtcctagaaattgctgattgtggagaatcattcccttctctcaattacaatagttaaatgcctcacacaataaatattcttgaataatttatctgccctcagtttattgtaatcttttcctcctctggactagaa

SEQ ID NO: 74808 - DNA, 742 bp, Homo sapiens
tgtccatgatggtgacaaaagctgctggggtcctcagtggcaaaggctactggacttctgctctcctttttccccacagagagaggtcacagccaaaacgatcccctttgttgccaagctgtgccagggtagaagatgaggtgatgcagataaaacgcttccaacacttttatatacagctgtccttggtttgggggtgctttaatgggttcctgcagcttcttcactgtactctggagtattctcagagctatttttgttggcaagtagctgttaaattcttgcttttgttggggagacaagagctgggatctcctagtgtatcatcttgttgatattacttgcctgcttttaatattttaactaatttttctgattacaaaggaattgaggttctctgaagaatatttcagatatttaggaaattttaaaataagatgaaaatattgattaatattctggtataaatccttccagacttttacaatgcatttgtaagtacatctacatttttgcaaagagaatactgtatttttcagatgatcatattgaaaatgcacttttgtcttggtgtactactattttgtgaacattttttgaggtcattatttgtctgtagcttgacttgtaatggctgcctggtattccatcatgactgactttattaaaccactttcatgccattgacatgtcagatgtttccacatttttgctattataaataattctaatactgaacact

SEQ ID NO: 74809 - DNA, 616 bp, Homo sapiens
taacatgagaagagaagagaaaacatctttgtttaaagtttattgtggactttaaatttgggccctttattactcattctaaatttttttcttctgctgtgtgtcgaaacttagtttatatcccattcacatacatttcttcaccattagtcattaagtagctggactggagctgttcaatgaagtttttgatgaccacctttacagtttatcagtcaatagtttaaccacctgatttttgtcaggattgagtagattttaaaacaaactaccctaattttataaatacttagatgtgttgctgaagggatttttaaaaattgtgtgccacatttccagatatgttttattttaagtaagcaacagaataacttttgtttgcaaataatctctgtggcatatgagaaaattacttaaatcctgttttttttttaatttaaaaaaggtgagttatgatttgcagtttcatgtgtaatattaagctagttctttcctctattgggaaagatgtaacgtgtaaccaattggttttcaataaggtattctaaatttgtatacttttctttaaaataatattttttgcttgagaaatccaagttgaagctttctgatatat

SEQ ID NO: 74810 - DNA, 357 bp, Homo sapiens
ttcctgagccagccatttcagcacacatctttgtcatttcttgtcatattgagatcaagtttggccatcctctttgcaaaatcatattcagttttcttaagtaagattgtatttttggcatgcttccattagagtcagagccagcggtggctctcagttgcaatgctcctagagaaagggaactttaattaggacacaatggggttggcctagggctcgagttagattcagtattcaaccaatgttgctgcttaagcctgtaaatgtatggtatgcaacttgtgggtactttccagttttcactgactttcttccaatattgtgtagtgtgtaaagatcggaggtattaaatccagg

SEQ ID NO: 74811 - DNA, 1370 bp, Homo sapiens
aataataatttaatgtactaccaacatatttaaacagactataatccctaaaagataaagataaaatattataaatataaatgtaaaatattatggtaaaagcactttaataattttaaatggttttaactggtttttaatcttttcactctcttttgttggattcctttatttgggagaagacaggggaagggacatttggcatttggtgttgaaaatccagtgtgaatagaaacccgagaggagacttttgattttctgatttctagttccataacatgcaaggtgaagagccacaggagatgaagatggagggataagtaggtgcctatcatgaagtgccttatatatgctatactaagaagtcagaaatgaggtgggatcctctgaagggttttaagtgaggaaatgacttcttagttctattgagaaaaagcacttcagcaattgagtgtggaagaaggggtatgaagaaagcagaccagagtctgtgagactgttagaagacaattaatggaaatcagggtgaagtatagtgagggcatgaactgaaacagtgactgtgaagctatgaggaacctaagaggaatggattcaagggatttttaggaagtagaattgataagatttgggtactgtatcggtgaaggggtggaagttggatgctgttaaagaaaaagagaagtttaggatgactctcaagatgtttttctcgagtacctgggtggtgccatttgcagaaaaaaaaaaggactattttaggagtaggaggttggtggccagccagaggtcaggaaggaattgagggtagaaacttaggaaagatataaaagattcatttgaatttcaaacacagatttaccttgctttgagaaaatatgatgtgattctgtaacctgaaagagtaaaagttaggataagtgtgttatgctgaagctgaataaggggaatgagtttcatgggagagtattgattagggaatttctactagtagaaaacaggatgtccagagtcaaatatttattcttggagacattttttcccagattttctttaatgacagctctcctccattttatatccaaaagctagattggcttattcaaatgtgttaaccctaggatgtgtctgggagtcttctgagtcactactttaaggggatatctatttgaggaggcactatggtaatgaaagcaagtcaaataccaaatgtatggattgctatttaaataaccttgcacaaaccacttaacctctttgggtttccattttctcacttttataaaataagagggttgaatcggatgatctctgataacctttttatagtaagagccctatgattttatgaccctgtgaatagcatgatt

SEQ ID NO: 74812 - DNA, 502 bp, Homo sapiens
tcagtagctgttgcctagttgttcccgaaatgtacatttctctatatcctttctattgcttatatgctttccactggcttctctaatttagaaaagacaacttgtagcatatgaacagtatcttcagaattctaaatactaattcatggcttctgaccacgatggagccagaaactaagctaacctaatctagctagttagtaaataatcctgcataacaggattcctttggttgatggttaataaatatttctctaacaaagtttatattagtctttggacaaaaaaacaatatattatgttttgcttctttaagaaactcatttgattaatgtaatctaagatgagcctttaggtaatgacggtatacttgaccttggagagactcaaatatatgaggaaatacagcaatacttcatatttatcttaattaacagatagtgcctcactgaggtaggcagcctctgatgtgggacccaatgatcccaccttgtggaattaa

SEQ ID NO: 74813 - DNA, 376 bp, Homo sapiens
cggccagagtcaccagcacctgtgggctgcttcaaagaccccacgtgggaggagaccattttctctcttctggctcttctgagggaggggtgtgtggggcagagctgccccctcccactcacagctgttgggctccctctgcccatctctgtgccgcggcctgagccctacagcctgcttcaggggctctcttgtccagggaattgcagtggggccattggagaaagaacagagcgctggccgggcgcagtggctcacgcctgtaatcccagcacactgggaggccaaggcaggtggatcgtgaggtcaggagttcgcgatcagcctggccaacatagtgaaaccccgtctctactaaaaatacaaaaattagctg

SEQ ID NO: 74814 - DNA, 966 bp, Homo sapiens
gaaaaacgaccaaatctaaaaaaacagatgcctcaaattatttaaataatagagaagctacccactaactgtatcttccaagatttatattagataagtatagtattcatttcaaatctctggtgacctattaaggtttcacattcagggatcataacaaaaaaaatacagttacctttaaaagataatccaactcctaggccagagaaagactaaagattttaacacatctgagtaaaaatatgcccatcagagggggtgggatgtttgtcaataatgaagattagaaaaacagcagtcacagagaggaaaaagttggcaggacctgcataaaggaaggcgtggtctttgtcaacagacctggtatctcatcccattaacaaggctagccccactggggtggggggtggcatctgcatcaaactctttggcctcatgacattaaccatgtgaattatataacaagctccctttgttttgtttcagttcaccaagtagccaccttattataatttgaccccttgtaaatctgtcttctgagagagaatctgctggtcatatcaagtcaagtgtttttatccttatgctagttatatttttggttgtgaatcactacctgtaccaactatatgaattgactaacaagagacaggtcttatggtgcaataacaaaaagcagggttctaagtcaataaggctaacagtcacacccaaatagttcactcttcaatgtcatgccacccagcaggctctctcagaaggcagcttgctcctgttgtcacctaaaagtacctctctgtcttcctgcaggtgtcttcaaacttccacatccattatgttgtctatcttgctttcagttggacaagaaaagctaatttataaaattgtacatctctcactctgggaaacaatcacacatagcataatgttagagagcatttctttagttgacatcatttcaggatc

SEQ ID NO: 74815 - DNA, 312 bp, Homo sapiens
aattgcacaacaaccagtataacagctgttggagtgctggatctctgagtcagatggccccctgatcacccagctgtgttagcagagcccagaacccaccacagcagcagcaggcctgcagacacctgttcaatttgctttccctccctctccccacacccactttgcattgctcctcatgatgcttcccagccagctgccttccccatcccacgaagctggagcaagagcctgcctgctgcaggcacaccacaccctctccctctggcaatggtgtagtgtgaaggaaaggaaaggagctccgcccacaaa

SEQ ID NO: 74816 - DNA, 622 bp, Homo sapiens
ctcttttgctcaagcaatctgcccacgtcggccttccaaagtgctgggattacaggcatgagccactacacgggccaagaaaccaattttccatcaagatcagcccctttggtgatgtccctgcccaccttccagggtggagataattgtgaaatctgggttatgctctgatgggatccttccttcactcaacctgctctaacatctgcccctcctcccaccagctgttggctgggcccctgtgctgctccctggtgacagcatacatggaggtagattcatatagggccaagcaggtgcaaagccagactgttctgtgggagagcaggcttttgcccacacccacaccaggattatcctaaggcaccagtgaccaatagcgttggtaccatcccaggtattatccatcagacgcttacccagggacaagcccttacctccctgcattggaaatatcagtcacaccctgaggaagatactgttaccattctttttttttaagacagagtcttgctctgtcactcaggctggagtggagtgcagtggtgtgacttcggctcactgcaacctctgcctcccggattcaagcgattctcccgtctcagcctcccaagtagctggg

SEQ ID NO: 74817 - DNA, 475 bp, Homo sapiens
ggcaacaagagcaaaaactccatctcaaaaaaaaaaaaaaaaaagtagatgcattcccattcaggaacgtggcattaagaaataggattcaacaagggaattacactgcaaataaagaggttgctgtgactgcaatgcatctggagctcaagaaaggagacggctggtatcagatggaaaactacacacctaatcaagctttggtaccccaatccagtttgactgactactgctcttcactgtctctctcatgccagggacaagggcttggcacaaataataattataactgaagcagagtatatttaattacgcaatcttagataataaaatttaattccacataatttatacattaaattggagcatttgaaggatttctggcaaaggaaaattggaatggataagtaggattcatttatacatatcattttatcatcaattaataatgaatgtacttaatgtggtaggattt

SEQ ID NO: 74818 - DNA, 498 bp, Homo sapiens
attagtactctaattgaggacctagggtaaagtactatttagtcagagggaaaaaaaaaacccacacaaacacattgttttattctagcagtttgctctaatatacaggtgtctagtcttttggcttccctgggccacattggaagaagaattgtcttgggccacacataaaatacactaacactaatgatagctgatgagctaaagaaaaaatgtcaccaaaaaaatctcataatgttttaagaaagtttacaaatttgttttgggctgcattcaaagctgtcctgggccacatgcagcctgcgggctgtgggttgaacaagcttgctctaatataaatggacaaatggtggtattgaagataaaaagtatagtagaggctgggtgcggtggctcatgctggtaatcccagcattttgggaggctgaagcaggaggatcccttgagcccaggagctgaagaccagcatgggcaatgtaaggagactttatttaaatt

SEQ ID NO: 74819 - DNA, 463 bp, Homo sapiens
atccctgagagctaacaagttgtgtgaccttgggaaaattacttaaccttttctcaaccccagtgttcacatctgtaaaatggggatagcagtagtacctatctctcaggatttctgtgaggattaaatgaagaaacacaggcaaatcacttactacagggttatttgcttagctgttgtcatcttcatcatactatctatacaacgtaactttttacaagtggaactagaccagtagtcacccattttacaatcagatattaacctccatccatagtagtgaacttgcatgtctttgaaaggtccactgtggtcatccatcctgtgaggtctctgcataccaatatgctgcttaggtgaggccagatgtgcctactaggaactgtggttacttgaaccaaacgttggcagatgtccaaagtgcaattcttcatattctaaccagtctctgaaccacccagag

SEQ ID NO: 74820 - DNA, 337 bp, Homo sapiens
tcatatctgctagggagctcactgcctgccacacttacgcaaagaagcaaacatgccaagatctcagcccgaccattttcactgggtcgtggtctcgtttctcccagaagagctgagtgcgagggaaaggcttctctgtagtgatttctgcccggagtcaccaaactcaaagccaggttgacgggtgcccataacaacgtccctccctccttgctctgtcctggggctcactttgtacttcttttcagtgaagacaggaaaagctccaggccgtggttctcaaagtgtggtccctggaccagcagcaacatcacctaggagcctgttaggaaggcac

SEQ ID NO: 74821 - DNA, 353 bp, Homo sapiens
agcctcccaaagggctgaaattagagggatgagccactctgcctggctagcattttataatcaatatagaatccttcggagagcaacttgttaataactattccaaaaaaatgcacatatactctgacttatcagttctagaatgtgccctaagaaatcacatgtgcaatgacatatatgaaagatattcatgtattgtttgtaaaggcaaaagactgaagtaacctaaaagttcatgaaaggggagtatacttaaataagttatagtacacccaatataatggaataccgtacagaggtttaaaaagaacagggcaattcaacctgtgctaatatggaatgacttctaaaat

SEQ ID NO: 74822 - DNA, 327 bp, Homo sapiens
tcaaaatgactagaagagtagaattggaatgtttctaacacaaagaaatgataaatgcttgaggtgatggatatccaattatcttcatttgatcattacacattatatggttgtatcaaaatttcacatgtcccccataaatatgtaaactattatgtagccataaagatttaaaaagaccactttgggaggcagaggggggtggatcacttgagcccaggcattcaagactagcctgagcaacatggcaaaaccctgtctctacaaaatacaaaaaaaattaggcaggcatggtgatgtgcgcctttggttctagctcctgggcag

SEQ ID NO: 74823 - DNA, 889 bp, Homo sapiens
caaaaagtggtagcagagctgcttccagatgacatgaggctaggcattgactacagtagtctccagtggaagtcagtggtgtgtatatctgttattggctttttggtgggtctctcatatttgttcagatttatgcattaggctagaagctgacttttgggaaagaaaatgcaggttctgcaaatactggctgcaccagttctgatgaagcatccatttcttggcatacttagttctgatcaaaaggaatatttagatattgagtaatttttagaagataccagcctagaaaaggaatcgtaaaagatacaaagtcttgtggacgcatacataaagttgaagagaccaactcagtcctgaaggaggaagtaatttcttctgtaaaagaagtaaataaggagagatctaaacccttaagactagaggggatgatgactgaaatagtaagaatgattcatttaccagaagatgatgtaggaaccatcacattgcaagattttccaagcactgccatggctggggctcccttctgtcattctccaggggtctgaaaatagaacccttttcttctattcagactgtgtctgttctctacctcccactccaatatgaggttcattcttgtccgtgcttctaaaaagcacttaagaaccctcctccataggctggagtatttttgttcaacgtcacctttcaaaaacaaatctgagtttcttcaaggctaattcaaatttcaaatgaaccaactgttggacttccagaaattttggacttaaaaaaaatggtctgtcttcaaaagaaattttaatctcattcattatcatcttaagaactgaagacacttgagaatccaatttcaaaataaaagcttgatgaaacttagttctca

SEQ ID NO: 74824 - DNA, 683 bp, Homo sapiens
gggaagattcagtggctggtccagagacagcattcctgagtgctatgggcaggcctgaatcaggggtcccatactgcctgcagacctgttgtcttcaacaccaaggaactgcctgtgagactgaccacagatacccaagcactctgaagtgaatatgtgaaacccgaagaaaagggtaaaatttctaaagcaatgaacatattttaagactttctcaatcttcctctttggagacactctttgtggaatatgaagtgatgagcattcctgaggtttcagggggcagacccagtccctcacatccccaccctagtgcctgagtccacgatccagtatctcctaaccaacagctttattattatattgtcattggaaggagtctttgaaacaactgttgacttgaataatcaatcaattcttgtcagaggtgttttgcaacctctccacaagaatcagaaagtaattccaatcaccttaaatcatgccatttcacccagagacctttactgtgaattagggaaggggggagatcagaagcagagagataaaataccttttgcatattttaaccataatcagtcactttatttcatgactgaatggtgtttgctatcatttcattatagtgaatcatctccaagagaagattccaaattgaagcaattccttggaaacaaacaaac

SEQ ID NO: 74825 - DNA, 4292 bp, Homo sapiens
tgctggggaccgcctacgggctctgccataggcggtgcaggcggacggggcgcggcgggggacacggcggccgccgcggggctcgatcgggcaacggcggcgacggcggcagcgacggatcctcctcctcccttattcccttgctcctctttcttccttttcttttcctttccggccgggcctcgtccactttccctaacggcggcctcgatcctacgtaaaggcatgacttcctggcaccacagggaaaatcgggtgcaagcccagaaactatttccccaccaccacttgttgaaaaactgatttgaaggcatctccggggttgaacaaacggaaagtgccaggatttgatgcgtctctggtttcgctctggagaccattccctgctaagtatcaagacgaaaaaaactggaaactaatccgaaccatatttatttagagtcagaatggagcgatttgtagtaacagcaccacctgctcgaaaccgttctaagactgctttgtatgtgactcccctggatcgagtcactgagtttggaggtgagctgcatgaagatggaggaaaactcttctgcacttcttgcaatgtggttctgaatcatgttcgcaagtctgccattagtgaccacctcaagtcaaagactcataccaagaggaaggcagaatttgaagagcagaatgtgagaaagaagcagaggcccctaactgcatctcttcagtgcaacagtactgcgcaaacagagaaagtcagtgttatccaggactttgtgaaaatgtgcctggaagccaacatcccacttgagaaggctgatcacccagcagtccgtgctttcctatctcgccatgtgaagaatggaggctccatacctaagtcagaccagctacggagggcatatcttcctgatggatatgagaatgagaatcaactcctcaactcacaagattgttgactaggaggttaccaccattgtgatcaagataaatgtggagtattaaagttatgtgttgattgtgtggttcatttttgtatttatttcatttaaaatcatgtgacgcagaatagttttgcaatgtgtatatagttgcaggcaaaaaaaaaaccacctcactgcaaaacttattgttaattttagtcaccaatggtataaagcaaaacctaggtttagagtgtgctaggatacctgaaacctgatggttatctttaaaattaatggtttttctcctgaaatgtttgtgcatggaagaactgccctgcttttttaccctgttgccatgtatgattattccttgtgagattacttaattacttggattgaagactagcctattgaagctgctgccaggcaacaccacttaacagtaacttaaaggaattattttctttagaggatcctcttcaaaaaggaagggatagtggaaaactgttcttatatcttcagatccctagcagaaatgactgtttatttcaaactatgttttacttgtatatgatgtagtcaccttaactatctttcaattccatacttcccccgcccccattttaaaggcttattgttgtattttgtagcagcttcaagtgaccaaaagactaaaatctttcaacgtcaatgccaaaagccaaggggaattttgcagtgataggattttagtctcttactatgaatactaatttcgaaccatagctttcattttaagcatcatcttgaatttctaaacttttttctatgtcttggtgttaaaagatttcaagattggcatttttacttaaacagacattttatggttgagttttctctttattatagagaattagtaatttttttttggctgacagatcagataaaattactttctattcattaatttttctctacaactttatgagtttatttaggtgaatagtctagactagaaacaagtttactttatctgctttgcctctggtggtacaaggtttttaacatggattgtaaacaattgtctagaaattctggcaggttttttgtattggagatctggcagtatcctgcataactttgggtgaggaaattgttctcttaaagatcagccatgttcaggaaatgatctctgtttgaacctcactatcctgtaaggttatccaagtagcttagcccagctaagttctatcagagacccaaattatattttttaaaaatttaacagctggaaacttggactagagctttaataaaaaatcttaaattctttgaaattcaagttaaaaatacttatatatttctattacaaagcagtgacaaatgatgccctgtgtgacttggagttatctttgacttttaccacaaatcttcatttataaaagaaaaagccaaagtgaaaaaaagttagattgtgtatttttcagtaacagctttccatgtcttaagatttttttacagacttaagtttctaattcaggttgtcaaactggccatttgacttcagagatttgttttcattaaaaaataagcctgccgccaaaataaatcacttatcaaaatgtgaactgttttcctcatgttcagttatgttaaagtagtatgataaatgcatgcctagagtagtgctctcgttgatgaagcacatgtatgaggagaccagcagcaaaacataaccatatgtgttttgcgtttacttcctctagaaaagaatttgcaggcaaccatgtttaatttgaactatctaagatggtagattttagaagctaggaataattgagttttatagcactattttcagaatacaaaaagatacacaatcattctgttttttgaaattccatgtgattcaaactgttccctattatttgggtattaatttgcactaatagcaaaatgtaatggcagatcagctttgagagtggtcctaagcagtaaactggatgatgttgcattagaaaaacatcaataattcatatttaagttttagtagttactactgatttgataatcacttaaattttatatatcttaatgtattttttcagactcctaattaattcccacattcactgtaactaggggcatagtccattctgttaggattatatcctctccttagaaatgttttccatcctgttgtggggatttggtattaatgtttcttcattgattatggaacttttgttccctgaagctagttaactgtgtctaaagttaaataaatacagcagaatgattgttttagcctgctcgaactgatacaaatccctgaaaccatgattggcatatgttagataacaaatgaggatgtctaagaggcatatgctgctttggaggtgtagtgaacgtgtgtacagaagttttcaatcttaactatatagtgttagtgtgatgctatactattggaaaaatagcagcttttttctattttataagttgtatgcataaacataagatttgtaatgtttcatttataaactgccttcttcaacacatgttaatagtgttttctcaaagtattgatagtatgtcttccagaatttcacaatatgcttacagtaaatatttcctagcttgttgaaatgttcaattctttgttggctttcttcttgattctgtgggggtgtataacaagcctgaaggacattgtaatcatttcttacaaggtgaaaattaagaaagattgtgtatgagagcctatatagttgttttatccattatcatctttgattaagactttaaaaaaatgctatttccagttaatgcatttggccctattgaattttcagggaccagaaaacattaaaaagttctgcatcttataatggtaaccaattaagcttgagattgttctgaaagtatcaattgctttaaaactgttgtaagtacagttggcaagatctccaagctgaaacttacacgttaaaacttttgcctgtaagaatttgcacatgaatgttaatggaaaacacaaaacttaagatggcccaaaacaaaagccacaaacagttcatcatttggtgcttagtctttgtaagggctctctgtggtttgacttactccagctaccgttaaatgagggcaaatcaccttaaaacatgttcatttgattcataacaaggaaaattgggtctatgattttttgccaatcttagcctaaaagaaattgctttagcttctggtcagcactgattaaaatgtgaatagtgaagtggctatcctaaactggtttatctccacccacactatcatagatttcttaggtaaatacaattcttatctagtggtattctacttgtattcagaatactgtattaaaattttactatttca

SEQ ID NO: 74826 - DNA, 374 bp, Homo sapiens
tgctggggaccgcctacgggctctgccataggcggtgcaggcggacggggcgcggcgggggacacggcggccgccgcggggctcgatcgggcaacggcggcgacggcggcagcgacggatcctcctcctcccttattcccttgctcctctttcttccttttcttttcctttccggccgggcctcgtccactttccctaacggcggcctcgatcctacggtaccaaggagctagggaggccgagggtgggcccgaccgttggtgcgggctctgggcccggggccttccgtccagaagctggaaccgggggcggggctggggcacagttgtcggcgggaggaagagggaggagacgggaagcttgacagcggccgc

SEQ ID NO: 74827 - DNA, 4408 bp, Homo sapiens
tgctggggaccgcctacgggctctgccataggcggtgcaggcggacggggcgcggcgggggacacggcggccgccgcggggctcgatcgggcaacggcggcgacggcggcagcgacggatcctcctcctcccttattcccttgctcctctttcttccttttcttttcctttccggccgggcctcgtccactttccctaacggcggcctcgatcctacgtaaaggcatgacttcctggcaccacagggaaaatcgggtgcaagcccagaaactatttccccaccaccacttgttgaaaaactgatttgaaggcatctccggggttgaacaaacggaaagtgccaggatttgatgcgtctctggtttcgctctggagaccattccctgctaagtatcaagacgaaaaaaactggaaactaatccgaaccatatttatttagagtcagaatggagcgatttgtagtaacagcaccacctgctcgaaaccgttctaagactgctttgtatgtgactcccctggatcgagtcactgagtttggaggtgagctgcatgaagatggaggaaaactcttctgcacttcttgcaatgtggttctgaatcatgttcgcaagtctgccattagtgaccacctcaagtcaaagactcataccaagaggaaggcagaatttgaagagcagaatgtgagaaagaagcagaggcccctaactgcatctcttcagtgcaacagtactgcgcaaacagagaaagtcagtgttatccaggactttgtgaaaatgtgcctggaagccaacatcccacttgagaaggctgatcacccagcagtccgtgctttcctatctcgccatgtgaagaatggaggctccatacctaagtcagaccagctacggagggcatatcttcctgatggatatgagaatgagaatcaactcctcaactcacaagattgttgactaggaggttaccaccattgtgatcaagataaatgtggagtattaaagttatgtgttgattgtgtggttcatttttgtatttatttcatttaaaatcatgtgacgcagaatagttttgcaatgtgtatatagttgcaggcaaaaaaaaaaccacctcactgcaaaacttattgttaattttagtcaccaatggtataaagcaaaacctaggtttagagtgtgctaggatacctgaaacctgatggttatctttaaaattaatggtttttctcctgaaatgtttgtgcatggaagaactgccctgcttttttaccctgttgccatgtatgattattccttgtgagattacttaattacttggattgaagactagcctattgaagctgctgccaggcaacaccacttaacagtaacttaaaggaattattttctttagaggatcctcttcaaaaaggaagggatagtggaaaactgttcttatatcttcagatccctagcagaaatgactgtttatttcaaactatgttttacttgtatatgatgtagtcaccttaactatctttcaattccatacttcccccgcccccattttaaaggcttattgttgtattttgtagcagcttcaagtgaccaaaagactaaaatctttcaacgtcaatgccaaaagccaaggggaattttgcagtgataggattttagtctcttactatgaatactaatttcgaaccatagctttcattttaagcatcatcttgaatttctaaacttttttctatgtcttggtgttaaaagatttcaagattggcatttttacttaaacagacattttatggttgagttttctctttattatagagaattagtaatttttttttggctgacagatcagataaaattactttctattcattaatttttctctacaactttatgagtttatttaggtgaatagtctagactagaaacaagtttactttatctgctttgcctctggtggtacaaggtttttaacatggattgtaaacaattgtctagaaattctggcaggttttttgtattggagatctggcagtatcctgcataactttgggtgaggaaattgttctcttaaagatcagccatgttcaggaaatgatctctgtttgaacctcactatcctgtaaggttatccaagtagcttagcccagctaagttctatcagagacccaaattatattttttaaaaatttaacagctggaaacttggactagagctttaataaaaaatcttaaattctttgaaattcaagttaaaaatacttatatatttctattacaaagcagtgacaaatgatgccctgtgtgacttggagttatctttgacttttaccacaaatcttcatttataaaagaaaaagccaaagtgaaaaaaagttagattgtgtatttttcagtaacagctttccatgtcttaagatttttttacagacttaagtttctaattcaggttgtcaaactggccatttgacttcagagatttgttttcattaaaaaataagcctgccgccaaaataaatcacttatcaaaatgtgaactgttttcctcatgttcagttatgttaaagtagtatgataaatgcatgcctagagtagtgctctcgttgatgaagcacatgtatgaggagaccagcagcaaaacataaccatatgtgttttgcgtttacttcctctagaaaagaatttgcaggcaaccatgtttaatttgaactatctaagatggtagattttagaagctaggaataattgagttttatagcactattttcagaatacaaaaagatacacaatcattctgttttttgaaattccatgtgattcaaactgttccctattatttgggtattaatttgcactaatagcaaaatgtaatggcagatcagctttgagagtggtcctaagcagtaaactggatgatgttgcattagaaaaacatcaataattcatatttaagttttagtagttactactgatttgataatcacttaaattttatatatcttaatgtattttttcagactcctaattaattcccacattcactgtaactaggggcatagtccattctgttaggattatatcctctccttagaaatgttttccatcctgttgtggggatttggtattaatgtttcttcattgattatggaacttttgttccctgaagctagttaactgtgtctaaagttaaataaatacagcagaatgattgttttagcctgctcgaactgatacaaatccctgaaaccatgattggcatatgttagataacaaatgaggatgtctaagaggcatatgctgctttggaggtgtagtgaacgtgtgtacagaagttttcaatcttaactatatagtgttagtgtgatgctatactattggaaaaatagcagcttttttctattttataagttgtatgcataaacataagatttgtaatgtttcatttataaactgccttcttcaacacatgttaatagtgttttctcaaagtattgatagtatgtcttccagaatttcacaatatgcttacagtaaatatttcctagcttgttgaaatgttcaattctttgttggctttcttcttgattctgtgggggtgtataacaagcctgaaggacattgtaatcatttcttacaaggtgaaaattaagaaagattgtgtatgagagcctatatagttgttttatccattatcatctttgattaagactttaaaaaaatgctatttccagttaatgcatttggccctattgaattttcagggaccagaaaacattaaaaagttctgcatcttataatggtaaccaattaagcttgagattgttctgaaagtatcaattgctttaaaactgttgtaagtacagttggcaagatctccaagctgaaacttacacgttaaaacttttgcctgtaagaatttgcacatgaatgttaatggaaaacacaaaacttaagatggcccaaaacaaaagccacaaacagttcatcatttggtgcttagtctttgtaagggctctctgtggtttgacttactccagctaccgttaaatgagggcaaatcaccttaaaacatgttcatttgattcataacaaggaaaattgggtctatgattttttgccaatcttagcctaaaagaaattgctttagcttctggtcagcactgattaaaatgtgaatagtgaagtggctatcctaaactggtttatctccacccacactatcatagatttcttaggtaaatacaattcttatctagtggtattctacttgtattcagaatactgtattaaaattttactatttcatttttgtattctgtgcttattttttttgctcacgcatgtatgcttagtataaatgtgtcacttctaaagttttgtctctgacttttagaaataaatttcagaaaaattgtttcaaa

SEQ ID NO: 74828 - DNA, 4354 bp, Homo sapiens
tgctggggaccgcctacgggctctgccataggcggtgcaggcggacggggcgcggcgggggacacggcggccgccgcggggctcgatcgggcaacggcggcgacggcggcagcgacggatcctcctcctcccttattcccttgctcctctttcttccttttcttttcctttccggccgggcctcgtccactttccctaacggcggcctcgatcctacgtaaaggcatgacttcctggcaccacagggaaaatcgggtgcaagcccagaaactatttccccaccaccacttgttgaaaaactgatttgaaggcatctccggggttgaacaaacggaaagtgccaggatttgatgcgtctctggtttcgctctggagaccattccctgctaagtatcaagacgaaaaaaactggaaactaatccgaaccatatttatttagagtcagaatggagcgatttgtagtaacagcaccacctgctcgaaaccgttctaagactgctttgtatgtgactcccctggatcgagtcactgagtttggaggtgagctgcatgaagatggaggaaaactcttctgcacttcttgcaatgtggttctgaatcatgttcgcaagtctgccattagtgaccacctcaagtcaaagactcataccaagaggaaggcagaatttgaagagcagaatgtgagaaagaagcagaggcccctaactgcatctcttcagtgcaacagtactgcgcaaacagagaaagtcagtgttatccaggactttgtgaaaatgtgcctggaagccaacatcccacttgagaaggctgatcacccagcagtccgtgctttcctatctcgccatgtgaagaatggaggctccatacctaagtcagaccagctacggagggcatatcttcctgatggatatgagaatgagaatcaactcctcaactcacaagattgttgactaggaggttaccaccattgtgatcaagataaatgtggagtattaaagttatgtgttgattgtgtggttcatttttgtatttatttcatttaaaatcatgtgacgcagaatagttttgcaatgtgtatatagttgcaggcaaaaaaaaaaccacctcactgcaaaacttattgttaattttagtcaccaatggtataaagcaaaacctaggtttagagtgtgctaggatacctgaaacctgatggttatctttaaaattaatggtttttctcctgaaatgtttgtgcatggaagaactgccctgcttttttaccctgttgccatgtatgattattccttgtgagattacttaattacttggattgaagactagcctattgaagctgctgccaggcaacaccacttaacagtaacttaaaggaattattttctttagaggatcctcttcaaaaaggaagggatagtggaaaactgttcttatatcttcagatccctagcagaaatgactgtttatttcaaactatgttttacttgtatatgatgtagtcaccttaactatctttcaattccatacttcccccgcccccattttaaaggcttattgttgtattttgtagcagcttcaagtgaccaaaagactaaaatctttcaacgtcaatgccaaaagccaaggggaattttgcagtgataggattttagtctcttactatgaatactaatttcgaaccatagctttcattttaagcatcatcttgaatttctaaacttttttctatgtcttggtgttaaaagatttcaagattggcatttttacttaaacagacattttatggttgagttttctctttattatagagaattagtaatttttttttggctgacagatcagataaaattactttctattcattaatttttctctacaactttatgagtttatttaggtgaatagtctagactagaaacaagtttactttatctgctttgcctctggtggtacaaggtttttaacatggattgtaaacaattgtctagaaattctggcaggttttttgtattggagatctggcagtatcctgcataactttgggtgaggaaattgttctcttaaagatcagccatgttcaggaaatgatctctgtttgaacctcactatcctgtaaggttatccaagtagcttagcccagctaagttctatcagagacccaaattatattttttaaaaatttaacagctggaaacttggactagagctttaataaaaaatcttaaattctttgaaattcaagttaaaaatacttatatatttctattacaaagcagtgacaaatgatgccctgtgtgacttggagttatctttgacttttaccacaaatcttcatttataaaagaaaaagccaaagtgaaaaaaagttagattgtgtatttttcagtaacagctttccatgtcttaagatttttttacagacttaagtttctaattcaggttgtcaaactggccatttgacttcagagatttgttttcattaaaaaataagcctgccgccaaaataaatcacttatcaaaatgtgaactgttttcctcatgttcagttatgttaaagtagtatgataaatgcatgcctagagtagtgctctcgttgatgaagcacatgtatgaggagaccagcagcaaaacataaccatatgtgttttgcgtttacttcctctagaaaagaatttgcaggcaaccatgtttaatttgaactatctaagatggtagattttagaagctaggaataattgagttttatagcactattttcagaatacaaaaagatacacaatcattctgttttttgaaattccatgtgattcaaactgttccctattatttgggtattaatttgcactaatagcaaaatgtaatggcagatcagctttgagagtggtcctaagcagtaaactggatgatgttgcattagaaattaaattttatatatcttaatgtattttttcagactcctaattaattcccacattcactgtaactaggggcatagtccattctgttaggattatatcctctccttagaaatgttttccatcctgttgtggggatttggtattaatgtttcttcattgattatggaacttttgttccctgaagctagttaactgtgtctaaagttaaataaatacagcagaatgattgttttagcctgctcgaactgatacaaatccctgaaaccatgattggcatatgttagataacaaatgaggatgtctaagaggcatatgctgctttggaggtgtagtgaacgtgtgtacagaagttttcaatcttaactatatagtgttagtgtgatgctatactattggaaaaatagcagcttttttctattttataagttgtatgcataaacataagatttgtaatgtttcatttataaactgccttcttcaacacatgttaatagtgttttctcaaagtattgatagtatgtcttccagaatttcacaatatgcttacagtaaatatttcctagcttgttgaaatgttcaattctttgttggctttcttcttgattctgtgggggtgtataacaagcctgaaggacattgtaatcatttcttacaaggtgaaaattaagaaagattgtgtatgagagcctatatagttgttttatccattatcatctttgattaagactttaaaaaaatgctatttccagttaatgcatttggccctattgaattttcagggaccagaaaacattaaaaagttctgcatcttataatggtaaccaattaagcttgagattgttctgaaagtatcaattgctttaaaactgttgtaagtacagttggcaagatctccaagctgaaacttacacgttaaaacttttgcctgtaagaatttgcacatgaatgttaatggaaaacacaaaacttaagatggcccaaaacaaaagccacaaacagttcatcatttggtgcttagtctttgtaagggctctctgtggtttgacttactccagctaccgttaaatgagggcaaatcaccttaaaacatgttcatttgattcataacaaggaaaattgggtctatgattttttgccaatcttagcctaaaagaaattgctttagcttctggtcagcactgattaaaatgtgaatagtgaagtggctatcctaaactggtttatctccacccacactatcatagatttcttaggtaaatacaattcttatctagtggtattctacttgtattcagaatactgtattaaaattttactatttcatttttgtattctgtgcttattttttttgctcacgcatgtatgcttagtataaatgtgtcacttctaaagttttgtctctgacttttagaaataaatttcagaaaaattgtttcaaa

SEQ ID NO: 74829 - DNA, 4510 bp, Homo sapiens
tgctggggaccgcctacgggctctgccataggcggtgcaggcggacggggcgcggcgggggacacggcggccgccgcggggctcgatcgggcaacggcggcgacggcggcagcgacggatcctcctcctcccttattcccttgctcctctttcttccttttcttttcctttccggccgggcctcgtccactttccctaacggcggcctcgatcctacgtaaaggcatgacttcctggcaccacagggaaaatcgggtgcaagcccagaaactatttccccaccaccacttgttgaaaaactgatttgaaggcatctccggggttgaacaaacggaaagtgccaggatttgatgcgtctctggtttcgctctggagaccattccctgctaagtatcaagacgaaaaaaactggaaactaatccgaatttctgtggaatgtttaatcttctggatccatgactgtctgatacgttggcaatttaaagtccttttgaaagagagttcatgttacccagctattctctaaaccatatttatttagagtcagaatggagcgatttgtagtaacagcaccacctgctcgaaaccgttctaagactgctttgtatgtgactcccctggatcgagtcactgagtttggaggtgagctgcatgaagatggaggaaaactcttctgcacttcttgcaatgtggttctgaatcatgttcgcaagtctgccattagtgaccacctcaagtcaaagactcataccaagaggaaggcagaatttgaagagcagaatgtgagaaagaagcagaggcccctaactgcatctcttcagtgcaacagtactgcgcaaacagagaaagtcagtgttatccaggactttgtgaaaatgtgcctggaagccaacatcccacttgagaaggctgatcacccagcagtccgtgctttcctatctcgccatgtgaagaatggaggctccatacctaagtcagaccagctacggagggcatatcttcctgatggatatgagaatgagaatcaactcctcaactcacaagattgttgactaggaggttaccaccattgtgatcaagataaatgtggagtattaaagttatgtgttgattgtgtggttcatttttgtatttatttcatttaaaatcatgtgacgcagaatagttttgcaatgtgtatatagttgcaggcaaaaaaaaaaccacctcactgcaaaacttattgttaattttagtcaccaatggtataaagcaaaacctaggtttagagtgtgctaggatacctgaaacctgatggttatctttaaaattaatggtttttctcctgaaatgtttgtgcatggaagaactgccctgcttttttaccctgttgccatgtatgattattccttgtgagattacttaattacttggattgaagactagcctattgaagctgctgccaggcaacaccacttaacagtaacttaaaggaattattttctttagaggatcctcttcaaaaaggaagggatagtggaaaactgttcttatatcttcagatccctagcagaaatgactgtttatttcaaactatgttttacttgtatatgatgtagtcaccttaactatctttcaattccatacttcccccgcccccattttaaaggcttattgttgtattttgtagcagcttcaagtgaccaaaagactaaaatctttcaacgtcaatgccaaaagccaaggggaattttgcagtgataggattttagtctcttactatgaatactaatttcgaaccatagctttcattttaagcatcatcttgaatttctaaacttttttctatgtcttggtgttaaaagatttcaagattggcatttttacttaaacagacattttatggttgagttttctctttattatagagaattagtaatttttttttggctgacagatcagataaaattactttctattcattaatttttctctacaactttatgagtttatttaggtgaatagtctagactagaaacaagtttactttatctgctttgcctctggtggtacaaggtttttaacatggattgtaaacaattgtctagaaattctggcaggttttttgtattggagatctggcagtatcctgcataactttgggtgaggaaattgttctcttaaagatcagccatgttcaggaaatgatctctgtttgaacctcactatcctgtaaggttatccaagtagcttagcccagctaagttctatcagagacccaaattatattttttaaaaatttaacagctggaaacttggactagagctttaataaaaaatcttaaattctttgaaattcaagttaaaaatacttatatatttctattacaaagcagtgacaaatgatgccctgtgtgacttggagttatctttgacttttaccacaaatcttcatttataaaagaaaaagccaaagtgaaaaaaagttagattgtgtatttttcagtaacagctttccatgtcttaagatttttttacagacttaagtttctaattcaggttgtcaaactggccatttgacttcagagatttgttttcattaaaaaataagcctgccgccaaaataaatcacttatcaaaatgtgaactgttttcctcatgttcagttatgttaaagtagtatgataaatgcatgcctagagtagtgctctcgttgatgaagcacatgtatgaggagaccagcagcaaaacataaccatatgtgttttgcgtttacttcctctagaaaagaatttgcaggcaaccatgtttaatttgaactatctaagatggtagattttagaagctaggaataattgagttttatagcactattttcagaatacaaaaagatacacaatcattctgttttttgaaattccatgtgattcaaactgttccctattatttgggtattaatttgcactaatagcaaaatgtaatggcagatcagctttgagagtggtcctaagcagtaaactggatgatgttgcattagaaaaacatcaataattcatatttaagttttagtagttactactgatttgataatcacttaaattttatatatcttaatgtattttttcagactcctaattaattcccacattcactgtaactaggggcatagtccattctgttaggattatatcctctccttagaaatgttttccatcctgttgtggggatttggtattaatgtttcttcattgattatggaacttttgttccctgaagctagttaactgtgtctaaagttaaataaatacagcagaatgattgttttagcctgctcgaactgatacaaatccctgaaaccatgattggcatatgttagataacaaatgaggatgtctaagaggcatatgctgctttggaggtgtagtgaacgtgtgtacagaagttttcaatcttaactatatagtgttagtgtgatgctatactattggaaaaatagcagcttttttctattttataagttgtatgcataaacataagatttgtaatgtttcatttataaactgccttcttcaacacatgttaatagtgttttctcaaagtattgatagtatgtcttccagaatttcacaatatgcttacagtaaatatttcctagcttgttgaaatgttcaattctttgttggctttcttcttgattctgtgggggtgtataacaagcctgaaggacattgtaatcatttcttacaaggtgaaaattaagaaagattgtgtatgagagcctatatagttgttttatccattatcatctttgattaagactttaaaaaaatgctatttccagttaatgcatttggccctattgaattttcagggaccagaaaacattaaaaagttctgcatcttataatggtaaccaattaagcttgagattgttctgaaagtatcaattgctttaaaactgttgtaagtacagttggcaagatctccaagctgaaacttacacgttaaaacttttgcctgtaagaatttgcacatgaatgttaatggaaaacacaaaacttaagatggcccaaaacaaaagccacaaacagttcatcatttggtgcttagtctttgtaagggctctctgtggtttgacttactccagctaccgttaaatgagggcaaatcaccttaaaacatgttcatttgattcataacaaggaaaattgggtctatgattttttgccaatcttagcctaaaagaaattgctttagcttctggtcagcactgattaaaatgtgaatagtgaagtggctatcctaaactggtttatctccacccacactatcatagatttcttaggtaaatacaattcttatctagtggtattctacttgtattcagaatactgtattaaaattttactatttcatttttgtattctgtgcttattttttttgctcacgcatgtatgcttagtataaatgtgtcacttctaaagttttgtctctgacttttagaaataaatttcagaaaaattgtttcaaa

SEQ ID NO: 74830 - DNA, 5236 bp, Homo sapiens
tgctggggaccgcctacgggctctgccataggcggtgcaggcggacggggcgcggcgggggacacggcggccgccgcggggctcgatcgggcaacggcggcgacggcggcagcgacggatcctcctcctcccttattcccttgctcctctttcttccttttcttttcctttccggccgggcctcgtccactttccctaacggcggcctcgatcctacgtaaaggcatgacttcctggcaccacagggaaaatcgggtgcaagcccagaaactatttccccaccaccacttgttgaaaaactgatttgaaggcatctccggggttgaacaaacggaaagtgccaggatttgatgcgtctctggtttcgctctggagaccattccctgctaagtatcaagacgaaaaaaactggaaactaatccggtaaacatttaaacttgaaaacttatgatgagttttcttttgatctagcaaacgatatgctttttctcttttgttggctaattcctgcactttttaatttcttcatttgttgaaaatgttttcttctattgaaaacacttttgttcttcgggtatgtaaactcgagcatcctctactgggtggaaatttgcctctgcagtaacacaaacagacttcttgaaattacgaaaacattggaaagtataggcctttcacattagcacaaatgattgagcattttatgctataaagaattacatgcttattgtttttgaaatccaaatatttaaagatacaagactttttacatagaaagtaagacttaacgcattacggggcacaaatatttaatatctaccacaactaggttagaaccattaaccatatttggtatagttacctcatatttaccacaactaggttatatttggtatatttaccacaactaggttagaaccattaatcataattggtactgatttgtgagggagtgtaaaacacataccatttacttaaagtataaacgtgtaatggtaagtactagataggaatcataactgtcttctctgccgttgcaaacctgtagcctaacacaatatttggcaaatgagagctgtgcacttaaaaaaaaaaaaaaagtggaaaaaataaaatttattaaaacctagactttatcgtacttttcagaatttctgtggaatgtttaatcttctggatccatgactgtctgatacgttggcaatttaaagtccttttgaaagagagttcatgttacccagctattctctaaaccatatttatttagagtcagaatggagcgatttgtagtaacagcaccacctgctcgaaaccgttctaagactgctttgtatgtgactcccctggatcgagtcactgagtttggaggtgagctgcatgaagatggaggaaaactcttctgcacttcttgcaatgtggttctgaatcatgttcgcaagtctgccattagtgaccacctcaagtcaaagactcataccaagaggaaggcagaatttgaagagcagaatgtgagaaagaagcagaggcccctaactgcatctcttcagtgcaacagtactgcgcaaacagagaaagtcagtgttatccaggactttgtgaaaatgtgcctggaagccaacatcccacttgagaaggctgatcacccagcagtccgtgctttcctatctcgccatgtgaagaatggaggctccatacctaagtcagaccagctacggagggcatatcttcctgatggatatgagaatgagaatcaactcctcaactcacaagattgttgactaggaggttaccaccattgtgatcaagataaatgtggagtattaaagttatgtgttgattgtgtggttcatttttgtatttatttcatttaaaatcatgtgacgcagaatagttttgcaatgtgtatatagttgcaggcaaaaaaaaaaccacctcactgcaaaacttattgttaattttagtcaccaatggtataaagcaaaacctaggtttagagtgtgctaggatacctgaaacctgatggttatctttaaaattaatggtttttctcctgaaatgtttgtgcatggaagaactgccctgcttttttaccctgttgccatgtatgattattccttgtgagattacttaattacttggattgaagactagcctattgaagctgctgccaggcaacaccacttaacagtaacttaaaggaattattttctttagaggatcctcttcaaaaaggaagggatagtggaaaactgttcttatatcttcagatccctagcagaaatgactgtttatttcaaactatgttttacttgtatatgatgtagtcaccttaactatctttcaattccatacttcccccgcccccattttaaaggcttattgttgtattttgtagcagcttcaagtgaccaaaagactaaaatctttcaacgtcaatgccaaaagccaaggggaattttgcagtgataggattttagtctcttactatgaatactaatttcgaaccatagctttcattttaagcatcatcttgaatttctaaacttttttctatgtcttggtgttaaaagatttcaagattggcatttttacttaaacagacattttatggttgagttttctctttattatagagaattagtaatttttttttggctgacagatcagataaaattactttctattcattaatttttctctacaactttatgagtttatttaggtgaatagtctagactagaaacaagtttactttatctgctttgcctctggtggtacaaggtttttaacatggattgtaaacaattgtctagaaattctggcaggttttttgtattggagatctggcagtatcctgcataactttgggtgaggaaattgttctcttaaagatcagccatgttcaggaaatgatctctgtttgaacctcactatcctgtaaggttatccaagtagcttagcccagctaagttctatcagagacccaaattatattttttaaaaatttaacagctggaaacttggactagagctttaataaaaaatcttaaattctttgaaattcaagttaaaaatacttatatatttctattacaaagcagtgacaaatgatgccctgtgtgacttggagttatctttgacttttaccacaaatcttcatttataaaagaaaaagccaaagtgaaaaaaagttagattgtgtatttttcagtaacagctttccatgtcttaagatttttttacagacttaagtttctaattcaggttgtcaaactggccatttgacttcagagatttgttttcattaaaaaataagcctgccgccaaaataaatcacttatcaaaatgtgaactgttttcctcatgttcagttatgttaaagtagtatgataaatgcatgcctagagtagtgctctcgttgatgaagcacatgtatgaggagaccagcagcaaaacataaccatatgtgttttgcgtttacttcctctagaaaagaatttgcaggcaaccatgtttaatttgaactatctaagatggtagattttagaagctaggaataattgagttttatagcactattttcagaatacaaaaagatacacaatcattctgttttttgaaattccatgtgattcaaactgttccctattatttgggtattaatttgcactaatagcaaaatgtaatggcagatcagctttgagagtggtcctaagcagtaaactggatgatgttgcattagaaaaacatcaataattcatatttaagttttagtagttactactgatttgataatcacttaaattttatatatcttaatgtattttttcagactcctaattaattcccacattcactgtaactaggggcatagtccattctgttaggattatatcctctccttagaaatgttttccatcctgttgtggggatttggtattaatgtttcttcattgattatggaacttttgttccctgaagctagttaactgtgtctaaagttaaataaatacagcagaatgattgttttagcctgctcgaactgatacaaatccctgaaaccatgattggcatatgttagataacaaatgaggatgtctaagaggcatatgctgctttggaggtgtagtgaacgtgtgtacagaagttttcaatcttaactatatagtgttagtgtgatgctatactattggaaaaatagcagcttttttctattttataagttgtatgcataaacataagatttgtaatgtttcatttataaactgccttcttcaacacatgttaatagtgttttctcaaagtattgatagtatgtcttccagaatttcacaatatgcttacagtaaatatttcctagcttgttgaaatgttcaattctttgttggctttcttcttgattctgtgggggtgtataacaagcctgaaggacattgtaatcatttcttacaaggtgaaaattaagaaagattgtgtatgagagcctatatagttgttttatccattatcatctttgattaagactttaaaaaaatgctatttccagttaatgcatttggccctattgaattttcagggaccagaaaacattaaaaagttctgcatcttataatggtaaccaattaagcttgagattgttctgaaagtatcaattgctttaaaactgttgtaagtacagttggcaagatctccaagctgaaacttacacgttaaaacttttgcctgtaagaatttgcacatgaatgttaatggaaaacacaaaacttaagatggcccaaaacaaaagccacaaacagttcatcatttggtgcttagtctttgtaagggctctctgtggtttgacttactccagctaccgttaaatgagggcaaatcaccttaaaacatgttcatttgattcataacaaggaaaattgggtctatgattttttgccaatcttagcctaaaagaaattgctttagcttctggtcagcactgattaaaatgtgaatagtgaagtggctatcctaaactggtttatctccacccacactatcatagatttcttaggtaaatacaattcttatctagtggtattctacttgtattcagaatactgtattaaaattttactatttcatttttgtattctgtgcttattttttttgctcacgcatgtatgcttagtataaatgtgtcacttctaaagttttgtctctgacttttagaaataaatttcagaaaaattgtttcaaa

SEQ ID NO: 74831 - DNA, 4067 bp, Homo sapiens
ccggctctgagtatagggttgtcagttattccagaatgaactgttgttataatactcatctttgtttcttttgtcttgaaagaaccatatttatttagagtcagaatggagcgatttgtagtaacagcaccacctgctcgaaaccgttctaagactgctttgtatgtgactcccctggatcgagtcactgagtttggaggtgagctgcatgaagatggaggaaaactcttctgcacttcttgcaatgtggttctgaatcatgttcgcaagtctgccattagtgaccacctcaagtcaaagactcataccaagaggaaggcagaatttgaagagcagaatgtgagaaagaagcagaggcccctaactgcatctcttcagtgcaacagtactgcgcaaacagagaaagtcagtgttatccaggactttgtgaaaatgtgcctggaagccaacatcccacttgagaaggctgatcacccagcagtccgtgctttcctatctcgccatgtgaagaatggaggctccatacctaagtcagaccagctacggagggcatatcttcctgatggatatgagaatgagaatcaactcctcaactcacaagattgttgactaggaggttaccaccattgtgatcaagataaatgtggagtattaaagttatgtgttgattgtgtggttcatttttgtatttatttcatttaaaatcatgtgacgcagaatagttttgcaatgtgtatatagttgcaggcaaaaaaaaaaccacctcactgcaaaacttattgttaattttagtcaccaatggtataaagcaaaacctaggtttagagtgtgctaggatacctgaaacctgatggttatctttaaaattaatggtttttctcctgaaatgtttgtgcatggaagaactgccctgcttttttaccctgttgccatgtatgattattccttgtgagattacttaattacttggattgaagactagcctattgaagctgctgccaggcaacaccacttaacagtaacttaaaggaattattttctttagaggatcctcttcaaaaaggaagggatagtggaaaactgttcttatatcttcagatccctagcagaaatgactgtttatttcaaactatgttttacttgtatatgatgtagtcaccttaactatctttcaattccatacttcccccgcccccattttaaaggcttattgttgtattttgtagcagcttcaagtgaccaaaagactaaaatctttcaacgtcaatgccaaaagccaaggggaattttgcagtgataggattttagtctcttactatgaatactaatttcgaaccatagctttcattttaagcatcatcttgaatttctaaacttttttctatgtcttggtgttaaaagatttcaagattggcatttttacttaaacagacattttatggttgagttttctctttattatagagaattagtaatttttttttggctgacagatcagataaaattactttctattcattaatttttctctacaactttatgagtttatttaggtgaatagtctagactagaaacaagtttactttatctgctttgcctctggtggtacaaggtttttaacatggattgtaaacaattgtctagaaattctggcaggttttttgtattggagatctggcagtatcctgcataactttgggtgaggaaattgttctcttaaagatcagccatgttcaggaaatgatctctgtttgaacctcactatcctgtaaggttatccaagtagcttagcccagctaagttctatcagagacccaaattatattttttaaaaatttaacagctggaaacttggactagagctttaataaaaaatcttaaattctttgaaattcaagttaaaaatacttatatatttctattacaaagcagtgacaaatgatgccctgtgtgacttggagttatctttgacttttaccacaaatcttcatttataaaagaaaaagccaaagtgaaaaaaagttagattgtgtatttttcagtaacagctttccatgtcttaagatttttttacagacttaagtttctaattcaggttgtcaaactggccatttgacttcagagatttgttttcattaaaaaataagcctgccgccaaaataaatcacttatcaaaatgtgaactgttttcctcatgttcagttatgttaaagtagtatgataaatgcatgcctagagtagtgctctcgttgatgaagcacatgtatgaggagaccagcagcaaaacataaccatatgtgttttgcgtttacttcctctagaaaagaatttgcaggcaaccatgtttaatttgaactatctaagatggtagattttagaagctaggaataattgagttttatagcactattttcagaatacaaaaagatacacaatcattctgttttttgaaattccatgtgattcaaactgttccctattatttgggtattaatttgcactaatagcaaaatgtaatggcagatcagctttgagagtggtcctaagcagtaaactggatgatgttgcattagaaaaacatcaataattcatatttaagttttagtagttactactgatttgataatcacttaaattttatatatcttaatgtattttttcagactcctaattaattcccacattcactgtaactaggggcatagtccattctgttaggattatatcctctccttagaaatgttttccatcctgttgtggggatttggtattaatgtttcttcattgattatggaacttttgttccctgaagctagttaactgtgtctaaagttaaataaatacagcagaatgattgttttagcctgctcgaactgatacaaatccctgaaaccatgattggcatatgttagataacaaatgaggatgtctaagaggcatatgctgctttggaggtgtagtgaacgtgtgtacagaagttttcaatcttaactatatagtgttagtgtgatgctatactattggaaaaatagcagcttttttctattttataagttgtatgcataaacataagatttgtaatgtttcatttataaactgccttcttcaacacatgttaatagtgttttctcaaagtattgatagtatgtcttccagaatttcacaatatgcttacagtaaatatttcctagcttgttgaaatgttcaattctttgttggctttcttcttgattctgtgggggtgtataacaagcctgaaggacattgtaatcatttcttacaaggtgaaaattaagaaagattgtgtatgagagcctatatagttgttttatccattatcatctttgattaagactttaaaaaaatgctatttccagttaatgcatttggccctattgaattttcagggaccagaaaacattaaaaagttctgcatcttataatggtaaccaattaagcttgagattgttctgaaagtatcaattgctttaaaactgttgtaagtacagttggcaagatctccaagctgaaacttacacgttaaaacttttgcctgtaagaatttgcacatgaatgttaatggaaaacacaaaacttaagatggcccaaaacaaaagccacaaacagttcatcatttggtgcttagtctttgtaagggctctctgtggtttgacttactccagctaccgttaaatgagggcaaatcaccttaaaacatgttcatttgattcataacaaggaaaattgggtctatgattttttgccaatcttagcctaaaagaaattgctttagcttctggtcagcactgattaaaatgtgaatagtgaagtggctatcctaaactggtttatctccacccacactatcatagatttcttaggtaaatacaattcttatctagtggtattctacttgtattcagaatactgtattaaaattttactatttcatttttgtattctgtgcttattttttttgctcacgcatgtatgcttagtataaatgtgtcacttctaaagttttgtctctgacttttagaaataaatttcagaaaaattgtttcaaa

SEQ ID NO: 74832 - DNA, 4357 bp, Homo sapiens
atatctaagttagatgagattaatacaatttatatcctgaatgtaatttatatcctaaatgttgaactgtgattaggtttccctaaataatggtgacatctgggatagtttgagttctttctttatagtctaatttacttgaatttcgtaaaaatcaaggaatggacctgattgcgactggttagtaacttgttctagttttgccttcccttatatatttcaggtaagttaagattaatagacacacagtctactaatttgaattaagttttttgaagtatttgaagtgtttatatactgccttttattgttcattacttccagaatgaactgttgttataatactcatctttgtttcttttgtcttgaaagaaccatatttatttagagtcagaatggagcgatttgtagtaacagcaccacctgctcgaaaccgttctaagactgctttgtatgtgactcccctggatcgagtcactgagtttggaggtgagctgcatgaagatggaggaaaactcttctgcacttcttgcaatgtggttctgaatcatgttcgcaagtctgccattagtgaccacctcaagtcaaagactcataccaagaggaaggcagaatttgaagagcagaatgtgagaaagaagcagaggcccctaactgcatctcttcagtgcaacagtactgcgcaaacagagaaagtcagtgttatccaggactttgtgaaaatgtgcctggaagccaacatcccacttgagaaggctgatcacccagcagtccgtgctttcctatctcgccatgtgaagaatggaggctccatacctaagtcagaccagctacggagggcatatcttcctgatggatatgagaatgagaatcaactcctcaactcacaagattgttgactaggaggttaccaccattgtgatcaagataaatgtggagtattaaagttatgtgttgattgtgtggttcatttttgtatttatttcatttaaaatcatgtgacgcagaatagttttgcaatgtgtatatagttgcaggcaaaaaaaaaaccacctcactgcaaaacttattgttaattttagtcaccaatggtataaagcaaaacctaggtttagagtgtgctaggatacctgaaacctgatggttatctttaaaattaatggtttttctcctgaaatgtttgtgcatggaagaactgccctgcttttttaccctgttgccatgtatgattattccttgtgagattacttaattacttggattgaagactagcctattgaagctgctgccaggcaacaccacttaacagtaacttaaaggaattattttctttagaggatcctcttcaaaaaggaagggatagtggaaaactgttcttatatcttcagatccctagcagaaatgactgtttatttcaaactatgttttacttgtatatgatgtagtcaccttaactatctttcaattccatacttcccccgcccccattttaaaggcttattgttgtattttgtagcagcttcaagtgaccaaaagactaaaatctttcaacgtcaatgccaaaagccaaggggaattttgcagtgataggattttagtctcttactatgaatactaatttcgaaccatagctttcattttaagcatcatcttgaatttctaaacttttttctatgtcttggtgttaaaagatttcaagattggcatttttacttaaacagacattttatggttgagttttctctttattatagagaattagtaatttttttttggctgacagatcagataaaattactttctattcattaatttttctctacaactttatgagtttatttaggtgaatagtctagactagaaacaagtttactttatctgctttgcctctggtggtacaaggtttttaacatggattgtaaacaattgtctagaaattctggcaggttttttgtattggagatctggcagtatcctgcataactttgggtgaggaaattgttctcttaaagatcagccatgttcaggaaatgatctctgtttgaacctcactatcctgtaaggttatccaagtagcttagcccagctaagttctatcagagacccaaattatattttttaaaaatttaacagctggaaacttggactagagctttaataaaaaatcttaaattctttgaaattcaagttaaaaatacttatatatttctattacaaagcagtgacaaatgatgccctgtgtgacttggagttatctttgacttttaccacaaatcttcatttataaaagaaaaagccaaagtgaaaaaaagttagattgtgtatttttcagtaacagctttccatgtcttaagatttttttacagacttaagtttctaattcaggttgtcaaactggccatttgacttcagagatttgttttcattaaaaaataagcctgccgccaaaataaatcacttatcaaaatgtgaactgttttcctcatgttcagttatgttaaagtagtatgataaatgcatgcctagagtagtgctctcgttgatgaagcacatgtatgaggagaccagcagcaaaacataaccatatgtgttttgcgtttacttcctctagaaaagaatttgcaggcaaccatgtttaatttgaactatctaagatggtagattttagaagctaggaataattgagttttatagcactattttcagaatacaaaaagatacacaatcattctgttttttgaaattccatgtgattcaaactgttccctattatttgggtattaatttgcactaatagcaaaatgtaatggcagatcagctttgagagtggtcctaagcagtaaactggatgatgttgcattagaaaaacatcaataattcatatttaagttttagtagttactactgatttgataatcacttaaattttatatatcttaatgtattttttcagactcctaattaattcccacattcactgtaactaggggcatagtccattctgttaggattatatcctctccttagaaatgttttccatcctgttgtggggatttggtattaatgtttcttcattgattatggaacttttgttccctgaagctagttaactgtgtctaaagttaaataaatacagcagaatgattgttttagcctgctcgaactgatacaaatccctgaaaccatgattggcatatgttagataacaaatgaggatgtctaagaggcatatgctgctttggaggtgtagtgaacgtgtgtacagaagttttcaatcttaactatatagtgttagtgtgatgctatactattggaaaaatagcagcttttttctattttataagttgtatgcataaacataagatttgtaatgtttcatttataaactgccttcttcaacacatgttaatagtgttttctcaaagtattgatagtatgtcttccagaatttcacaatatgcttacagtaaatatttcctagcttgttgaaatgttcaattctttgttggctttcttcttgattctgtgggggtgtataacaagcctgaaggacattgtaatcatttcttacaaggtgaaaattaagaaagattgtgtatgagagcctatatagttgttttatccattatcatctttgattaagactttaaaaaaatgctatttccagttaatgcatttggccctattgaattttcagggaccagaaaacattaaaaagttctgcatcttataatggtaaccaattaagcttgagattgttctgaaagtatcaattgctttaaaactgttgtaagtacagttggcaagatctccaagctgaaacttacacgttaaaacttttgcctgtaagaatttgcacatgaatgttaatggaaaacacaaaacttaagatggcccaaaacaaaagccacaaacagttcatcatttggtgcttagtctttgtaagggctctctgtggtttgacttactccagctaccgttaaatgagggcaaatcaccttaaaacatgttcatttgattcataacaaggaaaattgggtctatgattttttgccaatcttagcctaaaagaaattgctttagcttctggtcagcactgattaaaatgtgaatagtgaagtggctatcctaaactggtttatctccacccacactatcatagatttcttaggtaaatacaattcttatctagtggtattctacttgtattcagaatactgtattaaaattttactatttcatttttgtattctgtgcttattttttttgctcacgcatgtatgcttagtataaatgtgtcacttctaaagttttgtctctgacttttagaaataaatttcagaaaaattgtttcaaa

SEQ ID NO: 74833 - DNA, 3896 bp, Homo sapiens
gagctcggtacccgtttatcatttggaggtgagctgcatgaagatggaggaaaactcttctgcacttcttgcaatgtggttctgaatcatgttcgcaagtctgccattagtgaccacctcaagtcaaagactcataccaagaggaaggcagaatttgaagagcagaatgtgagaaagaagcagaggcccctaactgcatctcttcagtgcaacagtactgcgcaaacagagaaagtcagtgttatccaggactttgtgaaaatgtgcctggaagccaacatcccacttgagaaggctgatcacccagcagtccgtgctttcctatctcgccatgtgaagaatggaggctccatacctaagtcagaccagctacggagggcatatcttcctgatggatatgagaatgagaatcaactcctcaactcacaagattgttgactaggaggttaccaccattgtgatcaagataaatgtggagtattaaagttatgtgttgattgtgtggttcatttttgtatttatttcatttaaaatcatgtgacgcagaatagttttgcaatgtgtatatagttgcaggcaaaaaaaaaaccacctcactgcaaaacttattgttaattttagtcaccaatggtataaagcaaaacctaggtttagagtgtgctaggatacctgaaacctgatggttatctttaaaattaatggtttttctcctgaaatgtttgtgcatggaagaactgccctgcttttttaccctgttgccatgtatgattattccttgtgagattacttaattacttggattgaagactagcctattgaagctgctgccaggcaacaccacttaacagtaacttaaaggaattattttctttagaggatcctcttcaaaaaggaagggatagtggaaaactgttcttatatcttcagatccctagcagaaatgactgtttatttcaaactatgttttacttgtatatgatgtagtcaccttaactatctttcaattccatacttcccccgcccccattttaaaggcttattgttgtattttgtagcagcttcaagtgaccaaaagactaaaatctttcaacgtcaatgccaaaagccaaggggaattttgcagtgataggattttagtctcttactatgaatactaatttcgaaccatagctttcattttaagcatcatcttgaatttctaaacttttttctatgtcttggtgttaaaagatttcaagattggcatttttacttaaacagacattttatggttgagttttctctttattatagagaattagtaatttttttttggctgacagatcagataaaattactttctattcattaatttttctctacaactttatgagtttatttaggtgaatagtctagactagaaacaagtttactttatctgctttgcctctggtggtacaaggtttttaacatggattgtaaacaattgtctagaaattctggcaggttttttgtattggagatctggcagtatcctgcataactttgggtgaggaaattgttctcttaaagatcagccatgttcaggaaatgatctctgtttgaacctcactatcctgtaaggttatccaagtagcttagcccagctaagttctatcagagacccaaattatattttttaaaaatttaacagctggaaacttggactagagctttaataaaaaatcttaaattctttgaaattcaagttaaaaatacttatatatttctattacaaagcagtgacaaatgatgccctgtgtgacttggagttatctttgacttttaccacaaatcttcatttataaaagaaaaagccaaagtgaaaaaaagttagattgtgtatttttcagtaacagctttccatgtcttaagatttttttacagacttaagtttctaattcaggttgtcaaactggccatttgacttcagagatttgttttcattaaaaaataagcctgccgccaaaataaatcacttatcaaaatgtgaactgttttcctcatgttcagttatgttaaagtagtatgataaatgcatgcctagagtagtgctctcgttgatgaagcacatgtatgaggagaccagcagcaaaacataaccatatgtgttttgcgtttacttcctctagaaaagaatttgcaggcaaccatgtttaatttgaactatctaagatggtagattttagaagctaggaataattgagttttatagcactattttcagaatacaaaaagatacacaatcattctgttttttgaaattccatgtgattcaaactgttccctattatttgggtattaatttgcactaatagcaaaatgtaatggcagatcagctttgagagtggtcctaagcagtaaactggatgatgttgcattagaaaaacatcaataattcatatttaagttttagtagttactactgatttgataatcacttaaattttatatatcttaatgtattttttcagactcctaattaattcccacattcactgtaactaggggcatagtccattctgttaggattatatcctctccttagaaatgttttccatcctgttgtggggatttggtattaatgtttcttcattgattatggaacttttgttccctgaagctagttaactgtgtctaaagttaaataaatacagcagaatgattgttttagcctgctcgaactgatacaaatccctgaaaccatgattggcatatgttagataacaaatgaggatgtctaagaggcatatgctgctttggaggtgtagtgaacgtgtgtacagaagttttcaatcttaactatatagtgttagtgtgatgctatactattggaaaaatagcagcttttttctattttataagttgtatgcataaacataagatttgtaatgtttcatttataaactgccttcttcaacacatgttaatagtgttttctcaaagtattgatagtatgtcttccagaatttcacaatatgcttacagtaaatatttcctagcttgttgaaatgttcaattctttgttggctttcttcttgattctgtgggggtgtataacaagcctgaaggacattgtaatcatttcttacaaggtgaaaattaagaaagattgtgtatgagagcctatatagttgttttatccattatcatctttgattaagactttaaaaaaatgctatttccagttaatgcatttggccctattgaattttcagggaccagaaaacattaaaaagttctgcatcttataatggtaaccaattaagcttgagattgttctgaaagtatcaattgctttaaaactgttgtaagtacagttggcaagatctccaagctgaaacttacacgttaaaacttttgcctgtaagaatttgcacatgaatgttaatggaaaacacaaaacttaagatggcccaaaacaaaagccacaaacagttcatcatttggtgcttagtctttgtaagggctctctgtggtttgacttactccagctaccgttaaatgagggcaaatcaccttaaaacatgttcatttgattcataacaaggaaaattgggtctatgattttttgccaatcttagcctaaaagaaattgctttagcttctggtcagcactgattaaaatgtgaatagtgaagtggctatcctaaactggtttatctccacccacactatcatagatttcttaggtaaatacaattcttatctagtggtattctacttgtattcagaatactgtattaaaattttactatttcatttttgtattctgtgcttattttttttgctcacgcatgtatgcttagtataaatgtgtcacttctaaagttttgtctctgacttttagaaataaatttcagaaaaattgtttcaaa

SEQ ID NO: 74834 - DNA, 4222 bp, Homo sapiens
tgctggggaccgcctacgggctctgccataggcggtgcaggcggacggggcgcggcgggggacacggcggccgccgcggggctcgatcgggcaacggcggcgacggcggcagcgacggatcctcctcctcccttattcccttgctcctctttcttccttttcttttcctttccggccgggcctcgtccactttccctaacggcggcctcgatcctacgtaaaggcatgacttcctggcaccacagggaaaatcgggtgcaagcccagaaactatttccccaccaccacttgttgaaaaactgatttgaaggcatctccggggttgaacaaacggaaagtgccaggatttgatgcgtctctggtttcgctctggagaccattccctgctaagtatcaagacgaaaaaaactggaaactaatccgaaccatatttatttagagtcagaatggagcgatttgtagtaacagcaccacctgctcgaaaccgttctaagactgctttgtatgtgactcccctggatcgagtcactgagtttggaggtgagctgcatgaagatggaggaaaactcttctgcacttcttgcaatgtggttctgaatcatgttcgcaagtctgccattagtgaccacctcaagtcaaagactcataccaagaggaaggcagaatttgaagagcagaatgtgagaaagaagcagaggcccctaactgcatctcttcagtgcaacagtactgcgcaaacagagaaagtcagtgttatccaggactttgtgaaaatgtgcctggaagccaacatcccacttgagaaggctgatcacccagcagtccgtgctttcctatctcgccatgtgaagaatggaggctccatacctaagtcagaccagctacggagggcatatcttcctgatggatatgagaatgagaatcaactcctcaactcacaagattgttgactaggaggttaccaccattgtgatcaagataaatgtggagtattaaagttatgtgttgattgtgtggttcatttttgtatttatttcatttaaaatcatgtgacgcagaatagttttgcaatgtgtatatagttgcaggcaaaaaaaaaaccacctcactgcaaaacttattgttaattttagtcaccaatggtataaagcaaaacctaggtttagagtgtgctaggatacctgaaacctgatggttatctttaaaattaatggtttttctcctgaaatgtttgtgcatggaagaactgccctgcttttttaccctgttgccatgtatgattattccttgtgagattacttaattacttggattgaagactagcctattgaagctgctgccaggcaacaccacttaacagtaacttaaaggaattattttctttagaggatcctcttcaaaaaggaagggatagtggaaaactgttcttatatcttcagatccctagcagaaatgactgtttatttcaaactatgttttacttgtatatgatgtagtcaccttaactatctttcaattccatacttcccccgcccccattttaaaggcttattgttgtattttgtagcagcttcaagtgaccaaaagactaaaatctttcaacgtcaatgccaaaagccaaggggaattttgcagtgataggattttagtctcttactatgaatactaatttcgaaccatagctttcattttaagcatcatcttgaatttctaaacttttttctatgtcttggtgttaaaagatttcaagattggcatttttacttaaacagacattttatggttgagttttctctttattatagagaattagtaatttttttttggctgacagatcagataaaattactttctattcattaatttttctctacaactttatgagtttatttaggtgaatagtctagactagaaacaagtttactttatctgctttgcctctggtggtacaaggtttttaacatggattgtaaacaattgtctagaaattctggcaggttttttgtattggagatctggcagtatcctgcataactttgggtgaggaaattgttctcttaaagatcagccatgttcaggaaatgatctctgtttgaacctcactatcctgtaaggttatccaagtagcttagcccagctaagttctatcagagacccaaattatattttttaaaaatttaacagctggaaacttggactagagctttaataaaaaatcttaaattctttgaaattcaagttaaaaatacttatatatttctattacaaagcagtgacaaatgatgccctgtgtgacttggagttatctttgacttttaccacaaatcttcatttataaaagaaaaagccaaagtgaaaaaaagttagattgtgtatttttcagtaacagctttccatgtcttaagatttttttacagacttaagtttctaattcaggttgtcaaactggccatttgacttcagagatttgttttcattaaaaaataagcctgccgccaaaataaatcacttatcaaaatgtgaactgttttcctcatgttcagttatgttaaagtagtatgataaatgcatgcctagagtagtgctctcgttgatgaagcacatgtatgaggagaccagcagcaaaacataaccatatgtgttttgcgtttacttcctctagaaaagaatttgcaggcaaccatgtttaatttgaactatctaagatggtagattttagaagctaggaataattgagttttatagcactattttcagaatacaaaaagatacacaatcattctgttttttgaaattccatgtgattcaaactgttccctattatttgggtattaatttgcactaatagcaaaatgtaatggcagatcagctttgagagtggtcctaagcagtaaactggatgatgttgcattagaaaaacatcaataattcatatttaagttttagtagttactactgatttgataatcacttaaattttatatatcttaatgtattttttcagactcctaattaattcccacattcactgtaactaggggcatagtccattctgttaggattatatcctctccttagaaatgttttccatcctgttgtggggatttggtattaatgtttcttcattgattatggaacttttgttccctgaagctagttaactgtgtctaaagttaaataaatacagcagaatgattgttttagcctgctcgaactgatacaaatccctgaaaccatgattggcatatgttagataacaaatgaggatgtctaagaggcatatgctgctttggaggtgtagtgaacgtgtgtacagaagttttcaatcttaactatatagtgttagtgtgatgctatactattggaaaaatagcagcttttttctattttataagttgtatgcataaacataagatttgtaatgtttcatttataaactgccttcttcaacacatgttaatagtgttttctcaaagtattgatagtatgtcttccagaatttcacaatatgcttacagtaaatatttcctagcttgttgaaatgttcaattctttgttggctttcttcttgattctgtgggggtgtataacaagcctgaaggacattgtaatcatttcttacaaggtgaaaattaagaaagattgtgtatgagagcctatatagttgttttatccattatcatctttgattaagactttaaaaaaatgctatttccagttaatgcatttggccctattgaattttcagggaccagaaaacattaaaaagttctgcatcttataatggtaaccaattaagcttgagattgttctgaaagtatcaattgctttaaaactgttgtaagtacagttggcaagatctccaagctgaaacttacacgttaaaacttttgcctgtaagaatttgcacatgaatgttaatggaaaacacaaaacttaagatggcccaaaacaaaagccacaaacagttcatcatttggtgcttagtctttgtaagggctctctgtggtttgacttactccagctaccgttaaatgagggcaaatcaccttaaaacatgttcatttgattcataacaaggaaaattgggtctatgattttttgccaatcttagcctaaaagaaattgctttagcttctggtcagcactgattaaaaacctaaattcatattcattaaaacaacccgactttgattaaagaataattaggtaccgagctcga

SEQ ID NO: 74835 - DNA, 3056 bp, Homo sapiens
attgcgtattacttggtagtatgatttagtgatacacatattatacacgaggaggcgtatgtgagtaaaatgttcttatatcttcagatccctagcagaaatgactgtttatttcaaactatgttttacttgtatatgatgtagtcaccttaactatctttcaattccatacttcccccgcccccattttaaaggcttattgttgtattttgtagcagcttcaagtgaccaaaagactaaaatctttcaacgtcaatgccaaaagccaaggggaattttgcagtgataggattttagtctcttactatgaatactaatttcgaaccatagctttcattttaagcatcatcttgaatttctaaacttttttctatgtcttggtgttaaaagatttcaagattggcatttttacttaaacagacattttatggttgagttttctctttattatagagaattagtaatttttttttggctgacagatcagataaaattactttctattcattaatttttctctacaactttatgagtttatttaggtgaatagtctagactagaaacaagtttactttatctgctttgcctctggtggtacaaggtttttaacatggattgtaaacaattgtctagaaattctggcaggttttttgtattggagatctggcagtatcctgcataactttgggtgaggaaattgttctcttaaagatcagccatgttcaggaaatgatctctgtttgaacctcactatcctgtaaggttatccaagtagcttagcccagctaagttctatcagagacccaaattatattttttaaaaatttaacagctggaaacttggactagagctttaataaaaaatcttaaattctttgaaattcaagttaaaaatacttatatatttctattacaaagcagtgacaaatgatgccctgtgtgacttggagttatctttgacttttaccacaaatcttcatttataaaagaaaaagccaaagtgaaaaaaagttagattgtgtatttttcagtaacagctttccatgtcttaagatttttttacagacttaagtttctaattcaggttgtcaaactggccatttgacttcagagatttgttttcattaaaaaataagcctgccgccaaaataaatcacttatcaaaatgtgaactgttttcctcatgttcagttatgttaaagtagtatgataaatgcatgcctagagtagtgctctcgttgatgaagcacatgtatgaggagaccagcagcaaaacataaccatatgtgttttgcgtttacttcctctagaaaagaatttgcaggcaaccatgtttaatttgaactatctaagatggtagattttagaagctaggaataattgagttttatagcactattttcagaatacaaaaagatacacaatcattctgttttttgaaattccatgtgattcaaactgttccctattatttgggtattaatttgcactaatagcaaaatgtaatggcagatcagctttgagagtggtcctaagcagtaaactggatgatgttgcattagaaaaacatcaataattcatatttaagttttagtagttactactgatttgataatcacttaaattttatatatcttaatgtattttttcagactcctaattaattcccacattcactgtaactaggggcatagtccattctgttaggattatatcctctccttagaaatgttttccatcctgttgtggggatttggtattaatgtttcttcattgattatggaacttttgttccctgaagctagttaactgtgtctaaagttaaataaatacagcagaatgattgttttagcctgctcgaactgatacaaatccctgaaaccatgattggcatatgttagataacaaatgaggatgtctaagaggcatatgctgctttggaggtgtagtgaacgtgtgtacagaagttttcaatcttaactatatagtgttagtgtgatgctatactattggaaaaatagcagcttttttctattttataagttgtatgcataaacataagatttgtaatgtttcatttataaactgccttcttcaacacatgttaatagtgttttctcaaagtattgatagtatgtcttccagaatttcacaatatgcttacagtaaatatttcctagcttgttgaaatgttcaattctttgttggctttcttcttgattctgtgggggtgtataacaagcctgaaggacattgtaatcatttcttacaaggtgaaaattaagaaagattgtgtatgagagcctatatagttgttttatccattatcatctttgattaagactttaaaaaaatgctatttccagttaatgcatttggccctattgaattttcagggaccagaaaacattaaaaagttctgcatcttataatggtaaccaattaagcttgagattgttctgaaagtatcaattgctttaaaactgttgtaagtacagttggcaagatctccaagctgaaacttacacgttaaaacttttgcctgtaagaatttgcacatgaatgttaatggaaaacacaaaacttaagatggcccaaaacaaaagccacaaacagttcatcatttggtgcttagtctttgtaagggctctctgtggtttgacttactccagctaccgttaaatgagggcaaatcaccttaaaacatgttcatttgattcataacaaggaaaattgggtctatgattttttgccaatcttagcctaaaagaaattgctttagcttctggtcagcactgattaaaatgtgaatagtgaagtggctatcctaaactggtttatctccacccacactatcatagatttcttaggtaaatacaattcttatctagtggtattctacttgtattcagaatactgtattaaaattttactatttcatttttgtattctgtgcttattttttttgctcacgcatgtatgcttagtataaatgtgtcacttctaaagttttgtctctgacttttagaaataaatttcagaaaaattgtttcaaa

SEQ ID NO: 74836 - DNA, 1846 bp, Homo sapiens
  misc_feature (12)..(12): n is a, c, g, or t
  misc_feature (37)..(37): n is a, c, g, or t
  misc_feature (53)..(53): n is a, c, g, or t
ggatacatttcncccggaaccagctatgcccagattngattcgagtcggaccngatccagcaaaacataaccatatgtgttttgcgtttacttcctctagaaaagaatttgcaggcaaccatgtttaatttgaactatctaagatggtagattttagaagctaggaataattgagttttatagcactattttcagaatacaaaaagatacacaatcattctgttttttgaaattccatgtgattcaaactgttccctattatttgggtattaatttgcactaatagcaaaatgtaatggcagatcagctttgagagtggtcctaagcagtaaactggatgatgttgcattagaaaaacatcaataattcatatttaagttttagtagttactactgatttgataatcacttaaattttatatatcttaatgtattttttcagactcctaattaattcccacattcactgtaactaggggcatagtccattctgttaggattatatcctctccttagaaatgttttccatcctgttgtggggatttggtattaatgtttcttcattgattatggaacttttgttccctgaagctagttaactgtgtctaaagttaaataaatacagcagaatgattgttttagcctgctcgaactgatacaaatccctgaaaccatgattggcatatgttagataacaaatgaggatgtctaagaggcatatgctgctttggaggtgtagtgaacgtgtgtacagaagttttcaatcttaactatatagtgttagtgtgatgctatactattggaaaaatagcagcttttttctattttataagttgtatgcataaacataagatttgtaatgtttcatttataaactgccttcttcaacacatgttaatagtgttttctcaaagtattgatagtatgtcttccagaatttcacaatatgcttacagtaaatatttcctagcttgttgaaatgttcaattctttgttggctttcttcttgattctgtgggggtgtataacaagcctgaaggacattgtaatcatttcttacaaggtgaaaattaagaaagattgtgtatgagagcctatatagttgttttatccattatcatctttgattaagactttaaaaaaatgctatttccagttaatgcatttggccctattgaattttcagggaccagaaaacattaaaaagttctgcatcttataatggtaaccaattaagcttgagattgttctgaaagtatcaattgctttaaaactgttgtaagtacagttggcaagatctccaagctgaaacttacacgttaaaacttttgcctgtaagaatttgcacatgaatgttaatggaaaacacaaaacttaagatggcccaaaacaaaagccacaaacagttcatcatttggtgcttagtctttgtaagggctctctgtggtttgacttactccagctaccgttaaatgagggcaaatcaccttaaaacatgttcatttgattcataacaaggaaaattgggtctatgattttttgccaatcttagcctaaaagaaattgctttagcttctggtcagcactgattaaaatgtgaatagtgaagtggctatcctaaactggtttatctccacccacactatcatagatttcttaggtaaatacaattcttatctagtggtattctacttgtattcagaatactgtattaaaattttactatttcatttttgtattctgtgcttattttttttgctcacgcatgtatgcttagtataaatgtgtcacttctaaagttttgtctctgacttttagaaataaatttcagaaaaattgtttcaaa

SEQ ID NO: 74837 - DNA, 1580 bp, Homo sapiens
ggaaatgaacagtggtatataagcaggcggtaccggccggaatcccgggatatcgctaagcagtaaactggatgatgttgcattagaaaaacatcaataattcatatttaagttttagtagttactactgatttgataatcacttaaattttatatatcttaatgtattttttcagactcctaattaattcccacattcactgtaactaggggcatagtccattctgttaggattatatcctctccttagaaatgttttccatcctgttgtggggatttggtattaatgtttcttcattgattatggaacttttgttccctgaagctagttaactgtgtctaaagttaaataaatacagcagaatgattgttttagcctgctcgaactgatacaaatccctgaaaccatgattggcatatgttagataacaaatgaggatgtctaagaggcatatgctgctttggaggtgtagtgaacgtgtgtacagaagttttcaatcttaactatatagtgttagtgtgatgctatactattggaaaaatagcagcttttttctattttataagttgtatgcataaacataagatttgtaatgtttcatttataaactgccttcttcaacacatgttaatagtgttttctcaaagtattgatagtatgtcttccagaatttcacaatatgcttacagtaaatatttcctagcttgttgaaatgttcaattctttgttggctttcttcttgattctgtgggggtgtataacaagcctgaaggacattgtaatcatttcttacaaggtgaaaattaagaaagattgtgtatgagagcctatatagttgttttatccattatcatctttgattaagactttaaaaaaatgctatttccagttaatgcatttggccctattgaattttcagggaccagaaaacattaaaaagttctgcatcttataatggtaaccaattaagcttgagattgttctgaaagtatcaattgctttaaaactgttgtaagtacagttggcaagatctccaagctgaaacttacacgttaaaacttttgcctgtaagaatttgcacatgaatgttaatggaaaacacaaaacttaagatggcccaaaacaaaagccacaaacagttcatcatttggtgcttagtctttgtaagggctctctgtggtttgacttactccagctaccgttaaatgagggcaaatcaccttaaaacatgttcatttgattcataacaaggaaaattgggtctatgattttttgccaatcttagcctaaaagaaattgctttagcttctggtcagcactgattaaaatgtgaatagtgaagtggctatcctaaactggtttatctccacccacactatcatagatttcttaggtaaatacaattcttatctagtggtattctacttgtattcagaatactgtattaaaattttactatttcatttttgtattctgtgcttattttttttgctcacgcatgtatgcttagtataaatgtgtcacttctaaagttttgtctctgacttttagaaataaatttcagaaaaattgtttcaaa

SEQ ID NO: 74838 - DNA, 1421 bp, Homo sapiens
aagagtggtatccacgcagagggcccattacggccggggcactgtaactaggggcatagtccattctgttaggattatatcctctccttagaaatgttttccatcctgttgtggggatttggtattaatgtttcttcattgattatggaacttttgttccctgaagctagttaactgtgtctaaagttaaataaatacagcagaatgattgttttagcctgctcgaactgatacaaatccctgaaaccatgattggcatatgttagataacaaatgaggatgtctaagaggcatatgctgctttggaggtgtagtgaacgtgtgtacagaagttttcaatcttaactatatagtgttagtgtgatgctatactattggaaaaatagcagcttttttctattttataagttgtatgcataaacataagatttgtaatgtttcatttataaactgccttcttcaacacatgttaatagtgttttctcaaagtattgatagtatgtcttccagaatttcacaatatgcttacagtaaatatttcctagcttgttgaaatgttcaattctttgttggctttcttcttgattctgtgggggtgtataacaagcctgaaggacattgtaatcatttcttacaaggtgaaaattaagaaagattgtgtatgagagcctatatagttgttttatccattatcatctttgattaagactttaaaaaaatgctatttccagttaatgcatttggccctattgaattttcagggaccagaaaacattaaaaagttctgcatcttataatggtaaccaattaagcttgagattgttctgaaagtatcaattgctttaaaactgttgtaagtacagttggcaagatctccaagctgaaacttacacgttaaaacttttgcctgtaagaatttgcacatgaatgttaatggaaaacacaaaacttaagatggcccaaaacaaaagccacaaacagttcatcatttggtgcttagtctttgtaagggctctctgtggtttgacttactccagctaccgttaaatgagggcaaatcaccttaaaacatgttcatttgattcataacaaggaaaattgggtctatgattttttgccaatcttagcctaaaagaaattgctttagcttctggtcagcactgattaaaatgtgaatagtgaagtggctatcctaaactggtttatctccacccacactatcatagatttcttaggtaaatacaattcttatctagtggtattctacttgtattcagaatactgtattaaaattttactatttcatttttgtattctgtgcttattttttttgctcacgcatgtatgcttagtataaatgtgtcacttctaaagttttgtctctgacttttagaaataaatttcagaaaaattgtttcaaa

SEQ ID NO: 74839 - DNA, 3188 bp, Homo sapiens
tgctggggaccgcctacgggctctgccataggcggtgcaggcggacggggcgcggcgggggacacggcggccgccgcggggctcgatcgggcaacggcggcgacggcggcagcgacggatcctcctcctcccttattcccttgctcctctttcttccttttcttttcctttccggccgggcctcgtccactttccctaacggcggcctcgatcctacgtaaaggcatgacttcctggcaccacagggaaaatcgggtgcaagcccagaaactatttccccaccaccacttgttgaaaaactgatttgaaggcatctccggggttgaacaaacggaaagtgccaggatttgatgcgtctctggtttcgctctggagaccattccctgctaagtatcaagacgaaaaaaactggaaactaatccgaaccatatttatttagagtcagaatggagcgatttgtagtaacagcaccacctgctcgaaaccgttctaagactgctttgtatgtgactcccctggatcgagtcactgagtttggaggtgagctgcatgaagatggaggaaaactcttctgcacttcttgcaatgtggttctgaatcatgttcgcaagtctgccattagtgaccacctcaagtcaaagactcataccaagaggaaggcagaatttgaagagcagaatgtgagaaagaagcagaggcccctaactgcatctcttcagtgcaacagtactgcgcaaacagagaaagtcagtgttatccaggactttgtgaaaatgtgcctggaagccaacatcccacttgagaaggctgatcacccagcagtccgtgctttcctatctcgccatgtgaagaatggaggctccatacctaagtcagaccagctacggagggcatatcttcctgatggatatgagaatgagaatcaactcctcaactcacaagattgttgactaggaggttaccaccattgtgatcaagataaatgtggagtattaaagttatgtgttgattgtgtggttcatttttgtatttatttcatttaaaatcatgtgacgcagaatagttttgcaatgtgtatatagttgcaggcaaaaaaaaaaccacctcactgcaaaacttattgttaattttagtcaccaatggtataaagcaaaacctaggtttagagtgtgctaggatacctgaaacctgatggttatctttaaaattaatggtttttctcctgaaatgtttgtgcatggaagaactgccctgcttttttaccctgttgccatgtatgattattccttgtgagattacttaattacttggattgaagactagcctattgaagctgctgccaggcaacaccacttaacagtaacttaaaggaattattttctttagaggatcctcttcaaaaaggaagggatagtggaaaactgttcttatatcttcagatccctagcagaaatgactgtttatttcaaactatgttttacttgtatatgatgtagtcaccttaactatctttcaattccatacttcccccgcccccattttaaaggcttattgttgtattttgtagcagcttcaagtgaccaaaagactaaaatctttcaacgtcaatgccaaaagccaaggggaattttgcagtgataggattttagtctcttactatgaatactaatttcgaaccatagctttcattttaagcatcatcttgaatttctaaacttttttctatgtcttggtgttaaaagatttcaagattggcatttttacttaaacagacattttatggttgagttttctctttattatagagaattagtaatttttttttggctgacagatcagataaaattactttctattcattaatttttctctacaactttatgagtttatttaggtgaatagtctagactagaaacaagtttactttatctgctttgcctctggtggtacaaggtttttaacatggattgtaaacaattgtctagaaattctggcaggttttttgtattggagatctggcagtatcctgcataactttgggtgaggaaattgttctcttaaagatcagccatgttcaggaaatgatctctgtttgaacctcactatcctgtaaggttatccaagtagcttagcccagctaagttctatcagagacccaaattatattttttaaaaatttaacagctggaaacttggactagagctttaataaaaaatcttaaattctttgaaattcaagttaaaaatacttatatatttctattacaaagcagtgacaaatgatgccctgtgtgacttggagttatctttgacttttaccacaaatcttcatttataaaagaaaaagccaaagtgaaaaaaagttagattgtgtatttttcagtaacagctttccatgtcttaagatttttttacagacttaagtttctaattcaggttgtcaaactggccatttgacttcagagatttgttttcattaaaaaataagcctgccgccaaaataaatcacttatcaaaatgtgaactgttttcctcatgttcagttatgttaaagtagtatgataaatgcatgcctagagtagtgctctcgttgatgaagcacatgtatgaggagaccagcagcaaaacataaccatatgtgttttgcgtttacttcctctagaaaagaatttgcaggcaaccatgtttaatttgaactatctaagatggtagattttagaagctaggaataattgagttttatagcactattttcagaatacaaaaagatacacaatcattctgttttttgaaattccatgtgattcaaactgttccctattatttgggtattaatttgcactaatagcaaaatgtaatggcagatcagctttgagagtggtcctaagcagtaaactggatgatgttgcattagaaaaacatcaataattcatatttaagttttagtagttactactgatttgataatcacttaaattttatatatcttaatgtattttttcagactcctaattaattcccacattcactgtaactaggggcatagtccattctgttaggattatatcctctccttagaaatgttttccatcctgttgtggggatttggtattaatgtttcttcattgattatggaacttttgttccctgaagctagttaactgtgtcatgtattactgctggggtcc

SEQ ID NO: 74840 - DNA, 2554 bp, Homo sapiens
  misc_feature (2554)..(2554): n is a, c, g, or t
tgctggggaccgcctacgggctctgccataggcggtgcaggcggacggggcgcggcgggggacacggcggccgccgcggggctcgatcgggcaacggcggcgacggcggcagcgacggatcctcctcctcccttattcccttgctcctctttcttccttttcttttcctttccggccgggcctcgtccactttccctaacggcggcctcgatcctacgtaaaggcatgacttcctggcaccacagggaaaatcgggtgcaagcccagaaactatttccccaccaccacttgttgaaaaactgatttgaaggcatctccggggttgaacaaacggaaagtgccaggatttgatgcgtctctggtttcgctctggagaccattccctgctaagtatcaagacgaaaaaaactggaaactaatccgaaccatatttatttagagtcagaatggagcgatttgtagtaacagcaccacctgctcgaaaccgttctaagactgctttgtatgtgactcccctggatcgagtcactgagtttggaggtgagctgcatgaagatggaggaaaactcttctgcacttcttgcaatgtggttctgaatcatgttcgcaagtctgccattagtgaccacctcaagtcaaagactcataccaagaggaaggcagaatttgaagagcagaatgtgagaaagaagcagaggcccctaactgcatctcttcagtgcaacagtactgcgcaaacagagaaagtcagtgttatccaggactttgtgaaaatgtgcctggaagccaacatcccacttgagaaggctgatcacccagcagtccgtgctttcctatctcgccatgtgaagaatggaggctccatacctaagtcagaccagctacggagggcatatcttcctgatggatatgagaatgagaatcaactcctcaactcacaagattgttgactaggaggttaccaccattgtgatcaagataaatgtggagtattaaagttatgtgttgattgtgtggttcatttttgtatttatttcatttaaaatcatgtgacgcagaatagttttgcaatgtgtatatagttgcaggcaaaaaaaaaaccacctcactgcaaaacttattgttaattttagtcaccaatggtataaagcaaaacctaggtttagagtgtgctaggatacctgaaacctgatggttatctttaaaattaatggtttttctcctgaaatgtttgtgcatggaagaactgccctgcttttttaccctgttgccatgtatgattattccttgtgagattacttaattacttggattgaagactagcctattgaagctgctgccaggcaacaccacttaacagtaacttaaaggaattattttctttagaggatcctcttcaaaaaggaagggatagtggaaaactgttcttatatcttcagatccctagcagaaatgactgtttatttcaaactatgttttacttgtatatgatgtagtcaccttaactatctttcaattccatacttcccccgcccccattttaaaggcttattgttgtattttgtagcagcttcaagtgaccaaaagactaaaatctttcaacgtcaatgccaaaagccaaggggaattttgcagtgataggattttagtctcttactatgaatactaatttcgaaccatagctttcattttaagcatcatcttgaatttctaaacttttttctatgtcttggtgttaaaagatttcaagattggcatttttacttaaacagacattttatggttgagttttctctttattatagagaattagtaatttttttttggctgacagatcagataaaattactttctattcattaatttttctctacaactttatgagtttatttaggtgaatagtctagactagaaacaagtttactttatctgctttgcctctggtggtacaaggtttttaacatggattgtaaacaattgtctagaaattctggcaggttttttgtattggagatctggcagtatcctgcataactttgggtgaggaaattgttctcttaaagatcagccatgttcaggaaatgatctctgtttgaacctcactatcctgtaaggttatccaagtagcttagcccagctaagttctatcagagacccaaattatattttttaaaaatttaacagctggaaacttggactagagctttaataaaaaatcttaaattctttgaaattcaagttaaaaatacttatatatttctattacaaagcagtgacaaatgatgccctgtgtgacttggagttatctttgacttttaccacaaatcttcatttataaaagaaatgcacagtgagttctagtatgttgcaactggctttgacttgaaatggttattaaattagcttgcgcaataatactttcaatggactgttctatgcatttgtaagtgcggaagctgctcagctgcctctgttaccctgttcggccatccactaaccattggttggtcctccttaataattcggcacctgttattgactttaaaggtgttcn

SEQ ID NO: 74841 - DNA, 1008 bp, Homo sapiens
tgctggggaccgcctacgggctctgccataggcggtgcaggcggacggggcgcggcgggggacacggcggccgccgcggggctcgatcgggcaacggcggcgacggcggcagcgacggatcctcctcctcccttattcccttgctcctctttcttccttttcttttcctttccggccgggcctcgtccactttccctaacggcggcctcgatcctacgtaaaggcatgacttcctggcaccacagggaaaatcgggtgcaagcccagaaactatttccccaccaccacttgttgaaaaactgatttgaaggcatctccggggttgaacaaacggaaagtgccaggatttgatgcgtctctggtttcgctctggagaccattccctgctaagtatcaagacgaaaaaaactggaaactaatccgaaccatatttatttagagtcagaatggagcgatttgtagtaacagcaccacctgctcgaaaccgttctaagactgctttgtatgtgactcccctggatcgagtcactgagtttggaggtgagctgcatgaagatggaggaaaactcttctgcacttcttgcaatgtggttctgaatcatgttcgcaagtctgccattagtgaccacctcaagtcaaagactcataccaagaggaaggcagaatttgaagagcagaatgtgagaaagaagcagaggcccctaactgcatctcttcagtgcaacagtactgcgcaaacagagaaagtcagtgttatccaggactttgtgaaaatgtgcctggaagccaacatcccacttgagaaggctgatcacccagcagtccgtgctttcctatctcgccatgtgaagaatggaggctccatacctaagtcagaccagctacggagggcatatcttcctgatggatatgagaatgagaatcaactcctcaactcacaagattgttgactaggaggttaccaccattgtgatcaagataaatgtggagtattaaagttatgtgttg

SEQ ID NO: 74842 - DNA, 2206 bp, Homo sapiens
gcggccgcctccgccaggcgcctgccgccgcctcccttgagactgccgccaagtcggctgtcgagttcccgggcccacagctggcacctgggactcggccttgcccagctagcggggtcgggacggctgggcgccggcgtgctgggcttggcgccggaggagagagcccagacgccgggaacgtcccgggccccgcctctcccccgcccccgcccgaacccccgggcctggggagctggaggaggtgccaagcgggcggaccaccgaggaggacctgggaggggaagtgttagggtaaacgttgggatcgggtttgtagttacctataaagtgattttagaaacacctgcgtggtggcagttgttgacgttcttgttcatcttttcagtcaccctccttccgtcccccattttttccttccatttgtttttcgtgttttacagtaaaggcatgacttcctggcaccacagggaaaatcgggtgcaagcccagaaactatttccccaccaccacttgttgaaaaactgatttgaaggcatctccggggttgaacaaacggaaagtgccaggatttgatgcgtctctggtttcgctctggagaccattccctgctaagtatcaagacgaaaaaaactggaaactaatccggtaaacatttaaacttgaaaacttatgatgagttttcttttgatctagcaaacgatatgctttttctcttttgttggctaattcctgcactttttaatttcttcatttgttgaaaatgttttcttctattgaaaacacttttgttcttcgggtatgtaaactcgagcatcctctactgggtggaaatttgcctctgcagtaacacaaacagacttcttgaaattacgaaaacattggaaagtataggcctttcacattagcacaaatgattgagcattttatgctataaagaattacatgcttattgtttttgaaatccaaatatttaaagatacaagactttttacatagaaagtaagacttaacgcattacggggcacaaatatttaatatctaccacaactaggttagaaccattaaccatatttggtatagttacctcatatttaccacaactaggttatatttggtatatttaccacaactaggttagaaccattaatcataattggtactgatttgtgagggagtgtaaaacacataccatttacttaaagtataaacgtgtaatggtaagtactagataggaatcataactgtcttctctgccgttgcaaacctgtagcctaacacaatatttggcaaatgagagctgtgcacttaaaaaaaaaaaaaaagtggaaaaaataaaatttattaaaacctagactttatcgtacttttcagaatttctgtggaatgtttaatcttctggatccatgactgtctgatacgttggcaatttaaagtccttttgaaagagagttcatgttacccagctattctctagtatgtattcatggaatactccatcgtttctgattacacttatgagacataattcttcagagcacacttagaattatttctctaacatatttatgcagacagaattccatcttgaattttatcaaattcactttaacttcttaagtcttggttattgtaagagcccaaaggtatggccccagggaacaattaagacttgatgatttgtcacctaccaaaatatgttcattatgtaaaggtttcaatgcccataaggctgtcatttggtatttagtgcagtgctcataaaaatataaatatttggacaaatattgaagatacgtactttttccatcaaattttaattgaggttctgctgtatactagactctatgttcttgattttgttcttactagttaagtgaagtattaacaaatgtaattattaattttaatgggaaaaggaaacaagtattagagaagtaagactttgcatatcttaacaccttttggaaaacggaggtatacatgcattacaaaataactttgaactgtatattttggctttacaatttaatgtcattgttgcttttagttgtatttggtctggtttttttttgtggtttttcctcagaacaattttggaaactatattcatcttcatatagaattatggcagtttataggcccacctgtttgaaaaaactttatccacagttgtgttcctaaaatcagttgtcccagaattgtg

SEQ ID NO: 74843 - DNA, 1074 bp, Homo sapiens
aaacgcagtgccctcacttgtggttccgggctggggacggagtgaagtcccacgtatctcaattaagggaagtgctgggtttatatggagaacatagactatccgcaagggagctggttaccgaaagagaagtccctcctccaaaagagcgccttggagggctgcgcaggtgcagatacctctactaagaagacagaagacttactttcatcatctgaatcaaatccaaagagtgtctgacatttcttttgtgcaagatgagcctcaagtgcttctgcattacataaaggcatgacttcctggcaccacagggaaaatcgggtgcaagcccagaaactatttccccaccaccacttgttgaaaaactgatttgaaggcatctccggggttgaacaaacggaaagtgccaggatttgatgcgtctctggtttcgctctggagaccattccctgctaagtatcaagacgaaaaaaactggaaactaatccgaaccatatttatttagagtcagaatggagcgatttgtagtaacagcaccacctgctcgaaaccgttctaagactgctttgtatgtgactcccctggatcgagtcactgagtttggaggtgagctgcatgaagatggaggaaaactcttctgcacttcttgcaatgtggttctgaatcatgttcgcaagtctgccattagtgaccacctcaagtcaaagactcataccaagaggaaggcagaatttgaagagcagaatgtgagaaagaagcagaggcccctaactgcatctcttcagtgcaacagtactgcgcaaacagagaaagtcagtgttatccaggactttgtgaaaatgtgcctggaagccaacatcccacttgagaaggctgatcacccagcagtccgtgctttcctatctcgccatgtgaagaatggaggctccatacctaagtcagaccagctacggagggcatatcttcctgatggatatgagaatgagaatcaactcctcaactcacaagattgttgactaggaggttaccaccattgtgatcaagataaatgtggagtattaaagttatgtgttg

SEQ ID NO: 74844 - DNA, 4487 bp, Homo sapiens
tgctggggaccgcctacgggctctgccataggcggtgcaggcggacggggcgcggcgggggacacggcggccgccgcggggctcgatcgggcaacggcggcgacggcggcagcgacggatcctcctcctcccttattcccttgctcctctttcttccttttcttttcctttccggccgggcctcgtccactttccctaacggcggcctcgatcctacgtaaaggcatgacttcctggcaccacagggaaaatcgggtgcaagcccagaaactatttccccaccaccacttgttgaaaaactgatttgaaggcatctccggggttgaacaaacggaaagtgccaggatttgatgcgtctctggtttcgctctggagaccattccctgctaagtatcaagacgaaaaaaactggaaactaatccgaaccatatttatttagagtcagaatggagcgatttgtagtaacagcaccacctgctcgaaaccgttctaagactgctttgtatgtgactcccctggatcgagtcactgagtttggaggtgagctgcatgaagatggaggaaaactcttctgcacttcttgcaatgtggttctgaatcatgttcgcaagtctgccattagtgaccacctcaagtcaaagactcataccaagaggaaggcagaatttgaagagcagaatgtgagaaagaagcagaggcccctaactgcatctcttcagtgcaacagtactgcgcaaacagagaaagtcagtgttatccaggactttgtgaaaatgtgcctggaagccaacatcccacttgagaaggctgatcacccagcagtccgtgctttcctatctcgccatgtgaagaatggaggctccatacctaagtcagaccagctacggagggcatatcttcctgatggatatgagaatgagaatcaactcctcaactcacaagattgttgactaggaggttaccaccattgtgatcaagataaatgtggagtattaaagttatgtgttgattgtgtggttcatttttgtatttatttcatttaaaatcatgtgacgcagaatagttttgcaatgtgtatatagttgcaggcaaaaaaaaaaccacctcactgcaaaacttattgttaattttagtcaccaatggtataaagcaaaacctaggtttagagtgtgctaggatacctgaaacctgatggttatctttaaaattaatggtttttctcctgaaatgtttgtgcatggaagaactgccctgcttttttaccctgttgccatgtatgattattccttgtgagattacttaattacttggattgaagactagcctattgaagctgctgccaggcaacaccacttaacagtaacttaaaggaattattttctttagaggatcctcttcaaaaaggaagggatagtggaaaactgttcttatatcttcagatccctagcagaaatgactgtttatttcaaactatgttttacttgtatatgatgtagtcaccttaactatctttcaattccatacttcccccgcccccattttaaaggcttattgttgtattttgtagcagcttcaagtgaccaaaagactaaaatctttcaacgtcaatgccaaaagccaaggggaattttgcagtgataggattttagtctcttactatgaatactaatttcgaaccatagctttcattttaagcatcatcttgaatttctaaacttttttctatgtcttggtgttaaaagatttcaagattggcatttttacttaaacagacattttatggttgagttttctctttattatagagaattagtaatttttttttggctgacagatcagataaaattactttctattcattaatttttctctacaactttatgagtttatttaggtgaatagtctagactagaaacaagtttactttatctgctttgcctctggtggtacaaggtttttaacatggattgtaaacaattgtctagaaattctggcaggttttttgtattggagatctggcagtatcctgcataactttgggtgaggaaattgttctcttaaagatcagccatgttcaggaaatgatctctgtttgaacctcactatcctgtaaggttatccaagtagcttagcccagctaagttctatcagagacccaaattatattttttaaaaatttaacagctggaaacttggactagagctttaataaaaaatcttaaattctttgaaattcaagttaaaaatacttatatatttctattacaaagcagtgacaaatgatgccctgtgtgacttggagttatctttgacttttaccacaaatcttcatttataaaagaaaaagccaaagtgaaaaaaagttagattgtgtatttttcagtaacagctttccatgtcttaagatttttttacagacttaagtttctaattcaggttgtcaaactggccatttgacttcagagatttgttttcattaaaaaataagcctgccgccaaaataaatcacttatcaaaatgtgaactgttttcctcatgttcagttatgttaaagtagtatgataaatgcatgcctagagtagtgctctcgttgatgaagcacatgtatgaggagaccagcagcaaaacataaccatatgtgttttgcgtttacttcctctagaaaagaatttgcaggcaaccatgtttaatttgaactatctaagatggtagattttagaagctaggaataattgagttttatagcactattttcagaatacaaaaagatacacaatcattctgttttttgaaattccatgtgattcaaactgttccctattatttgggtattaatttgcactaatagcaaaatgtaatggcagatcagctttgagagtggtcctaagcagtaaactggatgatgttgcattagaaaaacatcaataattcatatttaagttttagtagttactactgatttgataatcacttaaattttatatatcttaatgtattttttcagactcctaattaattcccacattcactgtaactaggggcatagtccattctgttaggattatatcctctccttagaaatgttttccatcctgttgtggggatttggtattaatgtttcttcattgattatggaacttttgttccctgaagctagttaactgtgtctaaagttaaataaatacagcagaatgattgttttagcctgctcgaactgatacaaatccctgaaaccatgattggcatatgttagataacaaatgaggatgtctaagaggcatatgctgctttggaggtgtagtgaacgtgtgtacagaagttttcaatcttaactatatagtgttagtgtgatgctatactattggaaaaatagcagcttttttctattttataagttgtatgcataaacataagatttgtaatgtttcatttataaactgccttcttcaacacatgttaatagtgttttctcaaagtattgatagtatgtcttccagaatttcacaatatgcttacagtaaatatttcctagcttgttgaaatgttcaattctttgttggctttcttcttgattctgtgggggtgtataacaagcctgaaggacattgtaatcatttcttacaaggtgaaaattaagaaagattgtgtatgagagcctatatagttgttttatccattatcatctttgattaagactttaaaaaaatgctatttccagttaatgcatttggccctattgaattttcagggaccagaaaacattaaaaagttctgcatcttataatggtaaccaattaagcttgagattgttctgaaagtatcaattgctttaaaactgttgtaagtacagttggcaagatctccaagctgaaacttacacgttaaaacttttgcctgtaagaatttgcacatgaatgttaatggaaaacacaaaacttaagatggcccaaaacaaaagccacaaacagttcatcatttggtgcttagtctttgtaagggctctctgtggtttgacttactccagctaccgttaaatgagggcaaatcaccttaaaacatgttcatttgattcataacaaggaaaattgggtctatgattttttgccaatcttagcctaaaagaaattgctttagcttctggtcagcactgattaaaatgtgaatagtgaagtggctatcctaaactggtttatctccacccacactatcatagatttcttaggtaaatacaattcttatctagtggtattctacttgtattcagaatactgtattaaaattttactatttcatttttgtattctgtgcttattttttttgctcacgcatgtatgcttagtataaatgtgtcacttctaaagttttgtctctgacttttagaaataaatttcagaaaaattgtttcaaaagattttgaaagcacattttgttttgtgagtcaatgacaaatatatttcctgattacaaaacagcagaaattactgagt

SEQ ID NO: 74845 - DNA, 5461 bp, Homo sapiens
gcggccgcctccgccaggcgcctgccgccgcctcccttgagactgccgccaagtcggctgtcgagttcccgggcccacagctggcacctgggactcggccttgcccagctagcggggtcgggacggctgggcgccggcgtgctgggcttggcgccggaggagagagcccagacgccgggaacgtcccgggccccgcctctcccccgcccccgcccgaacccccgggcctggggagctggaggaggtgccaagcgggcggaccaccgaggaggacctgggaggggaagtgttagggtaaacgttgggatcgggtttgtagttacctataaagtgattttagaaacacctgcgtggtggcagttgttgacgttcttgttcatcttttcagtcaccctccttccgtcccccattttttccttccatttgtttttcgtgttttacagtaaaggcatgacttcctggcaccacagggaaaatcgggtgcaagcccagaaactatttccccaccaccacttgttgaaaaactgatttgaaggcatctccggggttgaacaaacggaaagtgccaggatttgatgcgtctctggtttcgctctggagaccattccctgctaagtatcaagacgaaaaaaactggaaactaatccggtaaacatttaaacttgaaaacttatgatgagttttcttttgatctagcaaacgatatgctttttctcttttgttggctaattcctgcactttttaatttcttcatttgttgaaaatgttttcttctattgaaaacacttttgttcttcgggtatgtaaactcgagcatcctctactgggtggaaatttgcctctgcagtaacacaaacagacttcttgaaattacgaaaacattggaaagtataggcctttcacattagcacaaatgattgagcattttatgctataaagaattacatgcttattgtttttgaaatccaaatatttaaagatacaagactttttacatagaaagtaagacttaacgcattacggggcacaaatatttaatatctaccacaactaggttagaaccattaaccatatttggtatagttacctcatatttaccacaactaggttatatttggtatatttaccacaactaggttagaaccattaatcataattggtactgatttgtgagggagtgtaaaacacataccatttacttaaagtataaacgtgtaatggtaagtactagataggaatcataactgtcttctctgccgttgcaaacctgtagcctaacacaatatttggcaaatgagagctgtgcacttaaaaaaaaaaaaaaagtggaaaaaataaaatttattaaaacctagactttatcgtacttttcagaatttctgtggaatgtttaatcttctggatccatgactgtctgatacgttggcaatttaaagtccttttgaaagagagttcatgttacccagctattctctaaaccatatttatttagagtcagaatggagcgatttgtagtaacagcaccacctgctcgaaaccgttctaagactgctttgtatgtgactcccctggatcgagtcactgagtttggaggtgagctgcatgaagatggaggaaaactcttctgcacttcttgcaatgtggttctgaatcatgttcgcaagtctgccattagtgaccacctcaagtcaaagactcataccaagaggaaggcagaatttgaagagcagaatgtgagaaagaagcagaggcccctaactgcatctcttcagtgcaacagtactgcgcaaacagagaaagtcagtgttatccaggactttgtgaaaatgtgcctggaagccaacatcccacttgagaaggctgatcacccagcagtccgtgctttcctatctcgccatgtgaagaatggaggctccatacctaagtcagaccagctacggagggcatatcttcctgatggatatgagaatgagaatcaactcctcaactcacaagattgttgactaggaggttaccaccattgtgatcaagataaatgtggagtattaaagttatgtgttgattgtgtggttcatttttgtatttatttcatttaaaatcatgtgacgcagaatagttttgcaatgtgtatatagttgcaggcaaaaaaaaaaccacctcactgcaaaacttattgttaattttagtcaccaatggtataaagcaaaacctaggtttagagtgtgctaggatacctgaaacctgatggttatctttaaaattaatggtttttctcctgaaatgtttgtgcatggaagaactgccctgcttttttaccctgttgccatgtatgattattccttgtgagattacttaattacttggattgaagactagcctattgaagctgctgccaggcaacaccacttaacagtaacttaaaggaattattttctttagaggatcctcttcaaaaaggaagggatagtggaaaactgttcttatatcttcagatccctagcagaaatgactgtttatttcaaactatgttttacttgtatatgatgtagtcaccttaactatctttcaattccatacttcccccgcccccattttaaaggcttattgttgtattttgtagcagcttcaagtgaccaaaagactaaaatctttcaacgtcaatgccaaaagccaaggggaattttgcagtgataggattttagtctcttactatgaatactaatttcgaaccatagctttcattttaagcatcatcttgaatttctaaacttttttctatgtcttggtgttaaaagatttcaagattggcatttttacttaaacagacattttatggttgagttttctctttattatagagaattagtaatttttttttggctgacagatcagataaaattactttctattcattaatttttctctacaactttatgagtttatttaggtgaatagtctagactagaaacaagtttactttatctgctttgcctctggtggtacaaggtttttaacatggattgtaaacaattgtctagaaattctggcaggttttttgtattggagatctggcagtatcctgcataactttgggtgaggaaattgttctcttaaagatcagccatgttcaggaaatgatctctgtttgaacctcactatcctgtaaggttatccaagtagcttagcccagctaagttctatcagagacccaaattatattttttaaaaatttaacagctggaaacttggactagagctttaataaaaaatcttaaattctttgaaattcaagttaaaaatacttatatatttctattacaaagcagtgacaaatgatgccctgtgtgacttggagttatctttgacttttaccacaaatcttcatttataaaagaaaaagccaaagtgaaaaaaagttagattgtgtatttttcagtaacagctttccatgtcttaagatttttttacagacttaagtttctaattcaggttgtcaaactggccatttgacttcagagatttgttttcattaaaaaataagcctgccgccaaaataaatcacttatcaaaatgtgaactgttttcctcatgttcagttatgttaaagtagtatgataaatgcatgcctagagtagtgctctcgttgatgaagcacatgtatgaggagaccagcagcaaaacataaccatatgtgttttgcgtttacttcctctagaaaagaatttgcaggcaaccatgtttaatttgaactatctaagatggtagattttagaagctaggaataattgagttttatagcactattttcagaatacaaaaagatacacaatcattctgttttttgaaattccatgtgattcaaactgttccctattatttgggtattaatttgcactaatagcaaaatgtaatggcagatcagctttgagagtggtcctaagcagtaaactggatgatgttgcattagaaaaacatcaataattcatatttaagttttagtagttactactgatttgataatcacttaaattttatatatcttaatgtattttttcagactcctaattaattcccacattcactgtaactaggggcatagtccattctgttaggattatatcctctccttagaaatgttttccatcctgttgtggggatttggtattaatgtttcttcattgattatggaacttttgttccctgaagctagttaactgtgtctaaagttaaataaatacagcagaatgattgttttagcctgctcgaactgatacaaatccctgaaaccatgattggcatatgttagataacaaatgaggatgtctaagaggcatatgctgctttggaggtgtagtgaacgtgtgtacagaagttttcaatcttaactatatagtgttagtgtgatgctatactattggaaaaatagcagcttttttctattttataagttgtatgcataaacataagatttgtaatgtttcatttataaactgccttcttcaacacatgttaatagtgttttctcaaagtattgatagtatgtcttccagaatttcacaatatgcttacagtaaatatttcctagcttgttgaaatgttcaattctttgttggctttcttcttgattctgtgggggtgtataacaagcctgaaggacattgtaatcatttcttacaaggtgaaaattaagaaagattgtgtatgagagcctatatagttgttttatccattatcatctttgattaagactttaaaaaaatgctatttccagttaatgcatttggccctattgaattttcagggaccagaaaacattaaaaagttctgcatcttataatggtaaccaattaagcttgagattgttctgaaagtatcaattgctttaaaactgttgtaagtacagttggcaagatctccaagctgaaacttacacgttaaaacttttgcctgtaagaatttgcacatgaatgttaatggaaaacacaaaacttaagatggcccaaaacaaaagccacaaacagttcatcatttggtgcttagtctttgtaagggctctctgtggtttgacttactccagctaccgttaaatgagggcaaatcaccttaaaacatgttcatttgattcataacaaggaaaattgggtctatgattttttgccaatcttagcctaaaagaaattgctttagcttctggtcagcactgattaaaatgtgaatagtgaagtggctatcctaaactggtttatctccacccacactatcatagatttcttaggtaaatacaattcttatctagtggtattctacttgtattcagaatactgtattaaaattttactatttcatttttgtattctgtgcttattttttttgctcacgcatgtatgcttagtataaatgtgtcacttctaaagttttgtctctgacttttagaaataaatttcagaaaaattgtttcaaa

SEQ ID NO: 74846 - DNA, 5407 bp, Homo sapiens
gcggccgcctccgccaggcgcctgccgccgcctcccttgagactgccgccaagtcggctgtcgagttcccgggcccacagctggcacctgggactcggccttgcccagctagcggggtcgggacggctgggcgccggcgtgctgggcttggcgccggaggagagagcccagacgccgggaacgtcccgggccccgcctctcccccgcccccgcccgaacccccgggcctggggagctggaggaggtgccaagcgggcggaccaccgaggaggacctgggaggggaagtgttagggtaaacgttgggatcgggtttgtagttacctataaagtgattttagaaacacctgcgtggtggcagttgttgacgttcttgttcatcttttcagtcaccctccttccgtcccccattttttccttccatttgtttttcgtgttttacagtaaaggcatgacttcctggcaccacagggaaaatcgggtgcaagcccagaaactatttccccaccaccacttgatttgatgcgtctctggtttcgctctggagaccattccctgctaagtatcaagacgaaaaaaactggaaactaatccggtaaacatttaaacttgaaaacttatgatgagttttcttttgatctagcaaacgatatgctttttctcttttgttggctaattcctgcactttttaatttcttcatttgttgaaaatgttttcttctattgaaaacacttttgttcttcgggtatgtaaactcgagcatcctctactgggtggaaatttgcctctgcagtaacacaaacagacttcttgaaattacgaaaacattggaaagtataggcctttcacattagcacaaatgattgagcattttatgctataaagaattacatgcttattgtttttgaaatccaaatatttaaagatacaagactttttacatagaaagtaagacttaacgcattacggggcacaaatatttaatatctaccacaactaggttagaaccattaaccatatttggtatagttacctcatatttaccacaactaggttatatttggtatatttaccacaactaggttagaaccattaatcataattggtactgatttgtgagggagtgtaaaacacataccatttacttaaagtataaacgtgtaatggtaagtactagataggaatcataactgtcttctctgccgttgcaaacctgtagcctaacacaatatttggcaaatgagagctgtgcacttaaaaaaaaaaaaaaagtggaaaaaataaaatttattaaaacctagactttatcgtacttttcagaatttctgtggaatgtttaatcttctggatccatgactgtctgatacgttggcaatttaaagtccttttgaaagagagttcatgttacccagctattctctaaaccatatttatttagagtcagaatggagcgatttgtagtaacagcaccacctgctcgaaaccgttctaagactgctttgtatgtgactcccctggatcgagtcactgagtttggaggtgagctgcatgaagatggaggaaaactcttctgcacttcttgcaatgtggttctgaatcatgttcgcaagtctgccattagtgaccacctcaagtcaaagactcataccaagaggaaggcagaatttgaagagcagaatgtgagaaagaagcagaggcccctaactgcatctcttcagtgcaacagtactgcgcaaacagagaaagtcagtgttatccaggactttgtgaaaatgtgcctggaagccaacatcccacttgagaaggctgatcacccagcagtccgtgctttcctatctcgccatgtgaagaatggaggctccatacctaagtcagaccagctacggagggcatatcttcctgatggatatgagaatgagaatcaactcctcaactcacaagattgttgactaggaggttaccaccattgtgatcaagataaatgtggagtattaaagttatgtgttgattgtgtggttcatttttgtatttatttcatttaaaatcatgtgacgcagaatagttttgcaatgtgtatatagttgcaggcaaaaaaaaaaccacctcactgcaaaacttattgttaattttagtcaccaatggtataaagcaaaacctaggtttagagtgtgctaggatacctgaaacctgatggttatctttaaaattaatggtttttctcctgaaatgtttgtgcatggaagaactgccctgcttttttaccctgttgccatgtatgattattccttgtgagattacttaattacttggattgaagactagcctattgaagctgctgccaggcaacaccacttaacagtaacttaaaggaattattttctttagaggatcctcttcaaaaaggaagggatagtggaaaactgttcttatatcttcagatccctagcagaaatgactgtttatttcaaactatgttttacttgtatatgatgtagtcaccttaactatctttcaattccatacttcccccgcccccattttaaaggcttattgttgtattttgtagcagcttcaagtgaccaaaagactaaaatctttcaacgtcaatgccaaaagccaaggggaattttgcagtgataggattttagtctcttactatgaatactaatttcgaaccatagctttcattttaagcatcatcttgaatttctaaacttttttctatgtcttggtgttaaaagatttcaagattggcatttttacttaaacagacattttatggttgagttttctctttattatagagaattagtaatttttttttggctgacagatcagataaaattactttctattcattaatttttctctacaactttatgagtttatttaggtgaatagtctagactagaaacaagtttactttatctgctttgcctctggtggtacaaggtttttaacatggattgtaaacaattgtctagaaattctggcaggttttttgtattggagatctggcagtatcctgcataactttgggtgaggaaattgttctcttaaagatcagccatgttcaggaaatgatctctgtttgaacctcactatcctgtaaggttatccaagtagcttagcccagctaagttctatcagagacccaaattatattttttaaaaatttaacagctggaaacttggactagagctttaataaaaaatcttaaattctttgaaattcaagttaaaaatacttatatatttctattacaaagcagtgacaaatgatgccctgtgtgacttggagttatctttgacttttaccacaaatcttcatttataaaagaaaaagccaaagtgaaaaaaagttagattgtgtatttttcagtaacagctttccatgtcttaagatttttttacagacttaagtttctaattcaggttgtcaaactggccatttgacttcagagatttgttttcattaaaaaataagcctgccgccaaaataaatcacttatcaaaatgtgaactgttttcctcatgttcagttatgttaaagtagtatgataaatgcatgcctagagtagtgctctcgttgatgaagcacatgtatgaggagaccagcagcaaaacataaccatatgtgttttgcgtttacttcctctagaaaagaatttgcaggcaaccatgtttaatttgaactatctaagatggtagattttagaagctaggaataattgagttttatagcactattttcagaatacaaaaagatacacaatcattctgttttttgaaattccatgtgattcaaactgttccctattatttgggtattaatttgcactaatagcaaaatgtaatggcagatcagctttgagagtggtcctaagcagtaaactggatgatgttgcattagaaaaacatcaataattcatatttaagttttagtagttactactgatttgataatcacttaaattttatatatcttaatgtattttttcagactcctaattaattcccacattcactgtaactaggggcatagtccattctgttaggattatatcctctccttagaaatgttttccatcctgttgtggggatttggtattaatgtttcttcattgattatggaacttttgttccctgaagctagttaactgtgtctaaagttaaataaatacagcagaatgattgttttagcctgctcgaactgatacaaatccctgaaaccatgattggcatatgttagataacaaatgaggatgtctaagaggcatatgctgctttggaggtgtagtgaacgtgtgtacagaagttttcaatcttaactatatagtgttagtgtgatgctatactattggaaaaatagcagcttttttctattttataagttgtatgcataaacataagatttgtaatgtttcatttataaactgccttcttcaacacatgttaatagtgttttctcaaagtattgatagtatgtcttccagaatttcacaatatgcttacagtaaatatttcctagcttgttgaaatgttcaattctttgttggctttcttcttgattctgtgggggtgtataacaagcctgaaggacattgtaatcatttcttacaaggtgaaaattaagaaagattgtgtatgagagcctatatagttgttttatccattatcatctttgattaagactttaaaaaaatgctatttccagttaatgcatttggccctattgaattttcagggaccagaaaacattaaaaagttctgcatcttataatggtaaccaattaagcttgagattgttctgaaagtatcaattgctttaaaactgttgtaagtacagttggcaagatctccaagctgaaacttacacgttaaaacttttgcctgtaagaatttgcacatgaatgttaatggaaaacacaaaacttaagatggcccaaaacaaaagccacaaacagttcatcatttggtgcttagtctttgtaagggctctctgtggtttgacttactccagctaccgttaaatgagggcaaatcaccttaaaacatgttcatttgattcataacaaggaaaattgggtctatgattttttgccaatcttagcctaaaagaaattgctttagcttctggtcagcactgattaaaatgtgaatagtgaagtggctatcctaaactggtttatctccacccacactatcatagatttcttaggtaaatacaattcttatctagtggtattctacttgtattcagaatactgtattaaaattttactatttcatttttgtattctgtgcttattttttttgctcacgcatgtatgcttagtataaatgtgtcacttctaaagttttgtctctgacttttagaaataaatttcagaaaaattgtttcaaa

SEQ ID NO: 74847 - DNA, 4474 bp, Homo sapiens
aaacgcagtgccctcacttgtggttccgggctggggacggagtgaagtcccacgtatctcaattaagggaagtgctgggtttatatggagaacatagactatccgcaagggagctggttaccgaaagagaagtccctcctccaaaagagcgccttggagggctgcgcaggtgcagatacctctactaagaagacagaagacttactttcatcatctgaatcaaatccaaagagtgtctgacatttcttttgtgcaagatgagcctcaagtgcttctgcattacataaaggcatgacttcctggcaccacagggaaaatcgggtgcaagcccagaaactatttccccaccaccacttgttgaaaaactgatttgaaggcatctccggggttgaacaaacggaaagtgccaggatttgatgcgtctctggtttcgctctggagaccattccctgctaagtatcaagacgaaaaaaactggaaactaatccgaaccatatttatttagagtcagaatggagcgatttgtagtaacagcaccacctgctcgaaaccgttctaagactgctttgtatgtgactcccctggatcgagtcactgagtttggaggtgagctgcatgaagatggaggaaaactcttctgcacttcttgcaatgtggttctgaatcatgttcgcaagtctgccattagtgaccacctcaagtcaaagactcataccaagaggaaggcagaatttgaagagcagaatgtgagaaagaagcagaggcccctaactgcatctcttcagtgcaacagtactgcgcaaacagagaaagtcagtgttatccaggactttgtgaaaatgtgcctggaagccaacatcccacttgagaaggctgatcacccagcagtccgtgctttcctatctcgccatgtgaagaatggaggctccatacctaagtcagaccagctacggagggcatatcttcctgatggatatgagaatgagaatcaactcctcaactcacaagattgttgactaggaggttaccaccattgtgatcaagataaatgtggagtattaaagttatgtgttgattgtgtggttcatttttgtatttatttcatttaaaatcatgtgacgcagaatagttttgcaatgtgtatatagttgcaggcaaaaaaaaaaccacctcactgcaaaacttattgttaattttagtcaccaatggtataaagcaaaacctaggtttagagtgtgctaggatacctgaaacctgatggttatctttaaaattaatggtttttctcctgaaatgtttgtgcatggaagaactgccctgcttttttaccctgttgccatgtatgattattccttgtgagattacttaattacttggattgaagactagcctattgaagctgctgccaggcaacaccacttaacagtaacttaaaggaattattttctttagaggatcctcttcaaaaaggaagggatagtggaaaactgttcttatatcttcagatccctagcagaaatgactgtttatttcaaactatgttttacttgtatatgatgtagtcaccttaactatctttcaattccatacttcccccgcccccattttaaaggcttattgttgtattttgtagcagcttcaagtgaccaaaagactaaaatctttcaacgtcaatgccaaaagccaaggggaattttgcagtgataggattttagtctcttactatgaatactaatttcgaaccatagctttcattttaagcatcatcttgaatttctaaacttttttctatgtcttggtgttaaaagatttcaagattggcatttttacttaaacagacattttatggttgagttttctctttattatagagaattagtaatttttttttggctgacagatcagataaaattactttctattcattaatttttctctacaactttatgagtttatttaggtgaatagtctagactagaaacaagtttactttatctgctttgcctctggtggtacaaggtttttaacatggattgtaaacaattgtctagaaattctggcaggttttttgtattggagatctggcagtatcctgcataactttgggtgaggaaattgttctcttaaagatcagccatgttcaggaaatgatctctgtttgaacctcactatcctgtaaggttatccaagtagcttagcccagctaagttctatcagagacccaaattatattttttaaaaatttaacagctggaaacttggactagagctttaataaaaaatcttaaattctttgaaattcaagttaaaaatacttatatatttctattacaaagcagtgacaaatgatgccctgtgtgacttggagttatctttgacttttaccacaaatcttcatttataaaagaaaaagccaaagtgaaaaaaagttagattgtgtatttttcagtaacagctttccatgtcttaagatttttttacagacttaagtttctaattcaggttgtcaaactggccatttgacttcagagatttgttttcattaaaaaataagcctgccgccaaaataaatcacttatcaaaatgtgaactgttttcctcatgttcagttatgttaaagtagtatgataaatgcatgcctagagtagtgctctcgttgatgaagcacatgtatgaggagaccagcagcaaaacataaccatatgtgttttgcgtttacttcctctagaaaagaatttgcaggcaaccatgtttaatttgaactatctaagatggtagattttagaagctaggaataattgagttttatagcactattttcagaatacaaaaagatacacaatcattctgttttttgaaattccatgtgattcaaactgttccctattatttgggtattaatttgcactaatagcaaaatgtaatggcagatcagctttgagagtggtcctaagcagtaaactggatgatgttgcattagaaaaacatcaataattcatatttaagttttagtagttactactgatttgataatcacttaaattttatatatcttaatgtattttttcagactcctaattaattcccacattcactgtaactaggggcatagtccattctgttaggattatatcctctccttagaaatgttttccatcctgttgtggggatttggtattaatgtttcttcattgattatggaacttttgttccctgaagctagttaactgtgtctaaagttaaataaatacagcagaatgattgttttagcctgctcgaactgatacaaatccctgaaaccatgattggcatatgttagataacaaatgaggatgtctaagaggcatatgctgctttggaggtgtagtgaacgtgtgtacagaagttttcaatcttaactatatagtgttagtgtgatgctatactattggaaaaatagcagcttttttctattttataagttgtatgcataaacataagatttgtaatgtttcatttataaactgccttcttcaacacatgttaatagtgttttctcaaagtattgatagtatgtcttccagaatttcacaatatgcttacagtaaatatttcctagcttgttgaaatgttcaattctttgttggctttcttcttgattctgtgggggtgtataacaagcctgaaggacattgtaatcatttcttacaaggtgaaaattaagaaagattgtgtatgagagcctatatagttgttttatccattatcatctttgattaagactttaaaaaaatgctatttccagttaatgcatttggccctattgaattttcagggaccagaaaacattaaaaagttctgcatcttataatggtaaccaattaagcttgagattgttctgaaagtatcaattgctttaaaactgttgtaagtacagttggcaagatctccaagctgaaacttacacgttaaaacttttgcctgtaagaatttgcacatgaatgttaatggaaaacacaaaacttaagatggcccaaaacaaaagccacaaacagttcatcatttggtgcttagtctttgtaagggctctctgtggtttgacttactccagctaccgttaaatgagggcaaatcaccttaaaacatgttcatttgattcataacaaggaaaattgggtctatgattttttgccaatcttagcctaaaagaaattgctttagcttctggtcagcactgattaaaatgtgaatagtgaagtggctatcctaaactggtttatctccacccacactatcatagatttcttaggtaaatacaattcttatctagtggtattctacttgtattcagaatactgtattaaaattttactatttcatttttgtattctgtgcttattttttttgctcacgcatgtatgcttagtataaatgtgtcacttctaaagttttgtctctgacttttagaaataaatttcagaaaaattgtttcaaa

SEQ ID NO: 74848 - DNA, 4620 bp, Homo sapiens
  misc_feature (4423)..(4423): n is a, c, g, or t
  misc_feature (4431)..(4431): n is a, c, g, or t
tgctggggaccgcctacgggctctgccataggcggtgcaggcggacggggcgcggcgggggacacggcggccgccgcggggctcgatcgggcaacggcggcgacggcggcagcgacggatcctcctcctcccttattcccttgctcctctttcttccttttcttttcctttccggccgggcctcgtccactttccctaacggcggcctcgatcctacgtaaaggcatgacttcctggcaccacagggaaaatcgggtgcaagcccagaaactatttccccaccaccacttgttgaaaaactgatttgaaggcatctccggggttgaacaaacggaaagtgccaggatttgatgcgtctctggtttcgctctggagaccattccctgctaagtatcaagacgaaaaaaactggaaactaatccgaaccatatttatttagagtcagaatggagcgatttgtagtaacagcaccacctgctcgaaaccgttctaagactgctttgtatgtgactcccctggatcgagtcactgagtttggaggtgagctgcatgaagatggaggaaaactcttctgcacttcttgcaatgtggttctgaatcatgttcgcaagtctgccattagtgaccacctcaagtcaaagactcataccaagaggaaggcagaatttgaagagcagaatgtgagaaagaagcagaggcccctaactgcatctcttcagtgcaacagtactgcgcaaacagagaaagtcagtgttatccaggactttgtgaaaatgtgcctggaagccaacatcccacttgagaaggctgatcacccagcagtccgtgctttcctatctcgccatgtgaagaatggaggctccatacctaagtcagaccagctacggagggcatatcttcctgatggatatgagaatgagaatcaactcctcaactcacaagattgttgactaggaggttaccaccattgtgatcaagataaatgtggagtattaaagttatgtgttgattgtgtggttcatttttgtatttatttcatttaaaatcatgtgacgcagaatagttttgcaatgtgtatatagttgcaggcaaaaaaaaaaccacctcactgcaaaacttattgttaattttagtcaccaatggtataaagcaaaacctaggtttagagtgtgctaggatacctgaaacctgatggttatctttaaaattaatggtttttctcctgaaatgtttgtgcatggaagaactgccctgcttttttaccctgttgccatgtatgattattccttgtgagattacttaattacttggattgaagactagcctattgaagctgctgccaggcaacaccacttaacagtaacttaaaggaattattttctttagaggatcctcttcaaaaaggaagggatagtggaaaactgttcttatatcttcagatccctagcagaaatgactgtttatttcaaactatgttttacttgtatatgatgtagtcaccttaactatctttcaattccatacttcccccgcccccattttaaaggcttattgttgtattttgtagcagcttcaagtgaccaaaagactaaaatctttcaacgtcaatgccaaaagccaaggggaattttgcagtgataggattttagtctcttactatgaatactaatttcgaaccatagctttcattttaagcatcatcttgaatttctaaacttttttctatgtcttggtgttaaaagatttcaagattggcatttttacttaaacagacattttatggttgagttttctctttattatagagaattagtaatttttttttggctgacagatcagataaaattactttctattcattaatttttctctacaactttatgagtttatttaggtgaatagtctagactagaaacaagtttactttatctgctttgcctctggtggtacaaggtttttaacatggattgtaaacaattgtctagaaattctggcaggttttttgtattggagatctggcagtatcctgcataactttgggtgaggaaattgttctcttaaagatcagccatgttcaggaaatgatctctgtttgaacctcactatcctgtaaggttatccaagtagcttagcccagctaagttctatcagagacccaaattatattttttaaaaatttaacagctggaaacttggactagagctttaataaaaaatcttaaattctttgaaattcaagttaaaaatacttatatatttctattacaaagcagtgacaaatgatgccctgtgtgacttggagttatctttgacttttaccacaaatcttcatttataaaagaaaaagccaaagtgaaaaaaagttagattgtgtatttttcagtaacagctttccatgtcttaagatttttttacagacttaagtttctaattcaggttgtcaaactggccatttgacttcagagatttgttttcattaaaaaataagcctgccgccaaaataaatcacttatcaaaatgtgaactgttttcctcatgttcagttatgttaaagtagtatgataaatgcatgcctagagtagtgctctcgttgatgaagcacatgtatgaggagaccagcagcaaaacataaccatatgtgttttgcgtttacttcctctagaaaagaatttgcaggcaaccatgtttaatttgaactatctaagatggtagattttagaagctaggaataattgagttttatagcactattttcagaatacaaaaagatacacaatcattctgttttttgaaattccatgtgattcaaactgttccctattatttgggtattaatttgcactaatagcaaaatgtaatggcagatcagctttgagagtggtcctaagcagtaaactggatgatgttgcattagaaaaacatcaataattcatatttaagttttagtagttactactgatttgataatcacttaaattttatatatcttaatgtattttttcagactcctaattaattcccacattcactgtaactaggggcatagtccattctgttaggattatatcctctccttagaaatgttttccatcctgttgtggggatttggtattaatgtttcttcattgattatggaacttttgttccctgaagctagttaactgtgtctaaagttaaataaatacagcagaatgattgttttagcctgctcgaactgatacaaatccctgaaaccatgattggcatatgttagataacaaatgaggatgtctaagaggcatatgctgctttggaggtgtagtgaacgtgtgtacagaagttttcaatcttaactatatagtgttagtgtgatgctatactattggaaaaatagcagcttttttctattttataagttgtatgcataaacataagatttgtaatgtttcatttataaactgccttcttcaacacatgttaatagtgttttctcaaagtattgatagtatgtcttccagaatttcacaatatgcttacagtaaatatttcctagcttgttgaaatgttcaattctttgttggctttcttcttgattctgtgggggtgtataacaagcctgaaggacattgtaatcatttcttacaaggtgaaaattaagaaagattgtgtatgagagcctatatagttgttttatccattatcatctttgattaagactttaaaaaaatgctatttccagttaatgcatttggccctattgaattttcagggaccagaaaacattaaaaagttctgcatcttataatggtaaccaattaagcttgagattgttctgaaagtatcaattgctttaaaactgttgtaagtacagttggcaagatctccaagctgaaacttacacgttaaaacttttgcctgtaagaatttgcacatgaatgttaatggaaaacacaaaacttaagatggcccaaaacaaaagccacaaacagttcatcatttggtgcttagtctttgtaagggctctctgtggtttgacttactccagctaccgttaaatgagggcaaatcaccttaaaacatgttcatttgattcataacaaggaaaattgggtctatgattttttgccaatcttagcctaaaagaaattgctttagcttctggtcagcactgattaaaatgtgaatagtgaagtggctatcctaaactggtttatctccacccacactatcatagatttcttaggtaaatacaattcttatctagtggtattctacttgtattcagaatactgtattaaaattttactatttcatttttgtattctgtgcttattttttttgctcacgcatgtatgcttagtataaatgtgtcacttctaaagttttgtctctgacttttagaaataaatttcagaaaaattgtttcaaaaaaaaaaaaaaaaanaaaaaaanaaaaaaaaaaaaataattataaattaattaaattaaaaaaaaaaaaccttgtggcccgtttggcccaattgatttttaaattggacaaggtttttcatgccgccgatatttgggctaatttggccaattcgccctataagggagcgtttaaacattaaatggccgggtttttaaaaggttgaactggga

SEQ ID NO: 74849 - DNA, 4433 bp, Homo sapiens
tgctggggaccgcctacgggctctgccataggcggtgcaggcggacggggcgcggcgggggacacggcggccgccgcggggctcgatcgggcaacggcggcgacggcggcagcgacggatcctcctcctcccttattcccttgctcctctttcttccttttcttttcctttccggccgggcctcgtccactttccctaacggcggcctcgatcctacgtaaaggcatgacttcctggcaccacagggaaaatcgggtgcaagcccagaaactatttccccaccaccacttgttgaaaaactgatttgaaggcatctccggggttgaacaaacggaaagtgccaggatttgatgcgtctctggtttcgctctggagaccattccctgctaagtatcaagacgaaaaaaactggaaactaatccgaaccatatttatttagagtcagaatggagcgatttgtagtaacagcaccacctgctcgaaaccgttctaagactgctttgtatgtgactcccctggatcgagtcactgagtttggaggtgagctgcatgaagatggaggaaaactcttctgcacttcttgcaatgtggttctgaatcatgttcgcaagtctgccattagtgaccacctcaagtcaaagactcataccaagaggaaggcagaatttgaagagcagaatgtgagaaagaagcagaggcccctaactgcatctcttcagtgcaacagtactgcgcaaacagagaaagtcagtgttatccaggactttgtgaaaatgtgcctggaagccaacatcccacttgagaaggctgatcacccagcagtccgtgctttcctatctcgccatgtgaagaatggaggctccatacctaagtcagaccagctacggagggcatatcttcctgatggatatgagaatgagaatcaactcctcaactcacaagattgttgactaggaggttaccaccattgtgatcaagataaatgtggagtattaaagttatgtgttgattgtgtggttcatttttgtatttatttcatttaaaatcatgtgacgcagaatagttttgcaatgtgtatatagttgcaggcaaaaaaaaaaccacctcactgcaaaacttattgttaattttagtcaccaatggtataaagcaaaacctaggtttagagtgtgctaggatacctgaaacctgatggttatctttaaaattaatggtttttctcctgaaatgtttgtgcatggaagaactgccctgcttttttaccctgttgccatgtatgattattccttgtgagattacttaattacttggattgaagactagcctattgaagctgctgccaggcaacaccacttaacagtaacttaaaggaattattttctttagaggatcctcttcaaaaaggaagggatagtggaaaactgttcttatatcttcagatccctagcagaaatgactgtttatttcaaactatgttttacttgtatatgatgtagtcaccttaactatctttcaattccatacttcccccgcccccattttaaaggcttattgttgtattttgtagcagcttcaagtgaccaaaagactaaaatctttcaacgtcaatgccaaaagccaaggggaattttgcagtgataggattttagtctcttactatgaatactaatttcgaaccatagctttcattttaagcatcatcttgaatttctaaacttttttctatgtcttggtgttaaaagatttcaagattggcatttttacttaaacagacattttatggttgagttttctctttattatagagaattagtaatttttttttggctgacagatcagataaaattactttctattcattaatttttctctacaactttatgagtttatttaggtgaatagtctagactagaaacaagtttactttatctgctttgcctctggtggtacaaggtttttaacatggattgtaaacaattgtctagaaattctggcaggttttttgtattggagatctggcagtatcctgcataactttgggtgaggaaattgttctcttaaagatcagccatgttcaggaaatgatctctgtttgaacctcactatcctgtaaggttatccaagtagcttagcccagctaagttctatcagagacccaaattatattttttaaaaatttaacagctggaaacttggactagagctttaataaaaaatcttaaattctttgaaattcaagttaaaaatacttatatatttctattacaaagcagtgacaaatgatgccctgtgtgacttggagttatctttgacttttaccacaaatcttcatttataaaagaaaaagccaaagtgaaaaaaagttagattgtgtatttttcagtaacagctttccatgtcttaagatttttttacagacttaagtttctaattcaggttgtcaaactggccatttgacttcagagatttgttttcattaaaaaataagcctgccgccaaaataaatcacttatcaaaatgtgaactgttttcctcatgttcagttatgttaaagtagtatgataaatgcatgcctagagtagtgctctcgttgatgaagcacatgtatgaggagaccagcagcaaaacataaccatatgtgttttgcgtttacttcctctagaaaagaatttgcaggcaaccatgtttaatttgaactatctaagatggtagattttagaagctaggaataattgagttttatagcactattttcagaatacaaaaagatacacaatcattctgttttttgaaattccatgtgattcaaactgttccctattatttgggtattaatttgcactaatagcaaaatgtaatggcagatcagctttgagagtggtcctaagcagtaaactggatgatgttgcattagaaaaacatcaataattcatatttaagttttagtagttactactgatttgataatcacttaaattttatatatcttaatgtattttttcagactcctaattaattcccacattcactgtaactaggggcatagtccattctgttaggattatatcctctccttagaaatgttttccatcctgttgtggggatttggtattaatgtttcttcattgattatggaacttttgttccctgaagctagttaactgtgtctaaagttaaataaatacagcagaatgattgttttagcctgctcgaactgatacaaatccctgaaaccatgattggcatatgttagataacaaatgaggatgtctaagaggcatatgctgctttggaggtgtagtgaacgtgtgtacagaagttttcaatcttaactatatagtgttagtgtgatgctatactattggaaaaatagcagcttttttctattttataagttgtatgcataaacataagatttgtaatgtttcatttataaactgccttcttcaacacatgttaatagtgttttctcaaagtattgatagtatgtcttccagaatttcacaatatgcttacagtaaatatttcctagcttgttgaaatgttcaattctttgttggctttcttcttgattctgtgggggtgtataacaagcctgaaggacattgtaatcatttcttacaaggtgaaaattaagaaagattgtgtatgagagcctatatagttgttttatccattatcatctttgattaagactttaaaaaaatgctatttccagttaatgcatttggccctattgaattttcagggaccagaaaacattaaaaagttctgcatcttataatggtaaccaattaagcttgagattgttctgaaagtatcaattgctttaaaactgttgtaagtacagttggcaagatctccaagctgaaacttacacgttaaaacttttgcctgtaagaatttgcacatgaatgttaatggaaaacacaaaacttaagatggcccaaaacaaaagccacaaacagttcatcatttggtgcttagtctttgtaagggctctctgtggtttgacttactccagctaccgttaaatgagggcaaatcaccttaaaacatgttcatttgattcataacaaggaaaattgggtctatgattttttgccaatcttagcctaaaagaaattgctttagcttctggtcagcactgatttcatagatttcttaggtaaatacaattcttatctagtggtattctacttgtattcagaatactgtattaaaattttactatttcatttttgtattctgtgcttattttttttgctcacgcatgtatgcttagtataaatgtgtcacttctaaagttttgtctctgacttttagaaataaatttcagaaaaattgtttcaaaagattttgaaagcacattttgttttgtgagtcaatgacaaatatatttcctgattacaaaacagcagaaattactgagt

SEQ ID NO: 74850 - DNA, 3576 bp, Homo sapiens
tgctggggaccgcctacgggctctgccataggcggtgcaggcggacggggcgcggcgggggacacggcggccgccgcggggctcgatcgggcaacggcggcgacggcggcagcgacggatcctcctcctcccttattcccttgctcctctttcttccttttcttttcctttccggccgggcctcgtccactttccctaacggcggcctcgatcctacgtaaaggcatgacttcctggcaccacagggaaaatcgggtgcaagcccagaaactatttccccaccaccacttgttgaaaaactgatttgaaggcatctccggggttgaacaaacggaaagtgccaggatttgatgcgtctctggtttcgctctggagaccattccctgctaagtatcaagacgaaaaaaactggaaactaatccgaaccatatttatttagagtcagaatggagcgatttgtagtaacagcaccacctgctcgaaaccgttctaagactgctttgtatgtgactcccctggatcgagtcactgagtttggaggtgagctgcatgaagatggaggaaaactcttctgcacttcttgcaatgtggttctgaatcatgttcgcaagtctgccattagtgaccacctcaagtcaaagactcataccaagaggaaggcagaatttgaagagcagaatgtgagaaagaagcagaggcccctaactgcatctcttcagtgcaacagtactgcgcaaacagagaaagtcagtgttatccaggactttgtgaaaatgtgcctggaagccaacatcccacttgagaaggctgatcacccagcagtccgtgctttcctatctcgccatgtgaagaatggaggctccatacctaagtcagaccagctacggagggcatatcttcctgatggatatgagaatgagaatcaactcctcaactcacaagattgttgactaggaggttaccaccattgtgatcaagataaatgtggagtattaaagttatgtgttgattgtgtggttcatttttgtatttatttcatttaaaatcatgtgacgcagaatagttttgcaatgtgtatatagttgcaggcaaaaaaaaaaccacctcactgcaaaacttattgttaattttagtcaccaatggtataaagcaaaacctaggtttagagtgtgctaggatacctgaaacctgatggttatctttaaaattaatggtttttctcctgaaatgtttgtgcatggaagaactgccctgcttttttaccctgttgccatgtatgattattccttgtgagattacttaattacttggattgaagactagcctattgaagctgctgccaggcaacaccacttaacagtaacttaaaggaattattttctttagaggatcctcttcaaaaaggaagggatagtggaaaactgttcttatatcttcagatccctagcagaaatgactgtttatttcaaactatgttttacttgtatatgatgtagtcaccttaactatctttcaattccatacttcccccgcccccattttaaaggcttattgttgtattttgtagcagcttcaagtgaccaaaagactaaaatctttcaacgtcaatgccaaaagccaaggggaattttgcagtgataggattttagtctcttactatgaatactaatttcgaaccatagctttcattttaagcatcatcttgaatttctaaacttttttctatgtcttggtgttaaaagatttcaagattggcatttttacttaaacagacattttatggttgagttttctctttattatagagaattagtaatttttttttggctgacagatcagataaaattactttctattcattaatttttctctacaactttatgagtttatttaggtgaatagtctagactagaaacaagtttactttatctgctttgcctctggtggtacaaggtttttaacatggattgtaaacaattgtctagaaattctggcaggttttttgtattggagatctggcagtatcctgcataactttgggtgaggaaattgttctcttaaagatcagccatgttcaggaaatgatctctgtttgaacctcactatcctgtaaggttatccaagtagcttagcccagctaagttctatcagagacccaaattatattttttaaaaatttaacagctggaaacttggactagagctttaataaaaaatcttaaattctttgaaattcaagttaaaaatacttatatatttctattacaaagcagtgacaaatgatgccctgtgtgacttggagttatctttgacttttaccacaaatcttcatttataaaagaaaaagccaaagtgaaaaaaagttagattgtgtatttttcagtaacagctttccatgtcttaagatttttttacagacttaagtttctaattcaggttgtcaaactggccatttgacttcagagatttgttttcattaaaaaataagcctgccgccaaaataaatcacttatcaaaatgtgaactgttttcctcatgttcagttatgttaaagtagtatgataaatgcatgcctagagtagtgctctcgttgatgaagcacatgtatgaggagaccagcagcaaaacataaccatatgtgttttgcgtttacttcctctagaaaagaatttgcaggcaaccatgtttaatttgaactatctaagatggtagattttagaagctaggaataattgagttttatagcactattttcagaatacaaaaagatacacaatcattctgttttttgaaattccatgtgattcaaactgttccctattatttgggtattaatttgcactaatagcaaaatgtaatggcagatcagctttgagagtggtcctaagcagtaaactggatgatgttgcattagaaaaacatcaataattcatatttaagttttagtagttactactgatttgataatcacttaaattttatatatcttaatgtattttttcagactcctaattaattcccacattcactgtaactaggggcatagtccattctgttaggattatatcctctccttagaaatgttttccatcctgttgtggggatttggtattaatgtttcttcattgattatggaacttttgttccctgaagctagttaactgtgtctaaagttaaataaatacagcagaatgattgttttagcctgctcgaactgatacaaatccctgaaaccatgattggcatatgttagataacaaatgaggatgtctaagaggcatatgctgctttggaggtgtagtgaacgtgtgtacagaagttttcaatcttaactatatagtgttagtgtgatgctatactattggaaaaatagcagcttttttctattttataagttgtatgcataaacataagatttgtaatgtttcatttataaactgccttcttcaacacatgttaatagtgttttctcaaagtattgatagtatgtcttccagaatttcacaatatgcttacagtaaatatttcctagctgtgtctggggcggtgggggcggcaggggggggcgggctgcga

SEQ ID NO: 74851 - DNA, 1562 bp, Homo sapiens
tgctggggaccgcctacgggctctgccataggcggtgcaggcggacggggcgcggcgggggacacggcggccgccgcggggctcgatcgggcaacggcggcgacggcggcagcgacggatcctcctcctcccttattcccttgctcctctttcttccttttcttttcctttccggccgggcctcgtccactttccctaacggcggcctcgatcctacgtaaaggcatgacttcctggcaccacagggaaaatcgggtgcaagcccagaaactatttccccaccaccacttgttgaaaaactgatttgaaggcatctccggggttgaacaaacggaaagtgccaggatttgatgcgtctctggtttcgctctggagaccattccctgctaagtatcaagacgaaaaaaactggaaactaatccgaaccatatttatttagagtcagaatggagcgatttgtagtaacagcaccacctgctcgaaaccgttctaagactgctttgtatgtgactcccctggatcgagtcactgagtttggaggtgagctgcatgaagatggaggaaaactcttctgcacttcttgcaatgtggttctgaatcatgttcgcaagtctgccattagtgaccacctcaagtcaaagactcataccaagaggaaggcagaatttgaagagcagaatgtgagaaagaagcagaggcccctaactgcatctcttcagtgcaacagtactgcgcaaacagagaaagtcagtgttatccaggactttgtgaaaatgtgcctggaagccaacatcccacttgagaaggctgatcacccagcagtccgtgctttcctatctcgccatgtgaagaatggaggctccatacctaagtcagaccagctacggagggcatatcttcctgatggatatgagaatgagaatcaactcctcaactcacaagattgttgactaggaggttaccaccattgtgatcaagataaatgtggagtattaaagttatgtgttgattgtgtggttcatttttgtatttatttcatttaaaatcatgtgacgcagaatagttttgcaatgtgtatatagttgcaggcaaaaaaaaaaccacctcactgcaaaacttattgttaattttagtcaccaatggtataaagcaaaacctaggtttagagtgtgctaggatacctgaaacctgatggttatctttaaaattaatggtttttctcctgaaatgtttgtgcatggaagaactgccctgcttttttaccctgttgccatgtatgattattccttgtgagattacttaattacttggattgaagactagcctattgaagctgctgccaggcaacaccacttaacagtaacttaaaggaattattttctttagaggatcctcttcaaaaaggaagggatagtggaaaactgttcttatatcttcagatccctagcagaaatgactgtttatttcaaactatgttttacttgtatatgatgtagtcaccttaactatctttcaattccatacttcccccgcccctagagtgtcggatcctctaggccagc

SEQ ID NO: 74852 - DNA, 1335 bp, Homo sapiens
gcggccgcctccgccaggcgcctgccgccgcctcccttgagactgccgccaagtcggctgtcgagttcccgggcccacagctggcacctgggactcggccttgcccagctagcggggtcgggacggctgggcgccggcgtgctgggcttggcgccggaggagagagcccagacgccgggaacgtcccgggccccgcctctcccccgcccccgcccgaacccccgggcctggggagctggaggaggtgccaagcgggcggaccaccgaggaggacctgggaggggaagtgttagggtaaacgttgggatcgggtttgtagttacctataaagtgattttagaaacacctgcgtggtggcagttgttgacgttcttgttcatcttttcagtcaccctccttccgtcccccattttttccttccatttgtttttcgtgttttacagtaaaggcatgacttcctggcaccacagggaaaatcgggtgcaagcccagaaactatttccccaccaccacttgttgaaaaactgatttgaaggcatctccggggttgaacaaacggaaagtgccaggatttgatgcgtctctggtttcgctctggagaccattccctgctaagtatcaagacgaaaaaaactggaaactaatccgaatttctgtggaatgtttaatcttctggatccatgactgtctgatacgttggcaatttaaagtccttttgaaagagagttcatgttacccagctattctctaaaccatatttatttagagtcagaatggagcgatttgtagtaacagcaccacctgctcgaaaccgttctaagactgctttgtatgtgactcccctggatcgagtcactgagtttggaggtgagctgcatgaagatggaggaaaactcttctgcacttcttgcaatgtggttctgaatcatgttcgcaagtctgccattagtgaccacctcaagtcaaagactcataccaagaggaaggcagaatttgaagagcagaatgtgagaaagaagcagaggcccctaactgcatctcttcagtgcaacagtactgcgcaaacagagaaagtcagtgttatccaggactttgtgaaaatgtgcctggaagccaacatcccacttgagaaggctgatcacccagcagtccgtgctttcctatctcgccatgtgaagaatggaggctccatacctaagtcagaccagctacggagggcatatcttcctgatggatatgagaatgagaatcaactcctcaactcacaagattgttgactaggaggttaccaccattgtgatcaagataaatgtggagtattaaagttatgtgttg

SEQ ID NO: 74853 - DNA, 794 bp, Homo sapiens
agtcccagtgtttagtttctgcattgtttgaaagcaaaattaaaccttaacaaaaacaattcatcactctgtatatatcataaaaagccattaagagactgtttttagaaaatatgataaatatagtccctctatgacaactcatacttgacaacatgtatactttatatccttatcctttagttagtgtcatccttgcagcattcctgtgaggtagggagggcaaagatgagtaactcagttgtcagataagaaaactgaagcttaaaaatgtttagtgaccattcaggagctgaagccttttgtttctgtgatctgtacattttctgccacattctatttcttcatgttacccgacagttttattatatactaaaagtgtctctattctctttggcagattttctttttaggattcctgttttgtgggatgtagtaataataacatttgaaatctattttatgggaaagatcatttcccacttggaagacgagctggaaatgaatgttccagtgcaaattgtttttggtacttgttggcactttattatattaagtgtgttcttatccacagtatctcatagcattactatttagacatactatgcctaatattggacaacatactcagagaaagatgtaataaatgagatttcagggattcaaagaagaatcctatttacctccttcacctgtcctacctgctagtggatttctgaaatgttccaccactttagctgaacagtttgatccctgctaaaataaaaatatccttgatatgtgtcacagtggaa

SEQ ID NO: 74854 - DNA, 397 bp, Homo sapiens
ctataaatatccaccattatgtattgggaagtcgcctggttgtttagcttattcttaacagaattggatgtggactgtaccgtcctttacaaatgattcttatcaagtatataatgtgttcagtactaactcttttcaacttctcactgtcaaacgtaccccacatgaggcatggagagttcctctcactaccaaaactaataaaacaaaaggactgccggactgtccaaagaaacctacaaatgggccttttatagtgacttcaattttatgggataattgtaatgctcccaaggctgttgtactccaaactctagccatgggtattgttattgattgggctccaaaaggacattattggcaagattgctccagcaaaaataccttatgctcggag

SEQ ID NO: 74855 - DNA, 329 bp, Homo sapiens
  misc_feature (205)..(206): n is a, c, g, or t
  misc_feature (227)..(227): n is a, c, g, or t
gcatttgtcagcacagatagagccctgtccctccacctagtgcccactccatgactgtgaataataacaataataataaaactactggccaagcacggtggctcatgcctgtaatcccatcactttgggaggtcgaggtgggcagatcacctggcccaacgccaccgcctctagctccgggctccctgaggtccccagtgccctnnccggtcccacggctcccacgntgccaccctgtcctgactcgccacctggtcttgtgggcagactgctgatcgagttcacctcacccatgcccctggaggcgggtgcagagggagaacccaggc

SEQ ID NO: 74856 - DNA, 343 bp, Homo sapiens
gtaaagatgaggtctcgctatgttacccaggctggtcttgaactcgtgggctcaggtgatcgtactgcctccgcctcccaaagtgctaggattacaggtgcgagccaacatactcagacttaccataattttatattcagcctgattaaaaaaaacggtttaaggaaacaattcactcaatcatttagggccacaaatgactttggtgaagccagagattcagaagatcgacacttttgccatttttccttggcacagactccggcaaaacacagatttactgcatgatagaaagatatcactcattttgacaaagtagtaataaaaagcttcactgatccac

SEQ ID NO: 74857 - DNA, 1032 bp, Homo sapiens
acaagatagcctcttttgggcctctgtttcatctgtgaaatgatgcttttcaattagatgatgtgtggcaagagccacacggtttgagattcacaatattttgcaagtgatatataattaagcaatgctgttttctaaggtattcatgtatatattttaaccccatcctgtaaaattaaagtcaaactttggaaataagacaggtagataccaactggcatgtggcaacttcttggaatctgtctttcagaagcaaaactttatactgtgcatttagtgaatgctcttctgcaaatatacttgagaatgttattcataatcttagacccattctagtaagataagttacagaagtctactacctcctggcctttgtatatcttgttaaaatgttatattagaatgttttatgttttttctaatggctgagcatcagaaagcatcatggagcttttattttgagtcagaagtcttggcattttaaaaaatgttaatacacaatatattagacatctttgtgatttttttttttccctgaaagtacatccacatgtgattttgttgttgttgttgttattgttaatacattatatccagtttaataatgaaatactacttctcaagaaggctttgcttcctccagaagtgatttggtcaaagctaactgtcccatctagtaggaaaagtttaaagactgctagatcatgtccacccacttatttcactgttaatggaagcatttcccaaagtatatatgcattctgggttaaataacctgggccacgtaggtttgggacttactatatgctactcttctcctctctctttattattttattaaaacaataaaaactctgaagtactgtagtataggacttaattcctggggagctttgcaagagcttaagattagaatttttatcttgttttggataatgcacttctaagtttattttttcctaatgatagctcaagaaggatgtttaaaagaaaaatgtaaccccatatcctgtgtatcataaatatatctct

SEQ ID NO: 74858 - DNA, 294 bp, Homo sapiens
gagatgtatcaaatagatttttagagaaaatctggtggctgtaatataattgttagcaaataagaacatcttcatacagcaaacaacctaatagtgaaattccactttactgtgaagaatttctaagacccactggagaagtgttgaactcattataatgatttctttatatgtaaactgttagttctcaattctttgtctataagaaaataacctggtgataataaaaatgaattttagcatggtgcccaagggtttatgtttttaacaaatattgccagttgcttttaatgc

SEQ ID NO: 74859 - DNA, 391 bp, Homo sapiens
gttttattggaactcagccatactcattcatttacttttatctatggccgctttcaagcttacaatggcagagttgaagcgcagtgagaccatatggaatggaaggcctaaaatatttactgtggcccttcccagaggaagtttgccaaggcctgctctcggacatcagttcagtatggccaagagaacgtggtcgtctgcattatctctccatgtctttatcctcactcctgctcacctccttgtggggaaagaacatcattgaagtcatccaagtgccagcctcagataaagcttgaaaagtacgtggcttaaagcttctaggccaggcgcggtggctcacgcctgtaatcccagcactttgggaggccgaggcaggcggatcacgagg

SEQ ID NO: 74860 - DNA, 491 bp, Homo sapiens
agttcccagagccacagacaaaaggtcctcggaggaatctttctctaaactgcttctcctttccaacttcccaaatttgacctcctccagggaccatccttttctgaccacaggaaaagcccttccttaaatcctttaaagcctaggcttaggggattgggctcctgctttaagaggagcatggcagagcgatcaagcacagggacccagcctgcgtctgaagtcactgtcagctctgtcactcactatttccatggcttcggcactttactaacttctctgtgcctctacttcctcttctgaaaatggggacgccgaggtccatggcgttcacctcggagaattaaataaatgaagatgtggaacatccttagaacagtgcctggcacatgcagcctgaacagaactgctgtgcaggaagagaagtgaagacggagaccacccagcgagcacaatgctcaaaggcccaatggatccactcctgaccctgg

SEQ ID NO: 74861 - DNA, 1688 bp, Homo sapiens
gtgcccggcgcgcgacaccagcagccagtcaggaagccctgcgttcatgcttccagccattgtcggagtgtcagccgtcacaaggcacttccagccagtcgcaacggcgggtcgccagcgcctcagtagctcgcgcggtgcctgtcggtagtcgcgtgcggggcggcggggcggcggggcggccggcggcggccatgggagatatcccagccgtgggcctcagctcctggaaggcttctccagggaaagtgaccgaggcagtgaaagaggccattgacgcagggtaccggcacttcgactgtgcttacttttaccacaatgagagggaggttggagcagggatccgttgcaagatcaaggaaggcgctgtaagacgggaggatctgttcattgccactaagctgtggtgcacctgccataagaagtccttggtggaaacagcatgcagaaagagtctcaaggccttgaagctgaactatttggacctctacctcatacactggcccatgggtttcaagcctcctcatccagaatggatcatgagctgcagtgaactttccttctgcctctcacatcctcgagtgcaggacttgcctctggacgagagcaacatggttattcccagtgacacggacttcctggacacgtgggaggccatggaggacctggtgatcaccgggctggtgaagaacatcggggtgtcaaacttcaaccatgaacagcttgagaggcttttgaataagcctgggttgaggttcaagccactaaccaaccagattgagtgccacccatatcttactcagaagaatctgatcagtttttgccaatccagagatgtgtccgtgactgcttaccgtcctcttggtggctcgtgtgagggggttgacctgatagacaaccctgtgatcaagaggattgcaaaggagcacggcaagtctcctgctcagattttgatccgatttcaaatccagaggaatgtgatagtgatccccggatctatcaccccaagtcacattaaagagaatatccaggtgtttgattttgaattaacacagcacgatatggataacatcctcagcctaaacaggaatctccgactggccatgttccccataactaaaaatcacaaagactatcctttccacatagaatactgaggacgcttccccttccttgtttctgctcagcccagatgcacagacactattggcaatgttgaccctcctctgtcatcacagcgccagggcagctgtgcctgggacaggagccacacagtcagagggggatgtaagagccaccttctctgacaaatctggagaattgagtgtgttctaagtgaaggcaatggggtttctccaagacagcctgtgtggcctctactctgaacaaatacactgatgagtcatcagtgaaatttgccttcacattttaagaaaactttatcttatggagttatttaagccatctacagagctgaggaaacagtgtaatgtgtctctgccccattgcgcagctccacccattgtgccccaggccagcccgcgtcacctacacttccttctgtgccctgccagtgacccccaggttattctaaagcagagtccttcccttcccccagtgagaaggaaaatgggataagtctgggacactgtttcagttcaataaagaggcttttttcttccttaaaa

SEQ ID NO: 74862 - DNA, 526 bp, Homo sapiens
ggcccaggcactacctgctggctcccacctatggtttgggggccatacctgttccagctctgttcccagggtggggcagggaggtgggggttgggggagtagtggggcacggctcctaagatccagcccccatactgacagacggacagacagacatgcaaacaccagactgaagcacatgtaatatagaccgtgtatgtttacaatgttgtgtataaatgggacaactcctcgccctctacctgtcccctccccctttggttgtatgattttcttcttttttaagaacccctggaagcagcgcctccttcagggttggctgggagctcggcccatccacctcttggggtacctgcctctctctctcctgtggtgtcccttccctctcccatgtgctcggtgttcagtggtgtatatttcttctctcgtgtgagggggttgacctgatagacaaccctgtgatcaagaggattgcaaaggagcacggcaagtctcctgctcaggctcaggtagggagggagggctg

SEQ ID NO: 74863 - DNA, 1228 bp, Homo sapiens
gtgcccggcgcgcgacaccagcagccagtcaggaagccctgcgttcatgcttccagccattgtcggagtgtcagccgtcacaaggcacttccagccagtcgcaacggcgggtcgccagcgcctcagtagctcgcgcggtgcctgtcggtagtcgcgtgcggggcggcggggcggcggggcggccggcggcggccatgggagatatcccagccgtgggcctcagctcctggaaggcttctccagggaaagtgaccgaggcagtgaaagaggccattgacgcagggtaccggcacttcgactgtgcttacttttaccacaatgagagggaggttggagcagggatccgttgcaagatcaaggaaggcgctgtaagacgggaggatctgttcattgccactaagctgtggtgcacctgccataagaagtccttggtggaaacagcatgcagaaagagtctcaaggccttgaagctgaactatttggacctctacctcatacactggcccatgggtttcaagcctcctcatccagaatggatcatgagctgcagtgaactttccttctgcctctcacatcctcgagtgcaggacttgcctctggacgagagcaacatggttattcccagtgacacggacttcctggacacgtgggaggccatggaggacctggtgatcaccgggctggtgaagaacatcggggtgtcaaacttcaaccatgaacagcttgagaggcttttgaataagcctgggttgaggttcaagccactaaccaaccagattgagtgccacccatatcttactcagaagaatctgatcagtttttgccaatccagagatgtgtccgtgactgcttaccgtcctcttggtggctcgtgtgagggggttgacctgatagacaaccctgtgatcaagaggattgcaaaggagcacggcaagtctcctgctcagattttgatccgatttcaaatccagaggaatgtgatagtgatccccggatctatcaccccaagtcacattaaagagaatatccaggtgtttgattttgaattaacacagcacgatatggataacatcctcagcctaaacaggaatctccgactggccatgttccccatgtaaatatggctccttctttttaaaacagagggaagaatatacagattgaatgattggtgtctgaataggtatttatcatacacattttagattaattaaactttctcattata

SEQ ID NO: 74864 - DNA, 1668 bp, Homo sapiens
gaggaagctcagcccacagtgaactgtgctctatttactgtacttcccacagttcagtgtccaaactgagcactgttgccgtgaagatgtcagggtgaacgaggagccctgtgatctcctgaggttcaagagagacttcagaaggcttctccagggaaagtgaccgaggcagtgaaagaggccattgacgcagggtaccggcacttcgactgtgcttacttttaccacaatgagagggaggttggagcagggatccgttgcaagatcaaggaaggcgctgtaagacgggaggatctgttcattgccactaagctgtggtgcacctgccataagaagtccttggtggaaacagcatgcagaaagagtctcaaggccttgaagctgaactatttggacctctacctcatacactggcccatgggtttcaagcctcctcatccagaatggatcatgagctgcagtgaactttccttctgcctctcacatcctcgagtgcaggacttgcctctggacgagagcaacatggttattcccagtgacacggacttcctggacacgtgggaggccatggaggacctggtgatcaccgggctggtgaagaacatcggggtgtcaaacttcaaccatgaacagcttgagaggcttttgaataagcctgggttgaggttcaagccactaaccaaccagattgagtgccacccatatcttactcagaagaatctgatcagtttttgccaatccagagatgtgtccgtgactgcttaccgtcctcttggtggctcgtgtgagggggttgacctgatagacaaccctgtgatcaagaggattgcaaaggagcacggcaagtctcctgctcagattttgatccgatttcaaatccagaggaatgtgatagtgatccccggatctatcaccccaagtcacattaaagagaatatccaggtgtttgattttgaattaacacagcacgatatggataacatcctcagcctaaacaggaatctccgactggccatgttccccatgtaaatatggctccttctttttaaaacagagggaagaatatacagattgaatgattggtgtctgaatagaactaaaaatcacaaagactatcctttccacatagaatactgaggacgcttccccttccttgtttctgctcagcccagatgcacagacactattggcaatgttgaccctcctctgtcatcacagcgccagggcagctgtgcctgggacaggagccacacagtcagagggggatgtaagagccaccttctctgacaaatctggagaattgagtgtgttctaagtgaaggcaatggggtttctccaagacagcctgtgtggcctctactctgaacaaatacactgatgagtcatcagtgaaatttgccttcacattttaagaaaactttatcttatggagttatttaagccatctacagagctgaggaaacagtgtaatgtgtctctgccccattgcgcagctccacccattgtgccccaggccagcccgcgtcacctacacttccttctgtgccctgccagtgacccccaggttattctaaagcagagtccttcccttcccccagtgagaaggaaaatgggataagtctgggacactgtttcagttcaataaagaggcttttttcttccttaaaa

SEQ ID NO: 74865 - DNA, 1574 bp, Homo sapiens
gaggaagctcagcccacagtgaactgtgctctatttactgtacttcccacagttcagtgtccaaactgagcactgttgccgtgaagatgtcagggtgaacgaggagccctgtgatctcctgaggttcaagagagacttcagaagatggtgagctcctgagggcaaggcccatgcaggtcattttcagcactgcaccctggcctaacttgccccgtgcacaggcttctccagggaaagtgaccgaggcagtgaaagaggccattgacgcagggtaccggcacttcgactgtgcttacttttaccacaatgagagggaggttggagcagggatccgttgcaagatcaaggaaggcgctgtaagacgggaggatctgttcattgccactaagctgtggtgcacctgccataagaagtccttggtggaaacagcatgcagaaagagtctcaaggccttgaagctgaactatttggacctctacctcatacactggcccatgggtttcaagcctcctcatccagaatggatcatgagctgcagtgaactttccttctgcctctcacatcctcgagtgcaggacttgcctctggacgagagcaacatggttattcccagtgacacggacttcctggacacgtgggaggccatggaggacctggtgatcaccgggctggtgaagaacatcggggtgtcaaacttcaaccatgaacagcttgagaggcttttgaataagcctgggttgaggttcaagccactaaccaaccagattttgatccgatttcaaatccagaggaatgtgatagtgatccccggatctatcaccccaagtcacattaaagagaatatccaggtgtttgattttgaattaacacagcacgatatggataacatcctcagcctaaacaggaatctccgactggccatgttccccatgtaaatatggctccttctttttaaaacagagggaagaatatacagattgaatgattggtgtctgaatagaactaaaaatcacaaagactatcctttccacatagaatactgaggacgcttccccttccttgtttctgctcagcccagatgcacagacactattggcaatgttgaccctcctctgtcatcacagcgccagggcagctgtgcctgggacaggagccacacagtcagagggggatgtaagagccaccttctctgacaaatctggagaattgagtgtgttctaagtgaaggcaatggggtttctccaagacagcctgtgtggcctctactctgaacaaatacactgatgagtcatcagtgaaatttgccttcacattttaagaaaactttatcttatggagttatttaagccatctacagagctgaggaaacagtgtaatgtgtctctgccccattgcgcagctccacccattgtgccccaggccagcccgcgtcacctacacttccttctgtgccctgccagtgacccccaggttattctaaagcagagtccttcccttcccccagtgagaaggaaaatgggataagtctgggacactgtttcagttcaataaagaggcttttttcttccttaaaa

SEQ ID NO: 74866 - DNA, 490 bp, Homo sapiens
aacgtcatagacttatggaatttctgttaaaacaatgaaatagcatgatacacgattgcagtgcagtagagcttcccccaggaatactgttcccagacttgtgcagggctggttccctcactctttgcctttctgtttgcagcataaatgccacttcattgaggtgttgaggattccctcactctgtcccttccgcctctcaccacaagcacctgctttattttactatagcacctgctctttttttttctcatgcatttgcttttatgctctgtccattcattcctacagatggtgagctcctgagggcaaggcccatgcaggtcattttcagcactgcaccctggcctaacttgccccgtgcacaggtgagtgctccaggcacagtttctgaatgaataaatgagagtatcgaagatcccccttcccacctgtgaggagctcacattgaggagatggatgctcacaggagatgcaagttgggtgggag

SEQ ID NO: 74867 - DNA, 1757 bp, Homo sapiens
gtgcccggcgcgcgacaccagcagccagtcaggaagccctgcgttcatgcttccagccattgtcggagtgtcagccgtcacaaggcacttccagccagtcgcaacggcgggtcgccagcgcctcagtagctcgcgcggtgcctgtcggtagtcgcgtgcggggcggcggggcggcggggcggccggcggcggccatgggagatatcccagccgtgggcctcagctcctggaaggcttctccagggaaagtgaccgaggcagtgaaagaggccattgacgcagggtaccggcacttcgactgtgcttacttttaccacaatgagagggaggttggagcagggatccgttgcaagatcaaggaaggcgctgtaagacgggaggatctgttcattgccactaagctgtggtgcacctgccataagaagtccttggtggaaacagcatgcagaaagagtctcaaggccttgaagctgaactatttggacctctacctcatacactggcccatgggtttcaagcctcctcatccagaatggatcatgagctgcagtgaactttccttctgcctctcacatcctcgagtgcaggacttgcctctggacgagagcaacatggttattcccagtgacacggacttcctggacacgtgggaggccatggaggacctggtgatcaccgggctggtgaagaacatcggggtgtcaaacttcaaccatgaacagcttgagaggcttttgaataagcctgggttgaggttcaagccactaaccaaccagattgagtgccacccatatcttactcagaagaatctgatcagtttttgccaatccagagatgtgtccgtgactgcttaccgtcctcttggtggctcgtgtgagggggttgacctgatagacaaccctgtgatcaagaggattgcaaaggagcacggcaagtctcctgctcagattttgatccgatttcaaatccagaggaatgtgatagtgatccccggatctatcaccccaagtcacattaaagagaatatccaggtgtttgattttgaattaacacagcacgatatggataacatcctcagcctaaacaggaatctccgactggccatgttccccatgtaaatatggctccttctttttaaaacagagggaagaatatacagattgaatgattggtgtctgaatagaactaaaaatcacaaagactatcctttccacatagaatactgaggacgcttccccttccttgtttctgctcagcccagatgcacagacactattggcaatgttgaccctcctctgtcatcacagcgccagggcagctgtgcctgggacaggagccacacagtcagagggggatgtaagagccaccttctctgacaaatctggagaattgagtgtgttctaagtgaaggcaatggggtttctccaagacagcctgtgtggcctctactctgaacaaatacactgatgagtcatcagtgaaatttgccttcacattttaagaaaactttatcttatggagttatttaagccatctacagagctgaggaaacagtgtaatgtgtctctgccccattgcgcagctccacccattgtgccccaggccagcccgcgtcacctacacttccttctgtgccctgccagtgacccccaggttattctaaagcagagtccttcccttcccccagtgagaaggaaaatgggataagtctgggacactgtttcagttcaataaagaggcttttttcttccttaaaa

SEQ ID NO: 74868 - DNA, 945 bp, Homo sapiens
gtgcccggcgcgcgacaccagcagccagtcaggaagccctgcgttcatgcttccagccattgtcggagtgtcagccgtcacaaggcacttccagccagtcgcaacggcgggtcgccagcgcctcagtagctcgcgcggtgcctgtcggtagtcgcgtgcggggcggcggggcggcggggcggccggcggcggccatgggagatatcccagccgtgggcctcagctcctggaaggtgacgcggtcgcgggcagggaggcgcgcctgacctaggggagcgcgggacttgggggcgcccgatgggacccaggccggggctggggagaagtgcggcggcctcccctccgcctggccgacgcccgggaaaggcgctgctgaggtggccgcccaccgcccacaagcagcccggcccggcctttcctaaaacggagtcggtgctgcccgccgaggcgctctctgggagaagcgggaacctcggcagccaagcctcagactctggggctgcggccgcggcgttgggcggggctgctctgtggagaggcggagcccttgaagttactcagaactggagcggggatgccgaggggaggccttggcggcgctggactcggccggaacagggaacctcgaagcctcctctccagcaaagagagaaagaaaagttggggccgggcgtggggtgcgggcttgtaatcccagcactttgggaggccgaggcagtaggatcgcctgagctcaggagttcaagaccagccaggtcaacatggcgaaaccctgtttctacaaaaaatgaacaaatcagctgggcttgggggtgcgcgcctgtggtcccagctactcaggaggctgaggtgggaggatcactggagaccaggaagtcgatgctgcagtgagctttgatggcgccactgcactccagccttggggacagagccagaccttgctgg

SEQ ID NO: 74869 - DNA, 882 bp, Homo sapiens
gaggaagctcagcccacagtgaactgtgctctatttactgtacttcccacagttcagtgtccaaactgagcactgttgccgtgaagatgtcagggtgaacgaggagccctgtgatctcctgaggttcaagagagacttcagaagatggtgagctcctgagggcaaggcccatgcaggtcattttcagcactgcaccctggcctaacttgccccgtgcacaggcttctccagggaaagtgaccgaggcagtgaaagaggccattgacgcagggtaccggcacttcgactgtgcttacttttaccacaatgagagggaggttggagcagggatccgttgcaagatcaaggaaggcgctgtaagacgggaggatctgttcattgccactaagctgtggtgcacctgccataagaagtccttggtggaaacagcatgcagaaagagtctcaaggccttgaagctgaactatttggacctctacctcatacactggcccatgggtttcaagcctcctcatccagaatggatcatgagctgcagtgaactttccttctgcctctcacatcctcgagtgcaggacttgcctctggacgagagcaacatggttattcccagtgacacggacttcctggacacgtgggaggccatggaggacctggtgatcaccgggctggtgaagaacatcggggtgtcaaacttcaaccatgaacagcttgagaggcttttgaataagcctgggttgaggttcaagccactaaccaaccagattttgatccgatttcaaatccagaggaatgtgatagtgatccccggatctatcaccccaagtcacattaaagagaatatccaggtctgctacacactgaggggaaatgccatcctca

SEQ ID NO: 74870 - DNA, 346 bp, Homo sapiens
  misc_feature (3)..(3): n is a, c, g, or t
  misc_feature (321)..(321): n is a, c, g, or t
agnggacgcaagatccgtctgaagtgtattcctgggacgatgccggagtgtgaaggagtttgagaagctgaaccgcattggagagggtacctacggcattgtgtatcgggcccgggacacccagacagatgagattgtcgcactgaagaaggtgcggatggacaaggagaaggatggcatccccatcagcagcttgcgggagatcacgctgctgctccgcctgcgtcatccgaacatcctccactgacttcctcccaagcccgtgcaccctggaaggcaaggtctggcggctccatccgtggctgcaggggtctcaatgtngtccgtcctcgccatgtttggaaat

SEQ ID NO: 74871 - DNA, 297 bp, Homo sapiens
tgtcttccagtaagtcaggaatctgaactgcaacagacccttctttagtctctttctcttcattcactggatgtgctgggaaattacctctatctgcatatccttctagggctctggcctctcctggtaggctctggtcttctactggcactccaggaaggaggtgaccttttgctagctctgtgactttctctactgaatgcttagacgcaccactgtgcactgactcagattctcctatcacatgcccttcatcgatccctgcttcatttttcatggaatcagcaagctcagctt

SEQ ID NO: 74872 - DNA, 85 bp, Homo sapiens
aaaattccaaagtctcagtcctcataggtcttcaattaaaatagatacctctatgggtagggttcatcaattgttttctgcaaat

SEQ ID NO: 74873 - DNA, 247 bp, Homo sapiens
attagagaataaatgtaggttaattgtagatcatttagatattatgaaagcataaagtgaaaagtatcattaagcatccttttaagatgggtgaggttttacatgcaattttgtgtcacgctttttttacttaatttatctcatgtattttctattacattaaaatcttccttattaatggcttcataaaatccattgtatggccatattatgacttacccaaccattcctcttatattgtctacct

SEQ ID NO: 74874 - DNA, 331 bp, Homo sapiens
gatagccattgaccactaagtggctgttctgatttctttaatatcatatcaaaaatactagtaaagaactttatgctgggcatggtggcttgagcctgtaatgccagctactcgggatgctgagaactggagaatctcttgagcccaggacttcaaggctacagtgagctatgattgcatcattgcactccagcctcggttataaagtaagacactgtctctttttaaaaaaaaaacaaaccagaaaactttctttgtttccatcagatttaaagctaaaattattttctttacctatatattattgtaaactgctttgtatttaaagttg

SEQ ID NO: 74875 - DNA, 1519 bp, Homo sapiens
gcgtgtagctgagcaggcctggggcttgggtctatgtccctgtgtgtcctctggtgtttccaagagcacaagaagcgaataaatctctgacccttctcaggtgcagccagagagacactagcccactgatggatggacagactgtgggcagggtccgtgtcactaaaccacccaccactgccacagctgcctacaacagacacatcagatgacactccgggcaaataaatgattttcactgaggacttactggttttaataataggtcctggtgtagagaagtccctcaacctattgtgcaatgagttttgagaagcgggtaagctgtatgttttgtggttctgtttcataaatgcatctacaggaagaccaatattgactgaatgaagctttcatttaaagagctaaaatatgctttgtgtttttatatgtggatactactttaaacctaatgactattcattgtatcatagcttgtgatgtattctgctcacggcttttaaggtaaattgtgccatgatccactgccattctaattgctttaacaagtcattaccacactactgttacatcttaattatgcatacagacaggtagacttattttacatatgtgaactaactagttgtcaaagcaaatgcagattgtattctacaagtaaagtctttttctctctgaaatttctagggatgttctttaagtgaaattcatattcaaactgaagattttagttacaagaactgagtgcagattaaagtcttttgtgattcaaacatagtcaagagtacaactgtgatatttcatggaagttatgcaataaaatgtctctaacctgcgaacaaatctatcaagcagacggcacagtactgaatttgaaaccagaaatactgggtttttatataaatgcttcatagatttgttttatgataaagggcacataactctcctaaacctcacaccacctcttgaataggtataataagtccacatcaatgctgatgccttagctattattaaactcttacagtatgatgtaaagtgaaagtacaatgtaagatcattcctaggccaactttgaccagttttatacagaaacatgtgccaacttttctgtttgcaaggataatatcaaagcaaacaccagaaagttatatctttgatgcattttttcaaaatcatacacataatacacaaaccaaagacaaatgatgaatattatgtcagaaaatataaagtcttcccctttcttcttttgccaagaaagtccaatattttcaccatttttatgcacacaatcaactttatttaagctggaagttaatgtctcattgttttcattgttctaaataaacaccttttcccttgagtattgctcaaaaattttgaagttgtgtgaaaaattttgttctgatatttcacgtttgtgctaatgatatgtgaaaaggaatacagatggtatttaattatgaacaggaaaagatgttaaatatcattagtcattagaaatttgcaaattaag

SEQ ID NO: 74876 - DNA, 220 bp, Homo sapiens
tacacaaacttagctggaaatgaatactgaaatggaagtttgaatccaagatgatttcttttgaatcccatgctaatgctgttaactcctatagacccttctcaggtgcagccagagagacactagcccactgatggatggacagactgtgggcagggtccgtgtcactaaaccacccaccactgccacagctgcctacaacagacacatcagatgacac

SEQ ID NO: 74877 - DNA, 727 bp, Homo sapiens
ggtaccataaaagataaaagatctaaaaatggtgccctttaatcaaaagtaaacaccctttaaccatcagagagagggagaagtttggcagctgacctagaagccccatcaactgccccagctcaatgataaactcttctcttcttcaaataaaagcacatcctggcttacatggccatcacttctttgtacaattttatatttttatcatctaaagttatagtttagttttacctttaagagtatatttttatcctcatttattccatagattcctgcttgaaatttatattgtctggtagtttcctgtcctttgcattttgcagattgcaccccaaggtgtggtttaatgtatctctatgacctgtattttctgtaaattggtagtttgttatagaggtttgcgtctattcagggtttttttttttttttttttttttgccatgaggattgatggtactatatcatgtttttcatcaagaggaagaattcaatactagttatttcttttttgtgatgttaattgccattgctgttcagtggctaaatctgttaattcattacaaattgcaaaagtctcagtctttcatttcttttcatatactagctgcataatttctaaaataaaagatttaccctcttccaccagttatcaattcagtagaaacttgttttttgagagactaaaccaagtttctaatcacctatgacccagcaattccacttt

SEQ ID NO: 74878 - DNA, 527 bp, Homo sapiens
tggatttcattattgtttattgagcttcttggatgtttatattcatgtgtttcatgaaatctgagaagttttggctattattcaaatattttttctactcttttatctgtcatttctcatgcaactcccacaatgcattagttggtctgcttgatgatgtctcacgggtcccttaggttctgttcacttttcttgaatctcttttatttctgttcttcagactcagtactttcccttgtcctatctcatgttcactactttttttacctgctcagatatgcttttgaatctctccagtgaattttctgttattgtacttctcatttcctgaattttataatttttatttctcttcattgatatttccgtttcgttcatacagcactttcttgcttttgttcacatcttttaattcttttttttttcttgagacagagtctggctctgtcacccaggctggagtgcagtggtgccatctcggctgactgcaagctccgcctcccgggttcacgccattctcctgcctc

SEQ ID NO: 74879 - DNA, 844 bp, Homo sapiens
agctgggattacaggcgcccgccaccacgcccggctaatttttgtatttttagtagagacagggtttcaccatgttagccaggctggtatcaaactcctgacctcgtgatccacccgtctcagccttccaaagtgctgggattacaggcatgagccaccaccgtgcccagcctgtttagtttatttctaattaacttgaatatttatgaagcatatactttaatcatgtggagattttaattctatgtaatttgatatcattattgaacatctttgtgattcatgtcagttatatgaatttaaacaaaaccaatcttatgaaacacaatttattagatagtctacaaactgctacactcatcatattcagagaaacgtgggaatatgtcagttatttggccttgggtgaatttaagcttctgtttcttattggtaaattgggagtaataaaggtacttttcagagtagctgtataaaattgggaaccaggtctttttgcttaccactgtacatcagcacctagtatagcatttggcacacagtaaacaatcaataaatattagtaaattgaataaaactatgattacataaaatgaaatcatgatatataaagaacttaccacagtacctggtacattacaaattcttaaaaatttatagctattattactattatttcactggagctaattataaagttatagcattttagatgtaaagagaaatctaaagtatattccatctattcctcttattttataaattagttaactgaaaaatcagagaactgaaataatttgcctaaagtgatttacttggttaatatcaaagaaccagaaaccca

SEQ ID NO: 74880 - DNA, 2862 bp, Homo sapiens
  misc_feature (517)..(517): n is a, c, g, or t
  misc_feature (1986)..(1986): n is a, c, g, or t
ctgcaggaatcccccttggagccctcctcccctctgcctgctgtgacctcagcctcggagcctcgagctcccaggagatggctcccagctgggaggacttcactccttcggcggagttgggggactgtgtgcttgggttgggttaatgactgtgtaagccaaggtcaggatcaacccccatcactgggctctgcagaatgccaaaattccagctggggtcccacccctgattcaggaaagttggggctctgaggagttcgggcctatgggattggaggtcctggggggactcatctgtaagctgggatctgatgtccccgggctcttgggagaatggcagccttgcagcccctgctgtgtgccctcatctgggaccttctcctctgtgcactctctcggtcacccacaccccaccagccggctggtccacagggtgtttctgaggcttggcctcttctggctctgtgatctttttttggagacagagcctggctctgtcgcccaggctggagtgcantagtgtggttatcgctcgctgcagcctccaactcctgggctcaagcaatgctcccacctcagcctcccgagcagctgggactacaggcacgcaccaccatgcccagctaatttttttgtattttttgtagagacgggtttcaccatgttgcccaggctggtcttgaactcctggactcaagcgatcctcctgcctcggcctcctaaagtgctaggattacaggcgtaatccactgcgcccagccctggctctgtgattttaccctctccgcacctctgttccttgtggttttaaaggtggagatgctgaggactggcgggagctgcagggctgctgtgggggctcctatgtaggcagtgagggctctttggtcagcttcctccaaggaaggaaggtccctcttctgaaatctcctctggggaaacagctcgcttccctcaccacccccagatgaggagcactgtgctaaggagtctcaggcacctggtcagcaggtcaggcagacccagggagaaggaaggactgtggacctgctgggccgcagagtcagcgattccctgggctccaggctgacgcctgccccgacaaatcaggacattccggccagttcgggggtgggtgtcttcagttccagcccaggcacgagaactgctgaccacttcctgcaggcctccgacccggcggcccagccacccatccggctggggtggccatcagtcatctggaaagcctatgagccccgtgtcctcgttttgcaaagagcagttcctgaaatcatggggcctagagctctgctcttctgatcaggggccggtttcagcagcaaaggccagaaataacacatggtgtgagcgctgctgaatagggcaccgtcctagccctttccgggggatgactcatcatgctaccattccagcaccagctggtacggggctccaggctagcggcttatcatgccggcccggatacacccgtccttaaacttgggtgcgcagaggaatcaactcaggaaggaacctcaggagagatttgtgcaggtccttccccccattcttgggtctgagtagggcttgataatgccttgggaggtgtgcggggccatctttgcttgtttgtgtttctgggaaacactgcgttcagcagagacagcattttatacaggaggaatcggaggccgggaaagatgacggggctgctcagcgtggagctggggtccggccgggctgttttccaggggcaggagctgatctctgagttacatttatttatttatttatttatttattatttttgagacggagtcttgctctgtcacccaggctggagtgcaatggcgcgatctcggctcactgccacctcggcctcccaggttcaagtgattctctcacctctgcctcccaagtagctaagattacaggcacctgccaccacactcagctaatttttgtatttttttttattagagatgngatttcaccatgtgggccaggctggtcccgaactcctgacctcaagtgatctgcacccccctcggcctcccaaagtgctgggattacaggcgtgagccactgcgcccggccctcagtcacctttaaaatgaaagggccacggaatcaccaggaactctccttcctgtgaccttgggtaaaggtcattttcgccctgcccctcagtctccccatttgtaagcctgaaggttgtaaattacaatcttcttatccaaccacttgtctttattttattttattttattttattttattttattttattttattttatttcattttatttttgagatggagtctcactctgttgcccaggctggagtgccgtggcatgatctcagctcactgcaacctctgcctactgggttcaagcaattctcccgcctcagcctcctgagtagctgggatcacaggcgtgtgccacaacgcccagctaatttttgtatttttagtagaggtggggtttcactgtgttggtcaggctggtctcaaactcctgacctcgtgatccacctgccttggtctccctaagtgctgggattacaggcgtgagccacggtgcccggcccacttgtctttatttgttgccttctcttctgctccgagtttaggttcatgtcgccacctggtgattggcttctctgtgcatatatttgcacagttgcaggcatgaccagggtggagcagtgaagcggggcctgacgtgatgtaccatgtttcaagcctgtttcacagcacaagacagcctcagctctgtggtccacaaaccacatgaccacatctggccccctgtcttgtataatagatagttttcttggcatatggccacacccgttc

SEQ ID NO: 74881 - DNA, 451 bp, Homo sapiens
gagaaatttggcagcatcactggaataaatttttgtgtaacttcccaaaattaattccctgaagaatatatctttcatttcaaatataagtacaagtatattttataaaggaagcagctagataacttttgctaaagtaacgtttaaggaaatacagggctgggtacagtggcttacacctgtaattccagcactttggcctcccaaagtgagaggatcacttgagcccaggagagcagcctgggccacatggtgaaaccccctctctaataaaaataaataaatagaatagaataagctaggtatggtgatgccagctacttggtatgtagtcccagctacttgggatgctgatgtgggagaatcaccagagtctgggaaatctaggctgcagttgttggctatgatctcaccactgcactccagcctgggtgatgggagtgaggctctg

SEQ ID NO: 74882 - DNA, 292 bp, Homo sapiens
gcaggagaatcccttgaacctgggaggcggaggttgcagtgagccgagatcacgccactggactccagcctggacaacaagaaggaaactccatctcaaaaaaaattgaaaaaaaattcaagaaatacagaatgcaaaaagggaccaaaaaagtaccaaaaatttcaaaattttgtaaactgtaccaaatctggatacgaagcgttatttttgcccacagggcacttccctgaaagacgttacaatagctaagactcctctcagatagaatagagagcagtagatagctctt

SEQ ID NO: 74883 - DNA, 286 bp, Homo sapiens
cgtcaattcctgtaagacagtcttgatcaatgccaagactttggaaatcctgaatactaaaggcaaaactgtaactccatttaagctccatgatcagaatgagaaataagtaaatatcaaatgagtcagaacgctctcctcctttgcacgagctagtctgcagtactctgcaggacgtttttctgattaaagggcttaagcaatttattttaacaaaagtggtcagtaagctttccagcaatcaaagttgaaagttaagtaaaagatacccttggaaattcttggc

SEQ ID NO: 74884 - DNA, 380 bp, Homo sapiens
cgttagccagtatgttctccagctgacctcgtgatccacccgccttggcctcccaaagtgctgggattataggcgagtatactttctttacttgctgtcattgggcagttgtccgatttcatcctggaggaagcccatgtcaaggacactggccctggttccagaagtagaaagtcaggaaacttccatccaaaggaaaaccagggagtcctctgctaccctcaggagagctaaagggctaaaggacccagaagataatcaactgctctgcatattcttatgaacagaaaatatggagagccagaatactttagggtgtggtaagttccaggcaaatgaaaaatgtaataatcatcaataaagactgatcaattcattcg

SEQ ID NO: 74885 - DNA, 444 bp, Homo sapiens
aacttttttaaaaatgcatttttaaaaatgattttactgaattctacctaattcttacaagggaaaacatagtcttattatatacacagctgattaaaattctaaacatttacccagttacattttaaaattatgcccattgcaaaatctgcacgagaatgagggcagctgtattcacaatcacctgaacgggaagcagctgagatgctcttcaggcagtgagtgcagccacccacattgttacaggaacccagtggaacatgattcactgataaaacttagtaagccgttaagctaaaaaagataggaaaaatcttgcatgcatattgctaagtgaaatcagttagtcctaagtgactgcatactttatgattccaattctatagaatctggggaaagaaaatcgacagaggcagtaaaataaatgatattttattttactca

SEQ ID NO: 74886 - DNA, 888 bp, Homo sapiens
gcaataaaatgcatatacaaccctagtcagtgtgaagtagcacctcataattatttctttagcaaaacatttgaatatactaagtgggatgaatgaagcctcaacttcaagtcaggttttgctgccaagtgattctgagccaaacactcaaaaaattcttttcagaccatcttagagttgggaagttgtggttaaaaaatcgttaccatacatacatccctattttacagatgaagtaactgtggttcagaggttaagttaccaaggttgttcacctaacttaatagcgtcagaaatcggacttaataacagacttaagatattagtctaaataacaggatttagattggacaggagccagatctgcctgattactaacagcctgctctttccattactctcggcttttgggtgatgccacacaacttgcaggcggcatatgcccgtagatttactgatatgcacctaaaaattcagtgtaaatcaagtttactaaaccctgaaattctatagccaaatgcttctgtgatagaaataatcagccctcaatatctgctaagcgtaaattttttccctagtttgcagagagaaactggttgggtgcagtggctcacacctgtaatcccagcactttgaaggctgaggtgggaaaatcgcttgagctcaggagttcaagaccagcctgggcaatgcagcgagacattgtgtctacaaaaaaaatttaaaaattagccatgcattggtgacacgtgcctggagtcccagctactcaggatcaggaagccgaggtgggaggatggcttcagccaaggaagtcaaaactggagtgagtcatgttcaggccacagcattctagcctggacgatggagtgagaccccccccctcaa

SEQ ID NO: 74887 - DNA, 481 bp, Homo sapiens
tgccaactttttttaatgggggtccatacatgtaaaatataggcctgttaatatctgtatcccatatttatatctttgacatttatggtcataacaagaaatatcaggacacatctctgaagattttggcagacaatctgtggtggaggttttgaattcttgtcggcaagcacagtcttccaaagcttagcttctggacctgagggtctgtgaacctgcaacatcagtgtcatctgggagctcattataaatacagtctcagaactcacccccggggcactggaccagtatctgtatttcaataaaattaggggtgtatgtgcttattatagctcatgtctagaaggtcatcctaggcctggcacagtggcacatgcacacacctataatcccagagctttgagaggctgaggtggaaagaccactggaggccaggagttcagagaccagcttggacaacatagcaagactctgtctctac

SEQ ID NO: 74888 - DNA, 103 bp, Homo sapiens
tggccaaattacttgtaggtctgttaatgccatttgcttcctcactcttctgtcagctttgaatgctatgcttttcttttctccttaactaatgcatctctgt

SEQ ID NO: 74889 - DNA, 1496 bp, Homo sapiens
  misc_feature (1381)..(1381): n is a, c, g, or t
aggacagggtcaaccacttggtccatctttcctgttagcatgcccacaacaattcaatgacacataagtgctatgacttcatcaaaaaatgttagacaaatatttgaatttgaagaatcaggatatgattattcttattctcataatttttaccaatataaaagtttttgtcactttacatcattaagtggcaaggtatgtgtgtgcatgtgtgtgtgtattgtctatatatatactatatttctatacagtgggctgagggactgaacggccttagaagttgtgcaaaacaggtgtgcaatgcttgccctcaaggagcttgtaacttaatggaaaggattggacaatacttagaaaaacataccagaacaactggaaaatgaaatagtcagatgcagaaaagtacaatgaaaatgaaatgcgtatatgatgagaaaactctgggtaaagtttaagaagggaaggttcagaaattaatggaaagaaagaaaagaaagaagtgcactttacgagtaaaaactagaatgaacaaatgcaattaaaaatgtatttgtacatgtttttagttttgtgcaaaacaaaacaaaacaaacgacaacaaaattaaaggctcagcagtctgtagacacaaagcctgttcaggttcaaagaaataaaaaattcagatgataggataagtgagaaaaactaatatgtattaaactgaaatggcaaaaaaaaatattttagaaaaaatctctagtttctgaagactcagttccattcaacaaacatttatgggcatttattttttgccagacactataatgggtgctctaggatatttaaagattagcttggccaggtgtggtggctcacacctgtaatctcatcactttgggaggccaatgcaggaagatcacttgagctcaggaattcaagactagcctgggtaacatagcaagaccccgtctctataaaacattaaaaaatagctgagtgtggtggcatgcgtctgcagtcccaggctactcaggaggctgagatgggaggattgcttgagcctgggaggttgaggcagcattgagccatgatcatgccactgcactccagactgcatgacagagcgagacccagcctcaaaataaataaataaataaataaataaataaataaaaaggttagcttgatactatgtctctatatctgcccttggggagcttatagcctaataggatagatgacaagtgcaaaatgattgacatgaaaaagtgcagcccaagtacccagacgagatcttggaggctggagatatttaaatgtctggctctaagtagagaaaagtgattcttagtgaccaagtaaaggaagagattatactaaaaatgatatgggcgacagngcgagactccatctcaaaaagaaggaaagaaagaaaaagaaaaagaaagaaagaaagaaagaaagaaagaaagaaagaaagaaagaaagaaagaaagaaagagagagagagagag

SEQ ID NO: 74890 - DNA, 254 bp, Homo sapiens
ccaaaacaaaataaaaaagtaaaacaaaaagaccaattttactatactacttgatttttaacaatattttatatgtatttaatccagtatatccaaaatattgtcatctcagcataaaacaatattaaaattattcagttttacattttttaaactaaatctagtttgtattttacatatagcataaatcaattcaaatccaccatatttcaagtgttcaatatctacatgtcactagtaatgactatagtgga

SEQ ID NO: 74891 - DNA, 1697 bp, Homo sapiens
  misc_feature (6)..(7): n is a, c, g, or t
  misc_feature (9)..(9): n is a, c, g, or t
  misc_feature (14)..(14): n is a, c, g, or t
  misc_feature (17)..(22): n is a, c, g, or t
ggctgnncnggccnggnnnnnngggacgacccaggctggagctgaggccgagctgagggcgcccgagccccccgccccgcccgtcctctggctccgcagcgctcagccccgggcccgcggagacatgaacgccccgcggccccacgcaccccgggcgcagcggcccggccccgcggccccgtgatgggctcctgcgtgtcgcgagacctgttcacaagtgcccacaagaactgccccatgccccagggtgcggaccccttgaacccagatctgccctcgggccgcactcccaccgtggctccagactgtgtcattggcaaggacaaacagatggatttctgttgggatccttggcagaggtgcttccagaccaccaacggctacctgtccgactccaggtcccgccccggcaactacaacgtggcagccctggccacctcgtcccttgtgggggtggtgcagagcatcaaggaccacatcacaaagcccacggccatggcccaaggccgcgtggcccacctcatcgagtggaagggctggagtgcccagcgggcaggctgggagctgtccccagctgaggatgagcattactgctgcctcccggatgagctgcgtgaggcccgctttgctgcaggggtcgccgagcagtttgccatcacagaggccacactgagcgcttggtcctcgctggacgaagaggagctgcaccccgagaacagcccccagggcatcgtccagctccaagatctggagagcatctaccttcaggacagccttcccagtggcccctcacaggatgacagccttcaggccttctcctcgcccagcccctcccctgacagctgtccctcacctgaggagccccccagcaccgctggcatcccgcagccccccagcccagagctgcagcatcggcggcggctgcccggggcccaaggacccgagggtgggacccaccccccgggctccctcccctccatggacagcggctccctctgggaggaggacgaggtgttctataactgaggtgggggctgtgctggtccagcacctgctctcaccatgacctcgcctggtgggcagcccaggcatatctggaccccggggtccagggcagggcatcccttgacccctcgggtaggcacagggtaggtgcagcagggatggggccagtgctcatggtggcctctctgtgcctcggtggacctgccccagcagtgggagccataaccccctcccccttcattacttcactcaggtgggcaccttcccctgcagggtgtctgccctcagggaactcaaggactctcagagacaccagggcagcctggcccagaggagcaacagccaggcccccaggaggacagccatggagagaactgagacccacttacagtggggtctgggaaccctgcctgtacctggggttcagtccctcccaactccctccttgtgtcttccccccagcaaaggtggggtgaccacttctggtagctaagcacctgctccccggctctcttcacccaggacatctgtctctctggagtgtctgtctgtctgtccctccctctctgaacctgcttcctccgtgtcccctgctcctcgcccctgggagcccactccccctccttgcggctccctcccatctcactcaaggttctctgaggacattaaagtggtggattcaccctggaaaa

SEQ ID NO: 74892 - DNA, 1581 bp, Homo sapiens
  misc_feature (6)..(7): n is a, c, g, or t
  misc_feature (9)..(9): n is a, c, g, or t
  misc_feature (14)..(14): n is a, c, g, or t
  misc_feature (17)..(22): n is a, c, g, or t
  misc_feature (234)..(234): n is a, c, g, or t
ggctgnncnggccnggnnnnnngggacgacccaggctggagctgaggccgagctgagggcgcccgagccccccgccccgcccgtcctctggctccgcagcgctcagccccgggcccgcggagacatgaacgccccgcggccccacgcaccccgggcgcagcggcccggccccgcggccccgtgatgggctcctgcgtgtcgcgaggacaaacagatggatttctgttgggatcnttggcagaggtgcttccagaccaccaacggctacctgtccgactccaggtcccgccccggcaactacaacgtggcagccctggccacctcgtcccttgtgggggtggtgcagagcatcaaggaccacatcacaaagcccacggccatggcccaaggccgcgtggcccacctcatcgagtggaagggctggagtgcccagcgggcaggctgggagctgtccccagctgaggatgagcattactgctgcctcccggatgagctgcgtgaggcccgctttgctgcaggggtcgccgagcagtttgccatcacagaggccacactgagcgcttggtcctcgctggacgaagaggagctgcaccccgagaacagcccccagggcatcgtccagctccaagatctggagagcatctaccttcaggacagccttcccagtggcccctcacaggatgacagccttcaggccttctcctcgcccagcccctcccctgacagctgtccctcacctgaggagccccccagcaccgctggcatcccgcagccccccagcccagagctgcagcatcggcggcggctgcccggggcccaaggacccgagggtgggacccaccccccgggctccctcccctccatggacagcggctccctctgggaggaggacgaggtgttctataactgaggtgggggctgtgctggtccagcacctgctctcaccatgacctcgcctggtgggcagcccaggcatatctggaccccggggtccagggcagggcatcccttgacccctcgggtaggcacagggtaggtgcagcagggatggggccagtgctcatggtggcctctctgtgcctcggtggacctgccccagcagtgggagccataaccccctcccccttcattacttcactcaggtgggcaccttcccctgcagggtgtctgccctcagggaactcaaggactctcagagacaccagggcagcctggcccagaggagcaacagccaggcccccaggaggacagccatggagagaactgagacccacttacagtggggtctgggaaccctgcctgtacctggggttcagtccctcccaactccctccttgtgtcttccccccagcaaaggtggggtgaccacttctggtagctaagcacctgctccccggctctcttcacccaggacatctgtctctctggagtgtctgtctgtctgtccctccctctctgaacctgcttcctccgtgtcccctgctcctcgcccctgggagcccactccccctccttgcggctccctcccatctcactcaaggttctctgaggacattaaagtggtggattcaccctggaaaa

SEQ ID NO: 74893 - DNA, 216 bp, Homo sapiens
agtgaacgtgtgggaatggattggctgaaagccaagctgcaagatcctccctaggtcacaactggcctggcagacggagccttcctagacacctgaagttcccagggaatgcaggatgccaggagttccctgcaagctgcgaggagagaggggcattcccctggacccagccaggagccggagtgacagcactgagtttccgtgtagaagccccca

SEQ ID NO: 74894 - DNA, 489 bp, Homo sapiens
ttcaccatgttagccaggatggtctcgatctcctgaccttgtgatccgcccgcctcggcctcccaaagtgctgggattacaggcttgagccaccatgcccagcctgtagatttctataaacagagaaaagtaccatcaggttggtacttgtcttgtttctgatttcttattttttatagagataggggtctcactttgttgtctaagctggtctcaaacttatggcctcaagttatcctcctacctttgtttccggccttagtggaaaagcttctagtttttcaccattgagtatgatgttaactgtagatttttcaggcgtggcctttatcatgttgaggaagttacatgctattcctagtttgttagatttctttttatcacaagagtattaaatttttaaattagatttgtattgtggtaaaatgtacatgacataaaatttaatgtaaaagaatgaagttagatccttacctatcaccatctaca

SEQ ID NO: 74895 - DNA, 441 bp, Homo sapiens
aaaatatctgtatcttgtgtcacacagtttcaatccaaaatggttgacttctatatctggtacacatttcaccctaggatctctctttaccattataatgttgattctctgtaattctcttctgtgttcaatctatttattttccatattccaaatcttcctttgtcctagtttctcatttgacagcaagtattctccaaaggcctctttggtacaggtaataggatataaatattttaagctcttgcatatctaagagtgtctttattctagtctaaatttgattgatcatttggatggatttagaattctacgctacaataattttccttaaggaatttttaatcaggtccattttttcctcggctgtaggattcaagaatttgaattcaaagagagatgggattcgcatctctatttcttcacttccttctgcacatg

SEQ ID NO: 74896 - DNA, 948 bp, Homo sapiens
gaacctgtattttggtcttgattttgatattaaattgcagtgcgaccttgggcaagtcacttaacctctacacatctcagatatttgtcctctgataaaagaacctcacctctgggtttttcagcagtgctatttttatactgtatgaataggatgagaaatagtattggagagatgaaataatatatttttatagctcaattatattatcttctttttacaggtgagtaaactgaggaacagaagggtaactttctcccagacacattggtagttagtggcaaagacagtggtacttgaggcgggggtctcatgactcaaggacttagttgcacaaatgacaggatttctgctgttcagggcttccttcacagttgtgtgtgtatatgtacacgtgtgtgtatgtatgcatgcatttatcacgatatgcaccaaagagcctttacaaaacattttctaaattgatttacttcttttactcatattaacttatttttataagggatgactagtctatatagaagaaaaacttgtattgttttccataaacagaattatgtaaataatggcaaatacaatgaaaataaaataatgcattaacttcaagctaggtcctgttgctcattgcaagcacccagcctaggccttatctggcattgtttgaaaacagagagattaataagtggcagagagtgtagatgacagactagcaacaaccactttttccttgcacactcagagaaatggagtaagcagggaagaggactgagctccttctgaggagggtcagtgtcattcaatgccaggtttgggcacacatttcagggaagtggggattcagctgggtgacaggaaaggggcaaatgatatattatgtaatatgattcagtatcagaagcattgtgattggtgttagttacaggatgttacaggcactgcggggaaggg

SEQ ID NO: 74897 - DNA, 1419 bp, Homo sapiens
ggtgcctgtagttccagctgtttgggaggctgaggcaggagaatcgcttgaatctgggaggtagaggttagagtgagccgagatcatgccactgcattccagcctgggcgaaaatgccactaatatcacttacataatattaatatatatttgaagtaggggaaaacctggaagattcctcaccaaagttttgacagtgactccagagactgggataactttgtgactttcatttcctcttaaatgttgtgccagggtctgaccggcagacccaggctgcacgatggatgaataatgtactcagacaccgatattcagtgaaagagtgcaccagagggccaggccactcacagaaagggttgtggcagctgcgtgccctgactatctggccctgtgggcctttattcagcacagatttaatgacaaaggctttgagtcaacacacctgtgggtaattaatctggtcgcagtcccccggagagagcagtcctacaaatgatcaaaggagctgggacagttatattcatcagaacagcacggtgtcaaggccctcacccccagaaagcttaggagacactgttttatggaggagagtgagattggaggaacccctgactccaggtctcctgatccttcctacacaaagcgaagctgaaaaaaagtgcaggacactccatttcctcctgggaccagacagggaagccagagccaccatggatgtcaaattccggcaaggaaacaccagtatagcaaaatctccacatcacattttaaagctcacacaatggctcaaagagaacccacatcaaaaaaccgaattcctagctcaggtgagatcaccaaagttgcctgtgaggcttcgtggaacctgcaggtagaaaggacatctttatttcgagctgcagcccagttgcttctgcgtcttggagccccttgaaaggaccctctcccttcaacagtacatagggaggccatttctggggagaaatgtagactgtccttagactcctgaggtttttacacttgcttgctgactctgtggactttgacttcatcattaaacatcttataatgatgtaatttgctttgactgtaagtgtagaacaggacgctgttcctgaatcaggaaacaagggactggtgacctgaactgccaccaccctccctggtgctcagatgcaatgaaatcgtgaggcaacaaatctatggctaggtaaagggtcaactccatttcagcaaatgtttcagatgttccttcctgcctagtaatgttccagctttaccccagccttaatcttttaaaatgtatattttccttagcgttgattttaaagtaattcgtatgtatttattacactgggtttgttgcagtaagccacctcgaatgttgctgtagaattaaagtaagcaaataaatgt

SEQ ID NO: 74898 - DNA, 661 bp, Homo sapiens
tgccactgcattccagcctgggcgaaaatgccactaatatcacttacataatattaatatatatttgaagtaggggaaaacctggaagattcctcaccaaagttttgacagtgactccagagactgggataactttgtgactttcatttcctcttaaatgttgtgccagggtctgaccggcagacccaggctgcacgatggatgaataatgtactcagacaccgatattcagtgaaagagtgcaccagagggccaggccactcacagaaagggttgtggcagctgcgtgccctgactatctggccctgtgggcctttattcagcacagatttaatgacaaaggctttgagtcaacacacctgtgggtaattaatctggtcgcagtcccccggagagagcagtcctacaaatgatcaaaggtaaacatgctctttagataaactctcttacatgtctttgtacttactcgaagctattaactcaaggtaaggggattaggctgctttcagctataaccctatcctgaggcttttgcaaaactttccactttccaagaaggtttgtgtctatttcctataactttatctttataattattcccaccacctgaccaatcccctacaatgttggaattttatcttttagtgtaaacttggatttg

SEQ ID NO: 74899 - DNA, 654 bp, Homo sapiens
aggaggggccaggagccggccggcagagagcggctcgtgggtcccaggacccctgacgtccctaggttgtactgggaggtgcgagcccgaggctcttagtcggcccagcggcacggggcacaagcgggccacagagatgggcagggagctgtgtccccagggtggcggatttccgagccacccacgcgggtggttgggaaagggcggtggattttcctgcggagaaactttcagggcgggcctggcgcgctctctgaccttgggctagttattttgtgtgcagttcacaagatgcctggccgggctccaaactcgctctctgtttggttgtgttttggctcccaagaaggcgaagccaggccttttttcttttgcacaaacagacaggaaaggagagaggaaatgcaagcaaaggtagtaggtaacctaaggtagtataagcccggggtcatctttgtgagtttgcagacttaacgtcgctaggcctcagtactctgcagaaagatggtggaggacctagatgacctcccaggccattccaggaccagtgtttacagtcctgttacataacctagtgtgggtgtgcacacacaggttattatatgttcagcactgtgcccttggaagctatgtttacatttaaagttgtgttgc

SEQ ID NO: 74900 - DNA, 470 bp, Homo sapiens
ctgcctgccccagtttcaggaatggcaccattagagtttaattcctttgggtctggaaggctttttagtctaaaaacagtccatattaacccctccccacaataaaatgtagatatatgtacccttgggattgttcagttcagtaagatcaaagaacagtggaaatatttaggtgtcctaaattataaatggggcgaatgtttattatctttttctagcaagacttctgagtttatcttcatcaatttgagcaaaaaatttaaaatacaatctcctacaaggtagggcgttagttcatttcttttctttgtacagaggccgtcataagaatgttcatgagattctatgtaagtggctcttagaaatctggggttggaaagcaaagcccttaaatgccttctaataattatccacaagtggaatacactggcatccattaaaaattacagaggttattccaatatgaaaaa

SEQ ID NO: 74901 - DNA, 195 bp, Homo sapiens
cttccttctaagagttttagctcttacgggaagttcttcgatccactttgagtgattttgtttccatatatgttatgaagaatgggtctagattcattccttggcatgtggatatttattggcttattctagtatgatttgtttgaaagaactgtttttttctcattgatttgtcttaatactgttgaaaataat

SEQ ID NO: 74902 - DNA, 405 bp, Homo sapiens
ttttttgagacagagtcttactctgtcacccaggctggagtgcagaggtgtgatctcggctcactgcaacctccgcctcccgggttcaagcaattctcccgcttgaacccaggggttcaagcaattctcccgcttgaacccaggggttcaagcaattctcccgcttgaacccaggggttcaagcaattctcccgcttgaacccaggggttcaagcaattctcccgcttgaacccaggggttcaagcaattctcccgcttgaacccaggggttcaagcaattctcccgcttgaacccaggggttcaagcctcctgagcagctgggattacaggcgcttgctaccacacccggctgattttttgtatttttagtagagacggggtttcaccatgttggccaggctgg

SEQ ID NO: 74903 - DNA, 404 bp, Homo sapiens
tataaatggaatccaacaacacataaaaagatttgtataaaaattttcacatggtgatcttttcgtagttcataagtgtgatgactgggtattcatgcatgtatgtgggatatgccacccttgacccttgttacaacattagcacattaaccatctgacatgaaaggaaaaaacaaaacaaaaaacacacatttccatatgttgtattttcattttcattcatgatcaagtgagagttattccaggtatgcaagtctgcttcaacattcaaaaaatgaatcaggccaggtgcggtggctcctgcctgtaaacctaacgcttgggaggctgaagtgggaggatcccttgaagccaagagttcccttgaagccaagaccagcctgggcaacacagtaagacctggc

SEQ ID NO: 74904 - DNA, 541 bp, Homo sapiens
gttcacttgttccaaggtgttactcacttggccctgtggaaatgacagtcagggagcctgggtccaaggcctgtctctaatttgccaggtgatcttgcccaagtttctctctgcagctcagcttacccatctacacaaaggctgcaaattcagatgcttacagggcctgggcaactaatagaagtgtgtgcagtgtctgggaaggcagaggttttttaactgtcttgctctccagtgcctggtatgcagcaggtgctcaataaatacttgaaggcatgaatggggccagcataactcagctcctgctcactgttgccaaggaggccaattgttgtggccccacccttggatatctggggatttctgaaatctggactggtgtgaatctgccccaatttttaaatgtgaggccatttgaggtggctcatgcctggaatcccagcactttgggaggctgagacaggaggatcacttgagcacaggagtttaagaccagcctgagcaatgtagtgaaaccccatctccaccaaataaaaaaaaa

SEQ ID NO: 74905 - DNA, 666 bp, Homo sapiens
atccacgccccttggcctcccaaagtgctgggattaggattagaggcgtgagccaccgtgcctggccacaagtaatttttaaatggtgtgtgtgtgtatttagtttgctttttaaatgaacaatgatttggaaaaatcttaatccagtggcatgttactggcagtattttggattagaacgtgggctttcaagttaaatagacccattcatgtttggactccacctctgctacttaatagctctgtaatctggggcatgttacttaaaatctctgagcctctacaaccgtaaataggaagagtgagcctgcagtgaaggtaaacgtgatgcctaacttcgacgatttcatgtaaatcgcccagcatgatgtttggtgtatagttggtgctcagtattactccctctccccctccctcttttccctccttaactcaagttagctctttggtaccttacatatctcacttcatttcccaaggaaacaccactgtaaaacataattataaattgctgtacaaaataccttccctggaccttgtttgaaggtctttccttttatattgtatcccttttcttttttggaggtcagtaggaatggttgaggcagtcttgtgtctctgatgaatcaatcgctaaaacctacctgaagaaactaagaagttccc

SEQ ID NO: 74906 - DNA, 453 bp, Homo sapiens
atccacgccccttggcctcccaaagtgctgggattaggattagaggcgtgagccaccgtgcctggccacaagtaatttttaaatggtgtgtgtgtgtatttagtttgctttttaaatgaacaatgatttggaaaaatcttaatccagtggcatgttactggcagtattttggattagaacgtgggctttcaagttaaatagacccattcatgtttggactccacctctgctacttaatagctctgtaatctggggcatgttacttaaaatctctgagcctctacaaccgtaaatagggagggggagagggagtaatactgagcaccaactatacgccaaacatcatgctgggcgatttacatgaaatcgtcgaagttaggcatcacgtttaccttcactgcaggctcactcttcctatttacggttgtagaggctcagagattttaagggggt

SEQ ID NO: 74907 - DNA, 264 bp, Homo sapiens
ttacattattggcttgttaattaagggaagaattccataattgttttaaatcaatcacactgcacaggggacattttgcctatttgtttttctgcacatattttatatgtcattgtttatgtttgcttaaaatgccaagatgtgcttaagttagtaatgctaatattgatccaaaactctcaatttatgactgattcttcatttttttcttttgtaagtcattgctttgctttaactcttaatgttatcgggaataaggtattt

SEQ ID NO: 74908 - DNA, 556 bp, Homo sapiens
ttaatactaaagatgcatttggtcagaaatatatattattagtttttattcagaattaatacaaagatataagatatcaaatatcaaaaagattttcttaatttagatatctgagccatagcaaatgtttatttgctaaatgttgatttgtagctaatgatattttggaataagaataatttttcatattaaaaatgaatgtttagattgttcatattgtagtgttttaatgtttctgtgttgttagaattctgcatttgatcattttgtaaaatagtacttaataaaaatatcaaagattcaaagaatttgattctgctacttggtaaattgcaagtttaattgacatataaatcatgaaaatacaaactctacttagaaaataatttttaaagtaccgtaattgttatatgaccttgaagttccagcaatctattgcataactcttcaagagaagtcacatggaggaaacctcatatttccttaaatttattagtgttccttggtggtctaaactattggggttttttttttcaaggtttcttttcaaagcaat

SEQ ID NO: 74909 - DNA, 627 bp, Homo sapiens
agtttcctgaagcctctcagccatgcttccagttaagcctgcggaacttttcaggagctggacagaagtttgtattacaggctcgtagcaccggaggtttctgatggagcagacaacttgaggaaggccggccttgctgaacacagtggactgaccgggtctggacccctcccccacaggtgactgtgcactgcagcagagagaagaggaaggagtcagaaacactctactgagatcctcccggatagataacgtacgtacatattgatacctctacccggactctgtgattaatggtgaggtggggagcacccgagtcctctgaactgaacagctgtgcagcaacatctgctgggtggaatgctggaaggaccgcgtcacacaccaatcctagctaaagtttcacccaagtcttctgaaaagaagggtgcctctagcatctgataagtttaaaagcgaagtatccttggctgaattgcctgacattctgagctttagggaccatactacccctgaataggagtacttagcaccgtgcatagtaatagcttgacaaatattagctattacattgttcagaaacatgatgtaagaaccaaatgagtaaaggctgtgagcagcatttct

SEQ ID NO: 74910 - DNA, 835 bp, Homo sapiens
tagtggcttataacattatgcatttattgcatggaaattcagaaatggttagctgtgtggttctggcttgaggtctctcatcaggctgcaagaaagattggaggtggggctgtagttatctgaatactcggctgggctggggaatctgcttctggaaggctttctcacatagcccagtggttgtcaggaaacctcagtccttcttcatggactgcttgaggaccatcacaacatggtaactggcttcctgcagaattttcaggagctggacagaagtttgtattacaggctcgtagcaccggaggtttctgatggagcagacaacttgaggaaggccggccttgctgaacacagtggactgaccgggtctggacccctcccccacaggtgactgtgcactgcagcagagagaagaggaaggagtcagaaacactctactgagatcctcccggatagataacgtacgtacatattgatacctctacccggactctgtgattaatggtgaggtggggagcacccgagtcctctgaactgaacagctgtgcagcaacatctgctgggtggaatgctggaaggaccgcgtcacacaccaatcctagctaaagtttcacccaagtcttctgaaaagaagggtgcctctagcatctgataagtttaaaagcgaagtatccttggctgaattgcctgacattctgagctttagggaccatactacccctgaataggagtacttagcaccgtgcatagtaatagcttgacaaatattagctattacattgttcagaaacatgatgtaagaaccaaatgagtaaaggctgtgagcagcatttct

SEQ ID NO: 74911 - DNA, 592 bp, Homo sapiens
tcgagctggtacccgttcccactcagcaaagacccaaatatcgtcatagccaagatggatgccacagccaatgatgtgccttctccatatgaagtcagaggttttcctaccatatacttctctccagccaacaagaagctaaatccaaagaaatatgaaggtggccgtgaattaagtgattttattagctatctacaaagagaagctacaaacccccctgtaattcaagaagaaaaacccaagaagaagaagaaggcacaggaggatctctaaagcagtagccaaacaccactttgtaaaaggactcttccatcagagatgggaaaaccattggggaggactaggacccatatgggaattattacctctcagggccgagaggacagaatggatataatctgaatcctgttaaattttctctaaactgtttcttagctgcactgtttatggaaataccaggaccagtttatgtttgtggttttgggaaaaattatttgtgttgggggaaatgttgtgggggtggggttgagttgggggtattttctaattttttttgtacatttggaacagtgacaataaatgagaccccttt

SEQ ID NO: 74912 - DNA, 963 bp, Homo sapiens
  misc_feature (328)..(328): n is a, c, g, or t
  misc_feature (337)..(337): n is a, c, g, or t
  misc_feature (365)..(365): n is a, c, g, or t
  misc_feature (394)..(394): n is a, c, g, or t
  misc_feature (405)..(405): n is a, c, g, or t
  misc_feature (433)..(433): n is a, c, g, or t
  misc_feature (456)..(457): n is a, c, g, or t
  misc_feature (495)..(495): n is a, c, g, or t
  misc_feature (500)..(500): n is a, c, g, or t
  misc_feature (503)..(503): n is a, c, g, or t
  misc_feature (537)..(537): n is a, c, g, or t
  misc_feature (564)..(564): n is a, c, g, or t
ctcttttgggtctttcttcttgaattacaggggggtttgtagcttctctttgtagatagctaataaaatcacttaattcacggccaccttcatatttctttggatttagcttcttgtcggctggagagaagtttgtcatgcaggaggagttctcgcgtgatgggaaggctctggagaggttcctgcaggattactttgatggcaatctgaagagatacctgaagtctgaacctatcccagagagcaatgatgggcctgtgaaggtagtggtagcagagaattttgatgaaatagtgaataatgaaaataaagatgtgctgaaaaaatnaaaaacccnaaaataaaacaaaaaaagaacctagaanccaaataaaaaaaaaaatgaaaaaaaacnaaaaaaaaaanaaaaaaaaaaaaaaaaaaaaaaaaaaanaaaaaccaaaaaaaaaccaacannaaaaaaaaaaaaaaaaaaaacaaaaaaaaaaaaaaaancaacnaanaaaaaaaaaaaaccaaaaaaaaaaaaaaaaaacnaaaaaaaaaaaaaaaaaaaaaaaaaanaaaaaaaaaaaaaaaaaaacccccctgtaattcaagaagaaaaacccaagaagaagaagaaggcacaggaggatctctaaagcagtagccaaacaccactttgtaaaaggactcttccatcagagatgggaaaaccattggggaggactaggacccatatgggaattattacctctcagggccgagaggacagaatggatataatctgaatcctgttaaattttctctaaactgtttcttagctgcactgtttatggaaataccaggaccagtttatgtttgtggttttgggaaaaattatttgtgttgggggaaatgttgtgggggtggggttgagttgggggtattttctaattttttttgtacatttggaacagtgacaataaatgagaccccttt

SEQ ID NO: 74913 - DNA, 1959 bp, Homo sapiens
  misc_feature (168)..(168): n is a, c, g, or t
  misc_feature (234)..(234): n is a, c, g, or t
  misc_feature (263)..(263): n is a, c, g, or t
  misc_feature (413)..(413): n is a, c, g, or t
agcggaggtccgcctgggccagacgcgcgagcgcaagcagcgggttagtggtcgcgcgcccgacctccgcagtcccagccgagccgcgacccttccggccgtccccaccccacctcgccgccatgcgcctccgccgcctagcgctgttcccgggtgtggcgctgcttnttgccgcggcccgcctcgccgctgcctccgacgtgctagaactcacggacgacaacttcgagagtngcatctccgacacgggctctgcgggcctnatgctcgtcgagttcttcgctccctggtgtggacactgcaagagacttgcacctgagtatgaagctgcagctaccagattaaaaggaatagtcccattagcaaaggttgattgcactgccaacactaacacctgtaataaatatggagtnagtggatatccaaccctgaagatatttagagatggtgaagaagcaggtgcttatgatggacctaggactgctgatggaattgtcagccacttgaagaagcaggcaggaccagcttcagtgcctctcaggactgaggaagaatttaagaaattcattagtgataaagatgcctctatagtaggttttttcgatgattcattcagtgaggctcactccgagttcctaaaagcagccagcaacttgagggataactaccgatttgcacatacgaatgttgagtctctggtgaacgagtatgatgataatggagagggtatcatcttatttcgtccttcacatctcactaacaagtttgaggacaagactgtggcatatacagagcaaaaaatgaccagtggcaaaattaaaaagtttatccaggaaaacatttttggtatctgccctcacatgacagaagacaataaagatttgatacagggcaaggacttacttattgcttactatgatgtggactatgaaaagaacgctaaaggttccaactactggagaaacagggtaatgatggtggcaaagaaattcctggatgctgggcacaaactcaactttgctgtagctagccgcaaaacctttagccatgaactttctgattttggcttggagagcactgctggagagattcctgttgttgctatcagaactgctaaaggagagaagtttgtcatgcaggaggagttctcgcgtgatgggaaggctctggagaggttcctgcaggattactttgatggcaatctgaagagatacctgaagtctgaacctatcccagagagcaatgatgggcctgtgaaggtagtggtagcagagaattttgatgaaatagtgaataatgaaaataaagatgtgctgattgaattttatgccccttggtgtggtcattgtaagaacctggagcccaagtataaagaacttggcgagaagctcagcaaagacccaaatatcgtcatagccaagatggatgccacagccaatgatgtgccttctccatatgaagtcagaggttttcctaccatatacttctctccagccaacaagaagctaaatccaaagaaatatgaaggtggccgtgaattaagtgattttattagctatctacaaagagaagctacaaacccccctgtaattcaagaagaaaaacccaagaagaagaagaaggcacaggaggatctctaaagcagtagccaaacaccactttgtaaaaggactcttccatcagagatgggaaaaccattggggaggactaggacccatatgggaattattacctctcagggccgagaggacagaatggatataatctgaatcctgttaaattttctctaaactgtttcttagctgcactgtttatggaaataccaggaccagtttatgtttgtggttttgggaaaaattatttgtgttgggggaaatgttgtgggggtggggttgagttgggggtattttctaattttttttgtacatttggaacagtgacaataaatgagaccccttt

SEQ ID NO: 74914 - DNA, 1881 bp, Homo sapiens
  misc_feature (168)..(168): n is a, c, g, or t
  misc_feature (234)..(234): n is a, c, g, or t
  misc_feature (263)..(263): n is a, c, g, or t
  misc_feature (413)..(413): n is a, c, g, or t
agcggaggtccgcctgggccagacgcgcgagcgcaagcagcgggttagtggtcgcgcgcccgacctccgcagtcccagccgagccgcgacccttccggccgtccccaccccacctcgccgccatgcgcctccgccgcctagcgctgttcccgggtgtggcgctgcttnttgccgcggcccgcctcgccgctgcctccgacgtgctagaactcacggacgacaacttcgagagtngcatctccgacacgggctctgcgggcctnatgctcgtcgagttcttcgctccctggtgtggacactgcaagagacttgcacctgagtatgaagctgcagctaccagattaaaaggaatagtcccattagcaaaggttgattgcactgccaacactaacacctgtaataaatatggagtnagtggatatccaaccctgaagatatttagagatggtgaagaagcaggtgcttatgatggacctaggactgctgatggaattgtcagccacttgaagaagcaggcaggaccagcttcagtgcctctcaggactgaggaagaatttaagaaattcattagtgataaagatgcctctatagtaggttttttcgatgattcattcagtgaggctcactccgagttcctaaaagcagccagcaacttgagggataactaccgatttgcacatacgaatgttgagtctctggtgaacgagtatgatgataatggagagggtatcatcttatttcgtccttcacatctcactaacaagtttgaggacaagactgtggcatatacagagcaaaaaatgaccagtggcaaaattaaaaagtttatccaggaaaacatttttggtatctgccctcacatgacagaagacaataaagatttgatacagggcaaggacttacttattgcttactatgatgtggactatgaaaagaacgctaaaggttccaactactggagaaacagggtaatgatggtggcaaagaaattcctggatgctgggcacaaactcaactttgctgtagctagccgcaaaacctttagccatgaactttctgattttggcttggagagcactgctggagagattcctgttgttgctatcagaactgctaaaggagagaagtttgtcatgcaggaggagttctcgcgtgatgggaaggctctggagaggttcctgcaggattactttgatggcaatctgaagagatacctgaagtctgaacctatcccagagagcaatgatgggcctgtgaaggtagtggtagcagagaattttgatgaaatagtgaataatgaaaataaagatgtgctgattgaattttatgccccttggtgtggtcattgtaagaacctggagcccaagtataaagaacttggcgagaagctcagcaaagacccaaatatcgtcatagccaagatggatgccacagccaatgatgtgccttctccatatgaagtcagaggttttcctaccatatacttctctccagccaacaagaagctaaatccaaagaaatatgaaggtggccgtgaattaagtgattttattagctatctacaaagagaagctacaaacccccctgtaattcaagaagaaaaacccaagaagaagaagaaggcacaggaggatctctaaagcagtagccaaacaccactttgtaaaaggactcttccatcagagatgggaaaaccattggggaggactaggacccatatgggaattattacctctcagggccgagaggacagaatggatataatctgaatcctgttaaattttctctaaactgtttcttagctgcactgtttatggaaataccaggaccagtttatgtttgtggttttgggtactacgctttggcaggttaccgagctcg

SEQ ID NO: 74915 - DNA, 1168 bp, Homo sapiens
ccagttggtgcatagattaatcccgttttctccaggcaaaatcactttaggcgtatactgaccgctactatgacagaagacaataaagatttgatacagggcaaggacttacttattgcttactatgatgtggactatgaaaagaacgctaaaggttccaactactggagaaacagggtaatgatggtggcaaagaaattcctggatgctgggcacaaactcaactttgctgtagctagccgcaaaacctttagccatgaactttctgattttggcttggagagcactgctggagagattcctgttgttgctatcagaactgctaaaggagagaagtttgtcatgcaggaggagttctcgcgtgatgggaaggctctggagaggttcctgcaggattactttgatggcaatctgaagagatacctgaagtctgaacctatcccagagagcaatgatgggcctgtgaaggtagtggtagcagagaattttgatgaaatagtgaataatgaaaataaagatgtgctgattgaattttatgccccttggtgtggtcattgtaagaacctggagcccaagtataaagaacttggcgagaagctcagcaaagacccaaatatcgtcatagccaagatggatgccacagccaatgatgtgccttctccatatgaagtcagaggttttcctaccatatacttctctccagccaacaagaagctaaatccaaagaaatatgaaggtggccgtgaattaagtgattttattagctatctacaaagagaagctacaaacccccctgtaattcaagaagaaaaacccaagaagaagaagaaggcacaggaggatctctaaagcagtagccaaacaccactttgtaaaaggactcttccatcagagatgggaaaaccattggggaggactaggacccatatgggaattattacctctcagggccgagaggacagaatggatataatctgaatcctgttaaattttctctaaactgtttcttagctgcactgtttatggaaataccaggaccagtttatgtttgtggttttgggaaaaattatttgtgttgggggaaatgttgtgggggtggggttgagttgggggtattttctaattttttttgtacatttggaacagtgacaataaatgagaccccttt

SEQ ID NO: 74916 - DNA, 1848 bp, Homo sapiens
  misc_feature (168)..(168): n is a, c, g, or t
  misc_feature (234)..(234): n is a, c, g, or t
  misc_feature (263)..(263): n is a, c, g, or t
  misc_feature (413)..(413): n is a, c, g, or t
agcggaggtccgcctgggccagacgcgcgagcgcaagcagcgggttagtggtcgcgcgcccgacctccgcagtcccagccgagccgcgacccttccggccgtccccaccccacctcgccgccatgcgcctccgccgcctagcgctgttcccgggtgtggcgctgcttnttgccgcggcccgcctcgccgctgcctccgacgtgctagaactcacggacgacaacttcgagagtngcatctccgacacgggctctgcgggcctnatgctcgtcgagttcttcgctccctggtgtggacactgcaagagacttgcacctgagtatgaagctgcagctaccagattaaaaggaatagtcccattagcaaaggttgattgcactgccaacactaacacctgtaataaatatggagtnagtggatatccaaccctgaagatatttagagatggtgaagaagcaggtgcttatgatggacctaggactgctgatggaattgtcagccacttgaagaagcaggcaggaccagcttcagtgcctctcaggactgaggaagaatttaagaaattcattagtgataaagatgcctctatagtaggttttttcgatgattcattcagtgaggctcactccgagttcctaaaagcagccagcaacttgagggataactaccgatttgcacatacgaatgttgagtctctggtgaacgagtatgatgataatggagagggtatcatcttatttcgtccttcacatctcactaacaagtttgaggacaagactgtggcatatacagagcaaaaaatgaccagtggcaaaattaaaaagtttatccaggaaaacatttttggtatctgccctcacatgacagaagacaataaagatttgatacagggcaaggacttacttattgcttactatgatgtggactatgaaaagaacgctaaaggttccaactactggagaaacagtgctggagagattcctgttgttgctatcagaactgctaaaggagagaagtttgtcatgcaggaggagttctcgcgtgatgggaaggctctggagaggttcctgcaggattactttgatggcaatctgaagagatacctgaagtctgaacctatcccagagagcaatgatgggcctgtgaaggtagtggtagcagagaattttgatgaaatagtgaataatgaaaataaagatgtgctgattgaattttatgccccttggtgtggtcattgtaagaacctggagcccaagtataaagaacttggcgagaagctcagcaaagacccaaatatcgtcatagccaagatggatgccacagccaatgatgtgccttctccatatgaagtcagaggttttcctaccatatacttctctccagccaacaagaagctaaatccaaagaaatatgaaggtggccgtgaattaagtgattttattagctatctacaaagagaagctacaaacccccctgtaattcaagaagaaaaacccaagaagaagaagaaggcacaggaggatctctaaagcagtagccaaacaccactttgtaaaaggactcttccatcagagatgggaaaaccattggggaggactaggacccatatgggaattattacctctcagggccgagaggacagaatggatataatctgaatcctgttaaattttctctaaactgtttcttagctgcactgtttatggaaataccaggaccagtttatgtttgtggttttgggaaaaattatttgtgttgggggaaatgttgtgggggtggggttgagttgggggtattttctaattttttttgtacatttggaacagtgacaataaatgagaccccttt

SEQ ID NO: 74917 - DNA, 1470 bp, Homo sapiens
  misc_feature (168)..(168): n is a, c, g, or t
  misc_feature (234)..(234): n is a, c, g, or t
  misc_feature (263)..(263): n is a, c, g, or t
  misc_feature (413)..(413): n is a, c, g, or t
agcggaggtccgcctgggccagacgcgcgagcgcaagcagcgggttagtggtcgcgcgcccgacctccgcagtcccagccgagccgcgacccttccggccgtccccaccccacctcgccgccatgcgcctccgccgcctagcgctgttcccgggtgtggcgctgcttnttgccgcggcccgcctcgccgctgcctccgacgtgctagaactcacggacgacaacttcgagagtngcatctccgacacgggctctgcgggcctnatgctcgtcgagttcttcgctccctggtgtggacactgcaagagacttgcacctgagtatgaagctgcagctaccagattaaaaggaatagtcccattagcaaaggttgattgcactgccaacactaacacctgtaataaatatggagtnagtggatatccaaccctgaagatatttagagatggtgaagaagcaggtgcttatgatggacctaggactgctgatggaattgtcagccacttgaagaagcaggcaggaccagcttcagtgcctctcaggactgaggaagaatttaagaaattcattagtgataaagatgcctctatagtaggttttttcgatgattcattcagtgaggctcactccgagttcctaaaagcagccagcaacttgagggataactaccgatttgcacatacgaatgttgagtctctggtgaacgagtatgatgataatggagagggtatcatcttatttcgtccttcacatctcactaacaagtttgaggacaagactgtggcatatacagagcaaaaaatgaccagtggcaaaattaaaaagtttatccaggaaaacatttttggtatctgccctcacatgacagaagacaataaagatttgatacagggcaaggacttacttattgcttactatgatgtggactatgaaaagaacgctaaaggttccaactactggagaaacagggtaatgatggtggcaaagaaattcctggatgctgggcacaaactcaactttgctgtagctagccgcaaaacctttagccatgaactttctgattttggcttggagagcactgctggagagattcctgttgttgctatcagaactgctaaaggagagaagtttgtcatgcaggaggagttctcgcgtgatgggaaggctctggagaggttcctgcaggattactttgatggcaatctgaagagatacctgaagtctgaacctatcccagagagcaatgatgggcctgtgaaggtagtggtagcagagaattttgatgaaatagtgaataatgaaaataaagatgtgctgattgaattttatgccccttggtgcgatccttctgcgaacaatgagcactaggatcagcacattatcgccgtatattagcgtagataccaaatatcatcacacgcaagatggatgatacagctaatgatagtgcctttctctatatgaaatcagg

SEQ ID NO: 74918 - DNA, 1431 bp, Homo sapiens
  misc_feature (168)..(168): n is a, c, g, or t
  misc_feature (234)..(234): n is a, c, g, or t
  misc_feature (263)..(263): n is a, c, g, or t
  misc_feature (413)..(413): n is a, c, g, or t
agcggaggtccgcctgggccagacgcgcgagcgcaagcagcgggttagtggtcgcgcgcccgacctccgcagtcccagccgagccgcgacccttccggccgtccccaccccacctcgccgccatgcgcctccgccgcctagcgctgttcccgggtgtggcgctgcttnttgccgcggcccgcctcgccgctgcctccgacgtgctagaactcacggacgacaacttcgagagtngcatctccgacacgggctctgcgggcctnatgctcgtcgagttcttcgctccctggtgtggacactgcaagagacttgcacctgagtatgaagctgcagctaccagattaaaaggaatagtcccattagcaaaggttgattgcactgccaacactaacacctgtaataaatatggagtnagtggatatccaaccctgaagatatttagagatggtgaagaagcaggtgcttatgatggacctaggactgctgatggaattgtcagccacttgaagaagcaggcaggaccagcttcagtgcctctcaggactgaggaagaatttaagaaattcattagtgataaagatgcctctatagtaggttttttcgatgattcattcagtgaggctcactccgagttcctaaaagcagccagcaacttgagggataactaccgatttgcacatacgaatgttgagtctctggtgaacgagtatgatgataatggagagggtatcatcttatttcgtccttcacatctcactaacaagtttgaggacaagactgtggcatatacagagcaaaaaatgaccagtggcaaaattaaaaagtttatccaggaaaacatttttggtatctgccctcacatgacagaagacaataaagatttgatacagggcaaggacttacttattgcttactatgatgtggactatgaaaagaacgctaaaggttccaactactggagaaacagggtaatgatggtggcaaagaaattcctggatgctgggcacaaactcaactttgctgtagctagccgcaaaacctttagccatgaactttctgattttggcttggagagcactgctggagagattcctgttgttgctatcagaactgctaaaggagagaagtttgtcatgcaggaggagttctcgtgagttgctagttgggctttgattctccaaggcaattattaaagccttttatactacaaaggatttctaaagaacaataaccctggaatgtgaagataggtcttttaatcaagacctatgactgtcatttttctcaatttaaatataggtactttagaccaggcgtggtggctcacgcctgtaatcccagcactttgggaggccaaggcaggtggatcgcctaaggtcgggagttcgagaccagcctgaccaacatagagaaaccccgtctctactaaaa

SEQ ID NO: 74919 - DNA, 963 bp, Homo sapiens
ctcttttgggtctttcttcttgaattacaggggggtttgtagcttctctttgtagatagctaataaaatcacttaattcacggccaccttcatatttctttggatttagcttcttgtcggctggagagaagtttgtcatgcaggaggagttctcgcgtgatgggaaggctctggagaggttcctgcaggattactttgatggcaatctgaagagatacctgaagtctgaacctatcccagagagcaatgatgggcctgtgaaggtagtggtagcagagaattttgatgaaatagtgaataatgaaaataaagatgtgctgattgaattttatgccccttggtgtggtcattgtaagaacctggagcccaagtataaagaacttggcgagaagctcagcaaagacccaaatatcgtcatagccaagatggatgccacagccaatgatgtgccttctccatatgaagtcagaggttttcctaccatatacttctctccagccaacaagaagctaaatccaaagaaatatgaaggtggccgtgaattaagtgattttattagctatctacaaagagaagctacaaacccccctgtaattcaagaagaaaaacccaagaagaagaagaaggcacaggaggatctctaaagcagtagccaaacaccactttgtaaaaggactcttccatcagagatgggaaaaccattggggaggactaggacccatatgggaattattacctctcagggccgagaggacagaatggatataatctgaatcctgttaaattttctctaaactgtttcttagctgcactgtttatggaaataccaggaccagtttatgtttgtggttttgggaaaaattatttgtgttgggggaaatgttgtgggggtggggttgagttgggggtattttctaattttttttgtacatttggaacagtgacaataaatgagaccccttt

SEQ ID NO: 74920 - DNA, 1005 bp, Homo sapiens
  misc_feature (6)..(6): n is a, c, g, or t
  misc_feature (25)..(26): n is a, c, g, or t
  misc_feature (45)..(45): n is a, c, g, or t
  misc_feature (73)..(73): n is a, c, g, or t
  misc_feature (75)..(75): n is a, c, g, or t
  misc_feature (80)..(80): n is a, c, g, or t
cccggnggtccttagattttgtacnntaattgccttctcttgctnagcctagttttggctccagcaattcagngnaagtngttctactgaggtccagtatcatacaatccagatagctccttgatggtcttgcttgggtcaaggaaactttgggctctatggtaaaatagtggaattcctttaggaatctctccatcttcatagatattatttttcacaggtgaactgtaggaaagtaccaagtttacagttagatattgggagtagtgtgattgaggtggagtagatttggcgtaggtttggtctagggtgtagcctgagaataggggaaatcagtgaataatgaaaataaagatgtgctgattgaattttatgccccttggtgtggtcattgtaagaacctggagcccaagtataaagaacttggcgagaagctcagcaaagacccaaatatcgtcatagccaagatggatgccacagccaatgatgtgccttctccatatgaagtcagaggttttcctaccatatacttctctccagccaacaagaagctaaatccaaagaaatatgaaggtggccgtgaattaagtgattttattagctatctacaaagagaagctacaaacccccctgtaattcaagaagaaaaacccaagaagaagaagaaggcacaggaggatctctaaagcagtagccaaacaccactttgtaaaaggactcttccatcagagatgggaaaaccattggggaggactaggacccatatgggaattattacctctcagggccgagaggacagaatggatataatctgaatcctgttaaattttctctaaactgtttcttagctgcactgtttatggaaataccaggaccagtttatgtttgtggttttgggaaaaattatttgtgttgggggaaatgttgtgggggtggggttgagttgggggtattttctaattttttttgtacatttggaacagtgacaataaatgagaccccttt

SEQ ID NO: 74921 - DNA, 612 bp, Homo sapiens
ctcgcgttactgcaggtgatctagagcgatcccgtccaaagcgagtacccaaatatcgtcttggcccagatggatgccgatagatgaatgatagtagccttctccgacatgaagtcaggagttttcctaccatatacttctctccagccaacaagaagctaaatccaaagaaatatgaaggtggccgtgaattaagtgattttattagctatctacaaagagaagctacaaacccccctgtaattcaagaagaaaaacccaagaagaagaagaaggcacaggaggatctctaaagcagtagccaaacaccactttgtaaaaggactcttccatcagagatgggaaaaccattggggaggactaggacccatatgggaattattacctctcagggccgagaggacagaatggatataatctgaatcctgttaaattttctctaaactgtttcttagctgcactgtttatggaaataccaggaccagtttatgtttgtggttttgggaaaaattatttgtgttgggggaaatgttgtgggggtggggttgagttgggggtattttctaattttttttgtacatttggaacagtgacaataaatgagaccccttt

SEQ ID NO: 74922 - DNA, 873 bp, Homo sapiens
ttggcccatcgtgtggctgcccattgtgtagtgatgtctgccttctgccagggcttgtcggacatacttctggtgggcactgtgcggaaacttgaggatgaaatcagtgagctgcatggcacttgaaaggcatggcctgtctcctcacttgagtgcaaggtccatcgaccaaagccctgttctgatcaataacatctacaatcgcgaccaattttccggcatgaggtccaaaggagacataggccacccggccaacctccacgaagcgcctgaacaccatgttggcagcgttaggcgagaagctcagcaaagacccaaatatcgtcatagccaagatggatgccacagccaatgatgtgccttctccatatgaagtcagaggttttcctaccatatacttctctccagccaacaagaagctaaatccaaagaaatatgaaggtggccgtgaattaagtgattttattagctatctacaaagagaagctacaaacccccctgtaattcaagaagaaaaacccaagaagaagaagaaggcacaggaggatctctaaagcagtagccaaacaccactttgtaaaaggactcttccatcagagatgggaaaaccattggggaggactaggacccatatgggaattattacctctcagggccgagaggacagaatggatataatctgaatcctgttaaattttctctaaactgtttcttagctgcactgtttatggaaataccaggaccagtttatgtttgtggttttgggaaaaattatttgtgttgggggaaatgttgtgggggtggggttgagttgggggtattttctaattttttttgtacatttggaacagtgacaataaatgagaccccttt

SEQ ID NO: 74923 - DNA, 308 bp, Homo sapiens
ttttctcagcggtgggaatagattaacaagccttacccttgttttccaattgtaggcgtgatgggaaggctctggagaggttcctgcaggattactttgatggcaatctgaagagatacctgaagtctgaacctatcccagagagcaatgatgggcctgtgaaggtgaggtgctcacagcctcatcaagctatgagcaattgcctgtcctcatttctttgttccaaaactgtggggtctaaatgaagacttcgttggccatctctttttttttttgtccttactcccgagtcataaaataagcattgg

SEQ ID NO: 74924 - DNA, 905 bp, Homo sapiens
tcatcgctgtctggaacagcgatgactcgagagcggagtagcgatggcgggtctgactgacttgcagcggctacaggcccgagtggaagagctggagcgctgggtgtacgggccgggcggggcgcgcggctcacggaaggtggctgacggcctggtcaaggtgcaggtggctttggggaacatttccagcaagagggagagggtgaagattctctacaaaaagattgaagatctgatcaagtacctggatcctgagtacatcgaccgcattgccatacctgatgcctctaagctgcaattcatcctagcagaggagcagtttatcctttcccaggttgcactcctggagcaggtgaatgccttggtgcccatgctggacagtgctcacatcaaagccgttcctgagcatgctgcccgcctgcagcgcttggcccagatccacattcagcagcaggaccagtgtgtggaaatcactgaggagtccaaggctctcctggaggaatacaacaagactacaatgcttctctccaagcaattcgtgcagtgggatgagctactttgccagctagaggccgccacgcaagtgaagccagcagaggagtgatagctgctccccatcccaaagtgggcctgggcagtcaggctccagggccctatgccaacctgcctttgttacaaggcagaggaagctttgtatttattggcttcaaggcccacctctctgtactctgggctctaaagttggaggtcaggttacctgaggtttgcaatttgcaacacccaccctccccccaatcagtgttcttatttcagtgacaataaaccatagagatgacaaaaaaaaaaaaggggggcggtaaaaaatcccgcggggcccatttactacccttttgtaaaagggccaa

SEQ ID NO: 74925 - DNA, 1034 bp, Homo sapiens
caaacttcccaccttgcctcccaagtagctaggattacaggtgtgtgccaccacacctggctatttttagtagagacggggtttcaccatgttgtccaggctggtctcaaactcctggccccatgtgatccacctgcctcggcctctcagagtgctgggattacaggcgtgagctactgtgcctggcctgttccttatctttatcctcaccctgaggtacttgccacatccaccaattaaaattaccaggatagagagcccagttttaggacctcaggcaatttgggcctgagaacactagcctaagctctagcagtccccagctctggggattccttctgccttctacctacccccaagcatctcttcttcaaggtgctgcagaacccagattttactatcagagtctctgccaggtccatgaatgtatgtgaattctttctgctgcactgctgagagcagtccctgggcctggactttgacaagcagatagtggctttaattgaatccagatatccatcttgtctgtctgtggaggtatttttcccagctccccctccctacccctgatcagctgcccgctgagtatctgacagccttaagctttgagcccagcatggtggccaagccttggcgtgttggattccagcttagggacctggcatccatcttcagactccctgttccctaagccaggcagacctgcccccgctgggctgagagcaaagggacaggtcctataatagccaaagctctctttacctggtcctgcttatagcactggggtgggggtagggagcaacactgggaaccccaaggttttgtcttctcctcgggacatgtatcttcccctatgccaacctgcctttgttacaaggcagaggaagctttgtatttattggcttcaaggcccacctctctgtactctgggctctaaagttggaggtcaggttacctgaggtttgcaatttgcaacacccaccctccccccaatcagtgttcttatttcagtgacaataaaccatagagatgac

SEQ ID NO: 74926 - DNA, 464 bp, Homo sapiens
gtctgaagtattttgtattttgtggcctaggaggtgctccctgagtttgttgataggaggctagaagaagaggtcttgaagttaaaccttggagaaaggtgggatttggagaaattgagaggctcattaggctcagatgggtcagacctgaggcatccaggagagttgggggcaggatggaaatgtgcacctagagaagggggcagtggacagagtcactgtccaaagctctaggacctagccatctcccttgccaggtcctcaggcccttacatgggctgattagcaatgcccaggtttgcttcactgcaactatcttgtccatttttgctttagaggagcagtttatcctttcccaggttgcactcctggagcaggtgaatgccttggtgcccatgctggacagtgctcacatcaaaggtatctctctggggttatagcttcactactctggttggggaggt

SEQ ID NO: 74927 - DNA, 851 bp, Homo sapiens
aaacataggctaggtacgaggccggtggtgaatcggccgaggtgggtcggtagtagcgatggcgggtctgactgacttgcagcggctacaggcccgagtggaagagctggagcgctgggtgtacgggccgggcggggcgcgcggctcacggaaggtggctgacggcctggtcaaggtgcaggtggctttggggaacatttccagcaagagggagagggtgaagattctctacaaaaagattgaagatctgatcaagtacctggatcctgagtacatcgaccgcattgccatacctgatgcctctaagctgcaattcatcctagcagaggagcagtttatcctttcccaggttgcactcctggagcaggtgaatgccttggtgcccatgctggacagtgctcacatcaaagccgttcctgagcatgctgcccgcctgcagcgcttggcccagatccacattcagcagcaggaccagtgtgtggaaatcactgaggagtccaaggctctcctggaggaatacaacaagactacaatgcttctctccaagcaattcgtgcagtgggatgagctactttgccagctagaggccgccacgcaagtgaagccagcagaggagtgatagctgctccccatcccaaagtgggcctgggcagtcaggctccagggccctatgccaacctgcctttgttacaaggcagaggaagctttgtatttattggcttcaaggcccacctctctgtactctgggctctaaagttggaggtcaggttacctgaggtttgcaatttgcaacacccaccctccccccaatcagtgttcttatttcagtgacaataaaccatagagatgac

SEQ ID NO: 74928 - DNA, 673 bp, Homo sapiens
catgaggtgttgaagccttgtttcactgagttggagagggtgaagattctctacaaaaagattgaagatctgatcaagtacctggatcctgagtacatcgaccgcattgccatacctgatgcctctaagctgcaattcatcctagcagaggagcagtttatcctttcccaggttgcactcctggagcaggtgaatgccttggtgcccatgctggacagtgctcacatcaaagccgttcctgagcatgctgcccgcctgcagcgcttggcccagatccacattcagcagcaggaccagtgtgtggaaatcactgaggagtccaaggctctcctggaggaatacaacaagactacaatgcttctctccaagcaattcgtgcagtgggatgagctactttgccagctagaggccgccacgcaagtgaagccagcagaggagtgatagctgctccccatcccaaagtgggcctgggcagtcaggctccagggccctatgccaacctgcctttgttacaaggcagaggaagctttgtatttattggcttcaaggcccacctctctgtactctgggctctaaagttggaggtcaggttacctgaggtttgcaatttgcaacacccaccctccccccaatcagtgttcttatttcagtgacaataaaccatagagatgac

SEQ ID NO: 74929 - DNA, 926 bp, Homo sapiens
  misc_feature (871)..(871): n is a, c, g, or t
  misc_feature (879)..(879): n is a, c, g, or t
  misc_feature (887)..(887): n is a, c, g, or t
aaacataggctaggtacgaggccggtggtgaatcggccgaggtgggtcggtagtagcgatggcgggtctgactgacttgcagcggctacaggcccgagtggaagagctggagcgctgggtgtacgggccgggcggggcgcgcggctcacggaaggtggctgacggcctggtcaaggtgcaggtggctttggggaacatttccagcaagagggagagggtgaagattctctacaaaaagattgaagatctgatcaagtacctggatcctgagtacatcgaccgcattgccatacctgatgcctctaagctgcaattcatcctagcagaggagcagtttatcctttcccaggttgcactcctggagcaggtgaatgccttggtgcccatgctggacagtgctcacatcaaagccgttcctgagcatgctgcccgcctgcagcgcttggcccagatccacattcagcagcaggaccagtgtgtggaaatcactgaggagtccaaggctctcctggaggaatacaacaagactacaatgcttctctccaagcaattcgtgcagtgggatgagctactttgccagctagaggccgccacgcaagtgaagccagcagaggagtgatagctgctccccatcccaaagtgggcctgggcagtcaggctccagggccctatgccaacctgcctttgttacaaggcagaggaagctttgtatttattggcttcaaggcccacctctctgtactctgggctctaaagttggaggtcaggttacctgaggtttgcaatttgcaacacccaccctccccccaatcagtgttcttatttcagtgacaataaaccatagagatgacaacaaaaaaaaacaaaaccncggggatntatggggnggcgaaaaagggaaccaaatgcagctgcaagacggcaca

SEQ ID NO: 74930 - DNA, 920 bp, Homo sapiens
aaacataggctaggtacgaggccggtggtgaatcggccgaggtgggtcggtagtagcgatggcgggtctgactgacttgcagcggctacaggcccgagtggaagagctggagcgctgggtgtacgggccgggcggggcgcgcggctcacggaaggtggctgacggcctggtcaaggtgcaggtggctttggggaacatttccagcaagagggagagggtgaagattctctacaaaaagattgaagatctgatcaagtacctggatcctgagtacatcgaccgcattgccatacctgatgcctctaagctgcaattcatcctagcagaggagcagtttatcctttcccaggttgcactcctggagcaggtgaatgccttggtgcccatgctggacagtgctcacatcaaagccgttcctgagcatgctgcccgcctgcagcgcttggcccagatccacattcagcagcaggaccagtgtgtggaaatcactgaggagtccaaggctctcctggaggaatacaacaagactacaatgcttctctccaagcaattcgtgcagtgggatgagctactttgccagctagaggccgccacgcaagtgaagccagcagaggagtgatagctgctccccatcccaaagtgggcctgggcagtcaggctccagggccctatgccaacctgcctttgttacaaggcagaggaagctttgtatttattggcttcaaggcccacctctctgtactctgggctctaaagttggaggtcaggttacctgaggtttgcaatttgcaacacccaccctccccccaatcagtgttcttatttcagtgacaataaaccatagagatgacaaaaaaaaaaaaggggggcggtaaaaaatcccgcggggcccatttactacccttttgtaaaagggccaa

SEQ ID NO: 74931 - DNA, 767 bp, Homo sapiens
aaacataggctaggtacgaggccggtggtgaatcggccgaggtgggtcggtagtagcgatggcgggtctgactgacttgcagcggctacaggcccgagtggaagagctggagcgctgggtgtacgggccgggcggggcgcgcggctcacggaaggtggctgacggcctggtcaaggtgcaggtggctttggggaacatttccagcaagagggagagggtgaagattctctacaaaaagattgaagatctgatcaagtacctggatcctgagtacatcgaccgcattgccatacctgatgcctctaagctgcaattcatcctagcagccgttcctgagcatgctgcccgcctgcagcgcttggcccagatccacattcagcagcaggaccagtgtgtggaaatcactgaggagtccaaggctctcctggaggaatacaacaagactacaatgcttctctccaagcaattcgtgcagtgggatgagctactttgccagctagaggccgccacgcaagtgaagccagcagaggagtgatagctgctccccatcccaaagtgggcctgggcagtcaggctccagggccctatgccaacctgcctttgttacaaggcagaggaagctttgtatttattggcttcaaggcccacctctctgtactctgggctctaaagttggaggtcaggttacctgaggtttgcaatttgcaacacccaccctccccccaatcagtgttcttatttcagtgacaataaaccatagagatgac

SEQ ID NO: 74932 - DNA, 882 bp, Homo sapiens
aaacataggctaggtacgaggccggtggtgaatcggccgaggtgggtcggtagtagcgatggcgggtctgactgacttgcagcggctacaggcccgagtggaagagctggagcgctgggtgtacgggccgggcggggcgcgcggctcacggaaggtggctgacggcctggtcaaggtgcaggtggctttggggaacatttccagcaagagggagagggtgaagattctctacaaaaagattgaagatctgatcaagtacctggatcctgagtacatcgaccgcattgccatacctgatgcctctaagctgcaattcatcctagcagaggagcagtttatcctttcccaggttgcactcctggagcaggtgaatgccttggtgcccatgctggacagtgctcacatcaaagccgttcctgagcatgctgcccgcctgcagcgcttggcccagatccacattcagcagcagttcctttctgtgctacactttggccctacaggaccagtgtgtggaaatcactgaggagtccaaggctctcctggaggaatacaacaagactacaatgcttctctccaagcaattcgtgcagtgggatgagctactttgccagctagaggccgccacgcaagtgaagccagcagaggagtgatagctgctccccatcccaaagtgggcctgggcagtcaggctccagggccctatgccaacctgcctttgttacaaggcagaggaagctttgtatttattggcttcaaggcccacctctctgtactctgggctctaaagttggaggtcaggttacctgaggtttgcaatttgcaacacccaccctccccccaatcagtgttcttatttcagtgacaataaaccatagagatgac

SEQ ID NO: 74933 - DNA, 640 bp, Homo sapiens
agaagaagagacatacactagggggaatgtttacttaatgtatggccactcccttttccatccgtctttggactgctgttagggcacccatcctggagcctgaaagtgctcccatagccatttgctcctttggctttggggttaagcgtcatcttttttaggctccatggggagtgggagtccgtgatgaggcaggaagtttagtggaagatgtgggctttgcccagttcctttctgtgctacactttggccctacaggaccagtgtgtggaaatcactgaggagtccaaggctctcctggaggaatacaacaagactacaatgcttctctccaagcaattcgtgcagtgggatgagctactttgccagctagaggccgccacgcaagtgaagccagcagaggagtgatagctgctccccatcccaaagtgggcctgggcagtcaggctccagggccctatgccaacctgcctttgttacaaggcagaggaagctttgtatttattggcttcaaggcccacctctctgtactctgggctctaaagttggaggtcaggttacctgaggtttgcaatttgcaacacccaccctccccccaatcagtgttcttatttcagtgacaataaaccatagagatgac

SEQ ID NO: 74934 - DNA, 821 bp, Homo sapiens
aaacataggctaggtacgaggccggtggtgaatcggccgaggtgggtcggtagtagcgatggcgggtctgactgacttgcagcggctacaggcccgagtggaagagctggagcgctgggtgtacgggccgggcggggcgcgcggctcacggaaggtggctgacggcctggtcaaggtgcaggtggctttggggaacatttccagcaagagggagagggtgaagattctctacaaaaagattgaagatctgatcaagtacctggatcctgagtacatcgaccgcattgccatacctgatgcctctaagctgcaattcatcctagcagaggagcagtttatcctttcccaggttgcactcctggagcaggtgaatgccttggtgcccatgctggacagtgctcacatcaaagccgttcctgagcatgctgcccgcctgcagcgcttggcccagatccacattcagcagcagattcctattctcaccttgacctacaaccagacaatgcttctctccaagcaattcgtgcagtgggatgagctactttgccagctagaggccgccacgcaagtgaagccagcagaggagtgatagctgctccccatcccaaagtgggcctgggcagtcaggctccagggccctatgccaacctgcctttgttacaaggcagaggaagctttgtatttattggcttcaaggcccacctctctgtactctgggctctaaagttggaggtcaggttacctgaggtttgcaatttgcaacacccaccctccccccaatcagtgttcttatttcagtgacaataaaccatagagatgac

SEQ ID NO: 74935 - DNA, 810 bp, Homo sapiens
agaagaagagacatacactagggggaatgtttacttaatgtatggccactcccttttccatccgtctttggactgctgttagggcacccatcctggagcctgaaagtgctcccatagccatttgctcctttggctttggggttaagcgtcatcttttttaggctccatggggagtgggagtccgtgatgaggcaggaagtttagtggaagatgtgggctttgcccagttcctttctgtgctacactttggccctacaggaccagtgtgtggaaatcactgaggagtccaaggctctcctggaggaatacaacaagactgtatcctttctgctcaactaggaccctaatgggtgctgtccctaagccctgtccttttgttccacctctagctctctctcatcctatcctacccacctatgtttgcctgttccccactttccatgaacttcctcactcagattcctattctcaccttgacctacaaccagacaatgcttctctccaagcaattcgtgcagtgggatgagctactttgccagctagaggccgccacgcaagtgaagccagcagaggagtgatagctgctccccatcccaaagtgggcctgggcagtcaggctccagggccctatgccaacctgcctttgttacaaggcagaggaagctttgtatttattggcttcaaggcccacctctctgtactctgggctctaaagttggaggtcaggttacctgaggtttgcaatttgcaacacccaccctccccccaatcagtgttcttatttcagtgacaataaaccatagagatgac

SEQ ID NO: 74936 - DNA, 851 bp, Homo sapiens
ttctcagggtttgttataattttttatttttatgggccgaggtgggtcggtagtagcgatggcgggtctgactgacttgcagcggctacaggcccgagtggaagagctggagcgctgggtgtacgggccgggcggggcgcgcggctcacggaaggtggctgacggcctggtcaaggtgcaggtggctttggggaacatttccagcaagagggagagggtgaagattctctacaaaaagattgaagatctgatcaagtacctggatcctgagtacatcgaccgcattgccatacctgatgcctctaagctgcaattcatcctagcagaggagcagtttatcctttcccaggttgcactcctggagcaggtgaatgccttggtgcccatgctggacagtgctcacatcaaagccgttcctgagcatgctgcccgcctgcagcgcttggcccagatccacattcagcagcaggaccagtgtgtggaaatcactgaggagtccaaggctctcctggaggaatacaacaagactacaatgcttctctccaagcaattcgtgcagtgggatgagctactttgccagctagaggccgccacgcaagtgaagccagcagaggagtgatagctgctccccatcccaaagtgggcctgggcagtcaggctccagggccctatgccaacctgcctttgttacaaggcagaggaagctttgtatttattggcttcaaggcccacctctctgtactctgggctctaaagttggaggtcaggttacctgaggtttgcaatttgcaacacccaccctccccccaatcagtgttcttatttcagtgacaataaaccatagagatgac

SEQ ID NO: 74937 - DNA, 948 bp, Homo sapiens
aaacataggctaggtacgaggccggtggtgaatcggccgaggtgggtcggtagtagcgatggcgggtctgactgacttgcagcggctacaggcccgagtggaagagctggagcgctgggtgtacgggccgggcggggcgcgcggctcacggaaggtggctgacggcctggtcaaggtgcaggtggctttggggaacatttccagcaagagggagagggtgaagattctctacaaaaagattgaagatctgatcaagtacctggatcctgagtacatcgaccgcattgccatacctgatgcctctaagctgcaattcatcctagcagaggagcagtttatcctttcccaggttgcactcctggagcaggtgaatgccttggtgcccatgctggacagtgctcacatcaaagccgttcctgagcatgctgcccgcctgcagcgcttggcccagatccacattcagcagcaggctccatggggagtgggagtccgtgatgaggcaggaagtttagtggaagatgtgggctttgcccagttcctttctgtgctacactttggccctacaggaccagtgtgtggaaatcactgaggagtccaaggctctcctggaggaatacaacaagactacaatgcttctctccaagcaattcgtgcagtgggatgagctactttgccagctagaggccgccacgcaagtgaagccagcagaggagtgatagctgctccccatcccaaagtgggcctgggcagtcaggctccagggccctatgccaacctgcctttgttacaaggcagaggaagctttgtatttattggcttcaaggcccacctctctgtactctgggctctaaagttggaggtcaggttacctgaggtttgcaatttgcaacacccaccctccccccaatcagtgttcttatttcagtgacaataaaccatagagatgac

SEQ ID NO: 74938 - DNA, 940 bp, Homo sapiens
  misc_feature (938)..(938): n is a, c, g, or t
aaacataggctaggtacgaggccggtggtgaatcggccgaggtgggtcggtagtagcgatggcgggtctgactgacttgcagcggctacaggcccgagtggaagagctggagcgctgggtgtacgggccgggcggggcgcgcggctcacggaaggtggctgacggcctggtcaaggtgcaggtggctttggggaacatttccagcaagagggagagggtgaagattctctacaaaaagattgaagatctgatcaagtacctggatcctgagtacatcgaccgcattgccatacctgatgcctctaagctgcaattcatcctagcagaggagcagtttatcctttcccaggttgcactcctggagcaggtgaatgccttggtgcccatgctggacagtgctcacatcaaagccgttcctgagcatgctgcccgcctgcagcgcttggcccagatccacattcagcagcaggaccagtgtgtggaaatcactgaggagtccaaggctctcctggaggaatacaacaagactacaatgcttctctccaagcaattcgtgcagtgggatgagctactttgccagctagaggccgccacgcaagtgaagccagcagaggagtgatagctgctccccatcccaaagtgggcctgggcagtcaggctccagggccctatgccaacctgcctttgttacaaggcagaggaagctttgtatttattggcttcaaggcccacctctctgtactctgggctctaaagttggaggtcaggttacctgaggtttgcaatttgcaacacccaccctccccccaatcagtgttcttatttcagtgacaataaaccatagagatgactgtgaaaaaaaaaaattccggggatcgcaaaggcgactcgaggggccgaccttgcctaggggagcggggcccgtgtccggatgcccnag

SEQ ID NO: 74939 - DNA, 621 bp, Homo sapiens
ctccaggagtgcaacctgggaaaggataaactgctcctctgctaggatgaattgcagcttagaggcatcaggtatggcaatgcggtcgatgtactcaggatccaggtacttgatcagatcttcaatctttttgtagagaatcttcaccctctccctcttgctggacagtgctcacatcaaccgttcctgagcatgctgcccgcctgcagcgcttggcccagatccacattcagcagcaggaccagtgtgtggaaatcactgaggagtccaaggctctcctggaggaatacaacaagactacaatgcttctctccaagcaattcgtgcagtgggatgagctactttgccagctagaggccgccacgcaagtgaagccagcagaggagtgatagctgctccccatcccaaagtgggcctgggcagtcaggctccagggccctatgccaacctgcctttgttacaaggcagaggaagctttgtatttattggcttcaaggcccacctctctgtactctgggctctaaagttggaggtcaggttacctgaggtttgcaatttgcaacacccaccctccccccaatcagtgttcttatttcagtgacaataaaccatagagatgac

SEQ ID NO: 74940 - DNA, 1021 bp, Homo sapiens
aaacataggctaggtacgaggccggtggtgaatcggccgaggtgggtcggtagtagcgatggcgggtctgactgacttgcagcggctacaggcccgagtggaagagctggagcgctgggtgtacgggccgggcggggcgcgcggctcacggaaggtggctgacggcctggtcaaggtgcaggtggctttggggaacatttccagcaagagggagagggtgaagattctctacaaaaagattgaagatctgatcaagtacctggatcctgagtacatcgaccgcattgccatacctgatgcctctaagctgcaattcatcctagcagaggagcagtttatcctttcccaggttgcactcctggagcaggtgaatgccttggtgcccatgctggacagtgctcacatcaaagccgttcctgagcatgctgcccgcctgcagcgcttggcccagatccacattcagcagcaggaccagtgtgtggaaatcactgaggagtccaaggctctcctggaggaatacaacaagactgtatcctttctgctcaactaggaccctaatgggtgctgtccctaagccctgtccttttgttccacctctagctctctctcatcctatcctacccacctatgtttgcctgttccccactttccatgaacttcctcactcagattcctattctcaccttgacctacaaccagacaatgcttctctccaagcaattcgtgcagtgggatgagctactttgccagctagaggccgccacgcaagtgaagccagcagaggagtgatagctgctccccatcccaaagtgggcctgggcagtcaggctccagggccctatgccaacctgcctttgttacaaggcagaggaagctttgtatttattggcttcaaggcccacctctctgtactctgggctctaaagttggaggtcaggttacctgaggtttgcaatttgcaacacccaccctccccccaatcagtgttcttatttcagtgacaataaaccatagagatgac

SEQ ID NO: 74941 - DNA, 559 bp, Homo sapiens
aaacataggctaggtacgaggccggtggtgaatcggccgaggtgggtcggtagtagcgatggcgggtctgactgacttgcagcggctacaggcccgagtggaagagctggagcgctgggtgtacgggccgggcggggcgcgcggctcacggaaggtggctgacggcctggtcaaggtgcaggtggctttggggaacatttccagcaagagggagagggtgaagattctctacaaaaagattgaagatctgatcaagtacctggatcctgagtacatcgaccgcattgccatacctgatgcctctaagctgcaattcatcctagcaggtaatgctggactacatgtgtacatgcatctgaggatgtgggtcgtcggggaggttaagcacagagatggcctctccatccagtcttctggtggatacaagccctggatgctgctctctggaattgtggcctggttctgggttgaggatcctatggatcctctagtagacattgagtacagtatacctctgcaccagctgcaggccatggtgccagccacagtgggagctagt

SEQ ID NO: 74942 - DNA, 658 bp, Homo sapiens
tgtttatgttggtattcattataataactgggatcagcccttataatactcttttccttttcctcacccagtataagttattgtattggtgagcatttattatactttattttcttttgtggaagtaatttgatatcttgtactggtgacctgtctttttccctaccttgactgtaaagaatttagtaacatttattaggaaaatgagttataatttattaggtgtatataaatgggctagcaagaaaaagatattctttatctgaaatctgttttaaaaagtactaagaattattccaatttgcttttagtagaagcagtatatttcttttaaggaaattgtcttatataatttacttgaatttttatttattaaagttatgtttggaaacttatgttgtaaccttcagtctactggggtagaattctgattgaggtagttcccttagagcttatccaagatactgttaggtataccctctgtttcctgtggttctgaactcttactttatcctaaaatattctcaagtttctcctgttttaaaagtacaaaacttttttttttggcaaatctgtagaggttctctagctaccactttgttttccttttccatttgccaaaatgcttcttgaaaaactagtataacttcttgtctcc

SEQ ID NO: 74943 - DNA, 1023 bp, Homo sapiens
  misc_feature (384)..(384): n is a, c, g, or t
  misc_feature (432)..(432): n is a, c, g, or t
  misc_feature (487)..(487): n is a, c, g, or t
  misc_feature (489)..(489): n is a, c, g, or t
  misc_feature (623)..(624): n is a, c, g, or t
  misc_feature (992)..(992): n is a, c, g, or t
taattatactttaagttttagggtacacgtgcacactgtgcaggtagttacatatgtatacatgtgccatgctggtgcactgcaccactaactcgtcatctagcattaggtatatctccctcttctatctgttacctttgccattagttctgacagtgcagccagatctgtgggtatatgctagatcaaaaagaaacacttttaaactgtctcttgagggaacacttattttagggatcagtgaaagacagtgagctgagcactaacatctacagttaccattacaggcttcagaattttgaggcagcagtcaacatcaagaaggtatccagaggtagagcagagaaaaatattggatggtcatgacagtcaagtgtttttttnctgggaatatttgagatctccccggggtactttctgaaatatgtgaanaattttgaaagggaggctagagtgtcagcaatttctatggcggataataaaaatnancaaataacacaactgaaattattgccaccccacctcttgattagtatggcctgaaacataatgatatatctcttatttaagttcttcatcacttgttatacttgcttgaatctctgacataaagcacagttctnntcaatttgctttgagattgcaacatattcaacagctaatattagattttataaatctaattctattattctccttaactaaaagagctctaaatatctatcacatccttaacaataataaatattttggtaacaaatatgggcttgaaatagttgttggtattattagaaacaacaccaagaatttaaaagcaaacaataaaaagtttctattttagtaagttttatttacaaattataaaacaaagcctaacaaatcataccactgaagtttttagtgtataggaagttcaattaccaaagatccttgactttttagatcaaggtttaaaaggatacttggtgtattagtccatttttatgttgctnataaagacgtactcaagactgggcaatttac

SEQ ID NO: 74944 - DNA, 301 bp, Homo sapiens
atatgatgctttcttttgtaatttgaaaaatagctttatctataagtgagctgaactgtttgtgtgtgtgtgtgtgtgtgtgtgtatacatagtcatgcattgctttacaataggaatacattctgaaaaatgtgtttttaggcaatttcgtcattgtgtcaacaccatagcacgtacttacaaaaacctaggtggtataacctattacacccctaggctacaaacctgtatagcatgttacagcactgaatactgtaggcagttttaacacagtggtaagtatctctgtatctaaacaga

SEQ ID NO: 74945 - DNA, 391 bp, Homo sapiens
attttgttgaggtccagtttgggtggcagaaactaagacactgagctgatgagagaacttgttgcttttcgccctgcgcatttatttatttatttatttatttatttttgtatttttagtagagacagagtttcaccatgttggccaggctggtctcaaactcctgacctcaaatgatccacccacctcggcctcccaaagtgctgggattacaagtgtgagccaccatgcccggccacctgttgcatctttaacagctgtgtttggaaaagggtgaggaattgattcatcaatattcaatactaagctgcaaaatcaggaatgcagccaattggtttaattgatcaagacttataaactcttaaggactctagtgaactgatacaaacta

SEQ ID NO: 74946 - DNA, 618 bp, Homo sapiens
aagggactgtatatagagatgctttaatcccatctcagtggttctcaaagagcagttccctggcatcacttgaaagcttgtaaaaaatgcaaatccttgggctccatcacaagcctttcaggggattctgaaaccatcactctaatgcttacaacaattctgcaaggtctacattattacccagaatcctcaaatagaagcagagggcagctcagagaggttaagtgaacttttcaaggtcacacagccaacaaagggtaaggacagaaatcaaattcaactccggttctggttaaaaagctaatgccttttatagttagcttcaaagaaacttaataaatatctactttaccttaccttatcttacctaaacacatacacacacacagtcttgaaagacatgaggtgctctcttcaaaaaacatactagatgctacacgctagactagaagtttgggtattacaaacacaacttaactgggggaaaccttatgaaaggaagctgggaaaaacaaaaaagggaaactttctgcaactctacaccatgtggtggaggtttctgttgtctggcacctacgccccattctgggggtaatctcgtgccgaattcggcacgag

SEQ ID NO: 74947 - DNA, 618 bp, Homo sapiens
aagggactgtatatagagatgctttaatcccatctcagtggttctcaaagagcagttccctggcatcacttgaaagcttgtaaaaaatgcaaatccttgggctccactccagacctactgatttggaaactcagggggtgggttctggcaatctgtgttttcacaagcctttcaggggattctgaaaccatcactctaatgcttacaacaattctgcaaggtctacattattacccaaggtcacacagccaacaaagggtaaggacagaaatcaaattcaactccggttctggttaaaaagctaatgccttttatagttagcttcaaagaaacttaataaatatctactttaccttaccttatcttacctaaacacatacacacacacagtcttgaaagacatgaggtgctctcttcaaaaaacatactagatgctacacgctagactagaagtttgggtattacaaacacaacttaactgggggaaaccttatgaaaggaagctgggaaaaacaaaaaagggaaactttctgcaactctacaccatgtggtggaggtttctgttgtctggcacctacgccccattctgggggtaatagctctctattttcatttgag

SEQ ID NO: 74948 - DNA, 459 bp, Homo sapiens
ctaagcactccacagccacatcctagatctgcagccactttattttctacctcatcacatgtgttatggattgtatagagcatacgtgcttcactgtgtagttcttttctttccgtgtggatatccagtaccatttgttgaaaagacttccctttctttattgaattgctttggaatcttcaatgaaagaccatttaacccagcactttgggaggccgaggtgggcaggtcacaaggtcaggagatcgagaccatcctggctaacacggtgaaaccccgtctctactgaaaatacaaaaaaattagccggtcatggtggcgggcgcctgtagttccagctactcaggaggctgaggcaggagaatggcgtgaacccgggaggcagagcttgcagtgagccgagatcacgccactgcactccagcctgggtgccagagcaagactccatctcaaaaaaaa

SEQ ID NO: 74949 - DNA, 2379 bp, Homo sapiens
cagaattgaagtattcctctaattcctgctgattccctaaactacaggtatttttccccttttcattaccaaagattggaacacacaggaaattgaaagaataaaacgaacacccctttctcgatttagattaacaatcagaataaagaggccaggtatggtggctcacacccgtagtcccggcactttgggaggccgaggtgggcagatcacttgaggttaggggttcaagaccagcctgaccaacatgaagaaaccccatctctactaaaaaaataccaaattagctgagcgtagtggcacacacctgtagtcctagctactcaggaggctgaggcagtagggtcaggaggcagaggccggagttgaaggctgcagtgagctatgcgggtaccactgcactccagtcgggtgacagagcgagaccctgactaaacaaaaaataacaacaaaaaaggaggcaggggtttagaaaataccatgattgttaacaggaccatcagatttcattttttctaaaatattagatattgtcagtgtggtttttatataggtgctgattctgttctgttcgtcttcaagtaacaaatgcctgcagtggagatatcttattttgatgattaacaggaagcttttaagctttgaagaaagcaaacaacattttccatggacctttaagagctgggctaatatttttgcccacacagaactctaattcatttcagagtcaagggcaacaatagaatactttttcaaggaccttgcatttgttaatacaggttttcataatagaaagcaatttaaatattcagaactaacgtaacatggaagaaacaactttttcctgaaatatttgagagacaaatataacaaacaattcatctttactatgacaatctcaacggaaagacttcagtgtggtcatattaatgcattttctgttcccagcaggcaagtaaggcaagggaagcatcagctcccaggctattgtagtcatccagatggagatgaggtaggctcagatggcagtggtgggagcagggagaagtagttagaattcagatgtagttttaagattgagccaacagggtttgctcatgaattgggcagaggatatgagggaaagagaaaactccatcttggaggatggagttactgtttcctgagatgagcaagcctgtaggagcttcaggcgtggagcactaggggaacatcaggagtttggcatggcatgatgttaaaaggggaatgtctattagacatccaagcggagatgtcaaggaggtggctgaaaatatgagccttgagttcagggaagaggttcaggctcttatttaaggtgctgagacccattgagatgaccaggaggagagcgtatagacaggaaagtttgagaattgagagtcctgggtcgctctggcattaaaaggtggataatgagaagaagtttaaggaatggcagtgaaggaggaggagagtcagtaggttgtgggtgtcctggcaacccagcaaagaaagtgcttaaagaggagagtgatcagctctgtctgtgccgctggcaggtccagtaagaggaagactgaacagtgaacattagattgagtgaaaatggtttctgctgcttttttgcccaagtagtcttgaatgaattcagttaacctgtctctggggataacaatggtacttacctcatcaggtggtggtgatgaactgtttatttatttaaaaaaaattttttttgagacagggtgtagctctgtcacccaagctggagggcattggcatgatcacagctcactgcaaccttgacctcttggactcaagcaatccttccgtctcagcctcctaagtagctaggaccataggcatgcaccaccacacccagctaattttttattctttgtagagaaggagtcttgctatgttacccaggttagtatcaaactcttggactcaagcaatcctcctgccttgacctctcaaagtgttggcattacaggtgtgagccaccatggccagcctatgaactgtttaagtggatgaccagcctaggcaagaaagatgccatctcttaaaaaaaaaaaaaaaaaaaaaagcaaagaaaaaaaaaaaaagctggatgttgtgccatgtgcttgtggtctcagcctcctgagtagctaggaccataggcatgcaccaccacacccagctaattttttattctttgtagagaaggagtcttgctatgttacccaggttagtatcaaactcttggactcaagcaatcctcctgccttgacctctcaaagtgctggcattacaggtgtgagccaccatggccagcctatgaactgtttaagtggatgaccagcctaggcaagaaagatgccatctcta

SEQ ID NO: 74950 - DNA, 367 bp, Homo sapiens
tgaggccagtactactctgataccaaaaccagacagagacaattcaagaagtaaaaactactgaccaatatccctaataaatataaatgcaaattcctcaagaaaataataggaaatagaatccagcagtatataaaaagcatatattatgaccaacaggaatatttcccaagagtgcaaggcttatttaatatctaaaattcaatcaatgtcatacaccatattaaaagaataagaaaccaaaaccacatgaccatctcaaaagatgaaaaaaaaaatctgaaaaaattccaggccgggcacggtggctcacgcctgtaatcccaacactttgggaggccgaggtgggaggatcatgaggtcagga

SEQ ID NO: 74951 - DNA, 330 bp, Homo sapiens
tacctaggcacgggttgaaaagaaaaacctctcccttgcttcctactgctctaattacctggtgtttcttcctttttacctttccttgggggctttagggtagttttggataggaggaaatgaagttcagcaatcggttttgcaaaagatgccagtgcattgacattctgatgtagggagatgtatgaattctataaaaataatttaaacagtcaaagtcaacagagtatgaaggagtatgagtgggacaaggaattgctatattttagtcataagccttagtaccatttgactttttaaaatatatgcatgcatcatataatttttaat

SEQ ID NO: 74952 - DNA, 248 bp, Homo sapiens
tgcaggctgtacagaaagcttggttggggaggcctcaggaaacttattcatagcagaaggcaaaggggaagcaagcatgtcttacatggtgggagcaggaggaaaaaagagaaggggcaggtactatacagttttctttataaattacccagtctcaggtagttctttatagcaatgtgagaacagactaacacagaaagcatggcagcatttggtcattggtaaattctcgtaacacagataaatat

SEQ ID NO: 74953 - DNA, 291 bp, Homo sapiens
taaggacgctcagtgcccgcttcctagtgagcttgtgaggagtagttgagataatgcttgagaagctcaagcagaacccctgctttgtactatgcaggctgcacacctgtgcttggattaatccacagttgtttgcatcgagatgagcaagcaggaaaaagatgttttggcatcagctggtggtggcattgggtcagagttacagtcacaacagtgtcaatctaggtcaggaaggtttaaatgacacaggcttggcacttatatgccactcaggatagatgagtcccaggg

SEQ ID NO: 74954 - DNA, 357 bp, Homo sapiens
agaccccttaataaacagggaaaaacgtcgaagtaccgttatttctctaagtaggttaagaaggttttgagcatctattttgtgctgatttgaacagtggggctataaaaatgacaaaaatacagagattgtcaccatgccacaaaatagaacaagagtgtgagcagatagataaccaattataacataatatggtaagtcctgttacataaatatgcccatagagagaggcttgggaacatgaaatggtcaggcattgggaaaggcattttgtaagtgaattttgagtcatatttaaagggtggatatgtttaaagggagacaggtaaaggcgtttaaagcaatgtaggcaatatg

SEQ ID NO: 74955 - DNA, 411 bp, Homo sapiens
agtaccccaatcaccccaaaaaaggagccaatgtttttcaacaatgaatgtcaagctggcaggaaagggctgtggccaagtatctgccatatcatactgcaattgtttgctgtctcctgatcatgctggaaagaatcttgtgtttcccagtgtctgatttatggtcctgctaaatgtctgtgcattgtcctagaatgaagaggctacactacctaccactcctactgcctctgtctctaggagtttttgccaatttcagggtgcaattacttgtagggtctggttggtcgtgtgcccttgtttttatgatacctcttcttaaggaaggcaattccaagccccgtacaattattgcaaccagaactggttgcctagttaagcccactcagtattgatagggcttttctttgg

SEQ ID NO: 74956 - DNA, 488 bp, Homo sapiens
aatattttcaaatgaactccaaagtgatatgtattgaagtcttgctcttggtctaatctgcctcagtcctgagaagcctagctctaagataaacaaagggcatcttccactgggagtgcaatgttggaactgctcactgccttaagtaaccatatgcatagcctctttcctgatagttggctcctgtctccctttgtaatcctttccttcttccatgcctgctgcttaagttgcagactattccagcctcacttctcttggacacttctatctgttgcaggcataggcctgtctcatcccagactcacctcttctacaagatcctccctgtaaatatctcctttgtgtttgctggatcatcttatttggttatctttggcgatggaggtggtagtgcttattactgagagttttctatgtaccaactatagtgtcagcagtatgctttatctgatttaattctaacaaccacctcatgagttagatgc

SEQ ID NO: 74957 - DNA, 337 bp, Homo sapiens
ccaaagctcaacatcatgtaatattcccatgtaacaaacctgccacatgtaccccctgtatctaatgtaaacattgaaagtaatctctctatatataaatataaactgatacatatatatatgaaaaagaatgtatcacgcaaattcttagaaacttggtaatagattgtagctcataagtagatttgtcacaggatttggggaaaattgaattatacaaagataatttcagataaatgtttatgagataaaaattataaatatgcttaaataggaatgggcaggtaggaagggagaattgatactgtatatatttaacttagttaagatagaagat

SEQ ID NO: 74958 - DNA, 409 bp, Homo sapiens
ttaaacccgtcgggctaccccttcaagtattcagaacagttttcccagctgttagttttcaagtgtcttttagaacgacagtcattttccattcatcttccatcttcctttggattgcgggagggcagccacacgcatgcctttggtttgcttatgagactggaaacagcacgagctgagctggatgatcccagccacagcccctcattcacggcactgtttgtctaatgatgataaaacatcctcatctgcccaacatcaggactctgccccagttctgcacacagcatgttgtgttaccaaatgtggtgtctgcacctctgggtatcgaatttcccaaacagctttcataaattttaattcatgaggaaggggtgtacacaagctaccttttgaaactgtaccagtc

SEQ ID NO: 74959 - DNA, 493 bp, Homo sapiens
aaattattcacacggtgtaaaaaagcccggtgggaaagtacactgtggtttccgtctctggccctgccacagggaaggaaactggaacacaccggtctggtaggaagaagagggattcccagacctacagggtgcgtcggcgataacccgacccaccaaagcccgaggtgctgccagtgcttccggccctgcgctgggtcagcctgccttaggggcaggaaggaccttctgtgacacaggctgcgggcagtacaggaaggtagcctctcagcaagaaccccaccaacaacagcaatagtagcaactgtagcaatcagtgagcacgttctcggtgccagacagggcaggtgtgaacttatatcattctcacaaagccctataaggggccaggcacagtggctcacacctgtaatcccagcactttaggaggccgaggccaaagggccgtttgagcccaggagttcaagaccaccctgggcaagaccccatctct

SEQ ID NO: 74960 - DNA, 568 bp, Homo sapiens
gttaacccaattagcccattgatttttttcagaaaaatatgtataaataacaagtacacaggtatttggtattgtagtaagcaaggaacaaatgtagatttgctatttttatggcaaaattatattggctgaacatccattttggtaagaaattacatattgttgtttctgtataattttaatgttgcagttcataagccagaaaaatttaatttgtggacttaatgtggagtttctttataacatagatttatatgttgattttttaatttaaaaagttcgatttatatgatatgaaattatttgattttttttgagaaataatttttaaagtcattttttggagagggtgtggatcccgttgacaatctgaattctatagcttctctcaaaaatgtagatattcaaaactttgtataccagttcaggggttctcatgttaaacagttgtccatggcttctattaagagctctaggtacatatgctctgttgtaaaatattattactctttagtaagtggcctaaggcaagtcatttgagattttaaaacccatttcctcatctcca

SEQ ID NO: 74961 - DNA, 457 bp, Homo sapiens
  misc_feature (2)..(2): n is a, c, g, or t
  misc_feature (7)..(7): n is a, c, g, or t
  misc_feature (54)..(54): n is a, c, g, or t
cnaaganaactctttgctgggggagggagagccctgtgaaatggtggaatactngcagcaatccctgtctggtacctactacaatacccagtagctcccctcccaattgtgacaataaaaaattcctcatgctgggattacaggtgtgagccatcacatctggccaacaccatttttaaaatactgtgctttaatccttgctgatccccactagatgccttttcttcttagagataacctggagtcagaatattataattgaaaggaagcttagggattattacttcactccagcgtgagagagaggtgaaatgacttgctcaagccgagtcacacagtgacttagaatatgtgtgatatgtcccctgtaggaatccccagacttcctttcctgacatacgtgagctgtctgacgcatagtaagtacgactgctcaggcacccatgcacatcacagg

SEQ ID NO: 74962 - DNA, 120 bp, Homo sapiens
ttcagtacaggagcagcccagtaatagtcccgatcgctaataagagcacaaacacccgtaagcaggtgaattggaaatattgtcattttgactacatcaacaacttataacttaccaaag

SEQ ID NO: 74963 - DNA, 609 bp, Homo sapiens
gacaagtgagaccacaaacaacaaaacataatgaatggatcagagcctgtgtataattggccctgaattaggcaaataggctttccccactcccttaaaatgaaaacaaaatggtagtttaaagaaagtaccaaagggactatatctaataataacaatgagattgaaaatgagggcacatggtgtgtttagggacggctgaggccagtgaatgtcaaggcagactgcatctttgacagcctcgcctcactggctcctgaaatcctcacacacaaaacagcattcttcttgcgttcttaaagtgaaaggcactgtttccctgtcacactagcaatgttgcgaagtaaatgtcatcctttcctcctccttggccctgccttctacagctagtgcccctgccagttgtttcctcagcacgtctccagcgttcctcttctcttcccccttggcacggccttacttctggtctcatcatcctatgcctgggctgatgcctttgcttcccagctgcagtcggctggggatgaatgtggggttaaggcaggcattccagatatttatagaattgttcatggttcttttcccattagccatgagttacttgagggt

SEQ ID NO: 74964 - DNA, 347 bp, Homo sapiens
atatgggaaaaatatagattcctaccttccaccataaattactatttttaattgttattttaatattttattttatcaccttttaagttattgggtacatgtgcaggatgtgcaggtttgttacatagggaaacatgagccatggtgttttgctgcgcagatcaccaacccatcacctagatataagcccagcaccaatgagctgttcttcctgatgctccccctttccctgcccacacccgataggccccagtgtatgttgtttaccctgccccaaccatgtgtccatgtgttctcatcattcagctcccacttataagtgagaacatgcagtgttgggttttctg

SEQ ID NO: 74965 - DNA, 479 bp, Homo sapiens
gctactttttctgtgtgtgaaaggattaaagcagagggaaactcattatcgtgactcttgaagattaagtgacctgtttgggaatttggctatctctctctcctgctttctcttgagacaggaataatacagggtggttgcaagagaacagaaaattccaggcagcagtttcacatgcctagcaaaatgaaactgttgaaatagctccataaactggggactgataagaccatgaaaaacaggatgtgggccaagctggctaaaaccaactggacccaacagagagcaggatttgacctaggtttctcctaggacctcattattcacccattaataaacaaatcgcacacccacctacactgtgacaagaacactgtatttggtgttaaaatgggcagcatcacagttctgagaaatcttcacctttttccaggaatcttcatgaatagtccaccccttgggtaaagaaacccatataa

SEQ ID NO: 74966 - DNA, 390 bp, Homo sapiens
tgagaagttttggtgaaaatggtgcattaaaaacctgtagtgtttgcattacagaatatacagaaagcaacaaacttcgtaaactaccttgttcccatgagtaccatgtccactgactgcatcgatcgctggttatctgagaattctacctgtcctatttgtcgcagagcagtcttagcttctggtaacagagaaagtgttgtgtaattaagatctgaactcttagctatgtagctgatatagtgatgggcaaacaggaatcacttgcttttatgtccactttttgagtggtacttaaatgtaaagtaacaacctgaattgagtcgttgctttctgaggtaatcattgtcctttctccagtttttgttccagaataaaaggaaatatttt

SEQ ID NO: 74967 - DNA, 378 bp, Homo sapiens
gcatgttactggccctaagttgtttattatcctgtagcacatccatggagcttggcaatagccaccaattccatcatcctcatagctactactccctccatacatctcaagtacctggcacattgtgcccttagagtatccagttctactggtacattctcccaatttgctgccatttgtctgtgctctgcccacctccactaatgggatcctcatcatcagatgggtggtgatccagttccaaaccccatcttaccatctcctttctcatctactttggtagcaactgtggaagaccagattctcaagaaggagatgctgagatagagtttgggaggcaaaatgtttattaaggacccatacctgtgaaaggaagga

SEQ ID NO: 74968 - DNA, 723 bp, Homo sapiens
taatgaatggttaaaaatataacccttatttttaaccattcattacagacaaaccagtaagagggatgaaaataagggttatattttaccctcaaatgcgtttttgtactttcagagcaggtttaaacgttttttttttttttttcctatatccgaactgttggcctcatggaaatccctttcccgatctttgtagcaccatctactggcagaatggcagagtagctgcgaaacaatttgtttaaaaacttgcttaagacaattgcatcagatttggaagttttgccatcaaaattctttgcagaattggaagttaacacatttgcttgtaactgagatgggcttcacaggaatgtagttgccagttcatatcacaatagccctttctatatgaggtttgaaaatgtaaactgctatgcatagcttgggcaatagccctaaattgctatgacaactaatgaaccagctacgtatactggtattttaggtgcaagttgtaaagcaaaatatctgtgtattctgcttggttaacaaatgtatatttgtagccctttcctgcaatagcattcaagttgttgtttataagagaagaacaaaagtgataataggtgaaaattgcctttctggatagaaatagagaatagcaacgtttatggatatcacaaataaagaattcaattctttttaaacagacagatgaccacaaacaacaacaaagagggg

SEQ ID NO: 74969 - DNA, 2785 bp, Homo sapiens
ggcacgaggcccagatagtggagcggaggtggcggcggcggcggtagcggtggccttggttgtcttccagtctcctcggctcgccctttagccggcaccgctccccttccctcccccttcctctcttccttccttccctccccttccctttttcccttccccgtcggtgagcggcgggggtggctccagcaacggctgggcccaagctgtgtagaggccttaaccaacgataacggcggcgacggcgaaacctcggagctcgcagggcgggggcaaggcccgggccttggagatggagaattctcagttgtgtaagctgttcatcggcggcctcaatgtgcagacgagtgagtcgggcctgcgcggccactttgaggcctttgggactctgacggactgcgtggtggtggtgaatccccagaccaagcgctcccgttgctttggcttcgtgacctactccaatgtggaggaggcggacgccgccatggccgcctcgccccatgccgtggacggcaacactgtggagctgaagcgggcggtgtcccgggaggattcggcgcggcccggtgcccacgccaaggttaagaagctctttgtcggaggccttaaaggagacgtggctgagggcgacctgatcgagcacttctcgcagtttggcaccgtggaaaaggccgagattattgccgacaagcagtccggcaagaagcgtggattcggcttcgtgtatttccagaatcacgacgcggcagacaaggccgcggtggtcaagttccatccgattcagggccatcgcgtggaggtgaagaaagcagtccccaaggaggatatctactccggtgggggtggaggcggctcccgatcctcccggggcggccgaggcggccgggggcgcggcggtggtcgagaccagaacggcctttccaagggcggcggcggcggttacaacagctacggtggttacggcggcggcggaggcggcggctacaatgcctacggaggcggcggcggcggttcgtcctacggtgggagcgactacggtaacggcttcggcggcttcggcagctacagccagcatcagtcctcctatgggcccatgaagagcggcggcggcggcggcggtggaggcagtagctggggcggtcgcagtaatagtggaccttacagaggcggctatggcggtgggggtggctatggaggcagctccttctaaaagaaaatttaaaatgcctgggagtggctataggggtagctctttccaacagcccaagtggggtcaactcctaagccccaccccctcacacacaccgccttccctgttttgcccttgggggagccacttctaaggctgcttacccttgggggtgttcctctatttgcctgccacctctcttgtctctccctctgaagatggactcggccccacatacacatttttgtgttacagtcattgatggactctatttttttattattacttggaccttggtcgtttttatactagcaaaatgtcttgttttaatttgtgttttttggggggagggagggagtgaacttgctgattctgtagcaaaacctgggtgggggttggggtggggggtagtttactttgttgtaaggacttgataacctggctacagcgttttctatgaaatctacttggatcccatgcctgaaatttggaagcatatgtacaaaaatcatttttacgttttatttttaataaatcattgtgtttgaccgtacatgtctaacattttttttctaggatccattccgtaccgttttttaagggatatttgtttaagactttacgtgttaattctttattcttgatgtgtacttagagaaacttaagaggtcctgtggtttttttcccctctcctgttgccctgctagttgcgtgttgaattatatcccttacaggcaaaacttttgaagtggtggatgtggctttttaaactcttaagtttctgtgcatccatctcttgtactaagcgaattgtttatcatcttgacatggttggtcatttctatgacaatttacttcaaactgtgtactgtgtagttctatatagtttgtgttaagcatgtcattcatataaactgtttaaaatttttcagatggcctagtttcatccctcttactggtttgtctgtaatgaatggttaaaaataagggttatattttaccctcaaatgcgtttttgtactttcagagcaggtttaaacgttttttttttttttttcctatatccgaactgttggcctcatggaaatccctttcccgatctttgtagcaccatctactggcagaatggcagagtagctgcgaaacaatttgtttaaaaacttgcttaagacaattgcatcagatttggaagttttgccatcaaaattctttgcagaattggaagttaacacatttgcttgtaactgagatgggcttcacaggaatgtagttgccagttcatatcacaatagccctttctatatgaggtttgaaaatgtaaactgctatgcatagcttgggcaatagccctaaattgctatgacaactaatgaaccagctacgtatactggtattttaggtgcaagttgtaaagcaaaatatctgtgtattctgcttggttaacaaatgtatatttgtagccctttcctgcaatagcattcaagttgttgtttataagagaagaacaaaagtgataataggtgaaaattgcctttctggatagaaatagagaatagcaacgtttatggatatcacaaataaagaattcaattcttt

SEQ ID NO: 74970 - DNA, 1831 bp, Homo sapiens
  misc_feature (9)..(9): n is a, c, g, or t
  misc_feature (23)..(23): n is a, c, g, or t
  misc_feature (25)..(27): n is a, c, g, or t
  misc_feature (29)..(29): n is a, c, g, or t
ttatcgtcnggcggggcgcaggngnnngntaaatgcctacggaggcggcggcggcggttcgtcctacggtgggagcgactacggtaacggcttcggcggcttcggcagctacagccagcatcagtcctcctatgggcccatgaagagcggcggcggcggcggcggtggaggcagtagctggggcggtcgcagtaatagtggaccttacagaggcggctatggcggtgggggtggctatggaggcagctccttctaaaagaaaatttaaaatgcctgggagtggctataggggtagctctttccaacagcccaagtggggtcaactcctaagccccaccccctcacacacaccgccttccctgttttgcccttgggggagccacttctaaggctgcttacccttgggggtgttcctctatttgcctgccacctctcttgtctctccctctgaagatggactcggccccacatacacatttttgtgttacagtcattgatggactctatttttttattattacttggaccttggtcgtttttatactagcaaaatgtcttgttttaatttgtgttttttggggggagggagggagtgaacttgctgattctgtagcaaaacctgggtgggggttggggtggggggtagtttactttgttgtaaggacttgataacctggctacagcgttttctatgaaatctacttggatcccatgcctgaaatttggaagcatatgtacaaaaatcatttttacgttttatttttaataaatcattgtgtttgaccgtacatgtctaacattttttttctaggatccattccgtaccgttttttaagggatatttgtttaagactttacgtgttaattctttattcttgatgtgtacttagagaaacttaagaggtcctgtggtttttttcccctctcctgttgccctgctagttgcgtgttgaattatatcccttacaggcaaaacttttgaagtggtggatgtggctttttaaactcttaagtttctgtgcatccatctcttgtactaagcgaattgtttatcatcttgacatggttggtcatttctatgacaatttacttcaaactgtgtactgtgtagttctatatagtttgtgttaagcatgtcattcatataaactgtttaaaatttttcagatggcctagtttcatccctcttactggtttgtctgtaatgaatggttaaaaataagggttatattttaccctcaaatgcgtttttgtactttcagagcaggtttaaacgttttttttttttttttcctatatccgaactgttggcctcatggaaatccctttcccgatctttgtagcaccatctactggcagaatggcagagtagctgcgaaacaatttgtttaaaaacttgcttaagacaattgcatcagatttggaagttttgccatcaaaattctttgcagaattggaagttaacacatttgcttgtaactgagatgggcttcacaggaatgtagttgccagttcatatcacaatagccctttctatatgaggtttgaaaatgtaaactgctatgcatagcttgggcaatagccctaaattgctatgacaactaatgaaccagctacgtatactggtattttaggtgcaagttgtaaagcaaaatatctgtgtattctgcttggttaacaaatgtatatttgtagccctttcctgcaatagcattcaagttgttgtttataagagaagaacaaaagtgataataggtgaaaattgcctttctggatagaaatagagaatagcaacgtttatggatatcacaaataaagaattcaattcttt

SEQ ID NO: 74971 - DNA, 2440 bp, Homo sapiens
ggcacgaggcccagatagtggagcggaggtggcggcggcggcggtagcggtggccttggttgtcttccagtctcctcggctcgccctttagccggcaccgctccccttccctcccccttcctctcttccttccttccctccccttccctttttcccttccccgtcggtgagcggcgggggtggctccagcaacggctgggcccaagctgtgtagaggccttaaccaacgataacggcggcgacggcgaaacctcggagctcgcagggcgggggcaaggcccgggccttggagatggagaattctcagttgtgtaagctgttcatcggcggcctcaatgtgcagacgagtgagtcgggcctgcgcggccactttgaggcctttgggactctgacggactgcgtggtggtggtgaatccccagaccaagcgctcccgttgctttggcttcgtgacctactccaatgtggaggaggcggacgccgccatggccgcctcgccccatgccgtggacggcaacactgtggagctgaagcgggcggtgtcccgggaggattcggcgcggcccggtgcccacgccaaggttaagaagctctttgtcggaggccttaaaggagacgtggctgagggcgacctgatcgagcacttctcgcagtttggcaccgtggaaaaggccgagattattgccgacaagcagtccggcaagaagcgtggattcggcttcgtgtatttccagaatcacgacgcggcagacaaggccgcggtggtcaagttccatccgattcagggccatcgcgtggaggtgaagaaagcagtccccaaggaggatatctactccggtgggggtggaggcggctcccgatcctcccggggcggccgaggcggccgggggcgcggcggtggtcgagaccagaacggcctttccaagggcggcggcggcggttacaacagctacggtggttacggcggcggcggaggcggcggctacaatgcctacggaggcggcggcggcggttcgtcctacggtgggagcgactacggtaacggcttcggcggcttcggcagctacagccagcatcagtcctcctatgggcccatgaagagcggcggcggcggcggcggtggaggcagtagctggggcggtcgcagtaatagtggaccttacagaggcggctatggcggtgggggtggctatggaggcagctccttctaaaagaaaatttaaaatgcctgggagtggctataggggtaggggtagtttactttgttgtaaggacttgataacctggctacagcgttttctatgaaatctacttggatcccatgcctgaaatttggaagcatatgtacaaaaatcatttttacgttttatttttaataaatcattgtgtttgaccgtacatgtctaacattttttttctaggatccattccgtaccgttttttaagggatatttgtttaagactttacgtgttaattctttattcttgatgtgtacttagagaaacttaagaggtcctgtggtttttttcccctctcctgttgccctgctagttgcgtgttgaattatatcccttacaggcaaaacttttgaagtggtggatgtggctttttaaactcttaagtttctgtgcatccatctcttgtactaagcgaattgtttatcatcttgacatggttggtcatttctatgacaatttacttcaaactgtgtactgtgtagttctatatagtttgtgttaagcatgtcattcatataaactgtttaaaatttttcagatggcctagtttcatccctcttactggtttgtctgtaatgaatggttaaaaataagggttatattttaccctcaaatgcgtttttgtactttcagagcaggtttaaacgttttttttttttttttcctatatccgaactgttggcctcatggaaatccctttcccgatctttgtagcaccatctactggcagaatggcagagtagctgcgaaacaatttgtttaaaaacttgcttaagacaattgcatcagatttggaagttttgccatcaaaattctttgcagaattggaagttaacacatttgcttgtaactgagatgggcttcacaggaatgtagttgccagttcatatcacaatagccctttctatatgaggtttgaaaatgtaaactgctatgcatagcttgggcaatagccctaaattgctatgacaactaatgaaccagctacgtatactggtattttaggtgcaagttgtaaagcaaaatatctgtgtattctgcttggttaacaaatgtatatttgtagccctttcctgcaatagcattcaagttgttgtttataagagaagaacaaaagtgataataggtgaaaattgcctttctggatagaaatagagaatagcaacgtttatggatatcacaaataaagaattcaattcttt

SEQ ID NO: 74972 - DNA, 1645 bp, Homo sapiens
ggagggagtgaacttgctgattctgtagcaaaacctgggtgggggtggctatggaggcagctccttctaaaagaaaatttaaaatgcctgggagtggctataggggtagctctttccaacagcccaagtggggtcaactcctaagccccaccccctcacacacaccgccttccctgttttgcccttgggggagccacttctaaggctgcttacccttgggggtgttcctctatttgcctgccacctctcttgtctctccctctgaagatggactcggccccacatacacatttttgtgttacagtcattgatggactctatttttttattattacttggaccttggtcgtttttatactagcaaaatgtcttgttttaatttgtgttttttggggggagggagggagtgaacttgctgattctgtagcaaaacctgggtgggggttggggtggggggtagtttactttgttgtaaggacttgataacctggctacagcgttttctatgaaatctacttggatcccatgcctgaaatttggaagcatatgtacaaaaatcatttttacgttttatttttaataaatcattgtgtttgaccgtacatgtctaacattttttttctaggatccattccgtaccgttttttaagggatatttgtttaagactttacgtgttaattctttattcttgatgtgtacttagagaaacttaagaggtcctgtggtttttttcccctctcctgttgccctgctagttgcgtgttgaattatatcccttacaggcaaaacttttgaagtggtggatgtggctttttaaactcttaagtttctgtgcatccatctcttgtactaagcgaattgtttatcatcttgacatggttggtcatttctatgacaatttacttcaaactgtgtactgtgtagttctatatagtttgtgttaagcatgtcattcatataaactgtttaaaatttttcagatggcctagtttcatccctcttactggtttgtctgtaatgaatggttaaaaataagggttatattttaccctcaaatgcgtttttgtactttcagagcaggtttaaacgttttttttttttttttcctatatccgaactgttggcctcatggaaatccctttcccgatctttgtagcaccatctactggcagaatggcagagtagctgcgaaacaatttgtttaaaaacttgcttaagacaattgcatcagatttggaagttttgccatcaaaattctttgcagaattggaagttaacacatttgcttgtaactgagatgggcttcacaggaatgtagttgccagttcatatcacaatagccctttctatatgaggtttgaaaatgtaaactgctatgcatagcttgggcaatagccctaaattgctatgacaactaatgaaccagctacgtatactggtattttaggtgcaagttgtaaagcaaaatatctgtgtattctgcttggttaacaaatgtatatttgtagccctttcctgcaatagcattcaagttgttgtttataagagaagaacaaaagtgataataggtgaaaattgcctttctggatagaaatagagaatagcaacgtttatggatatcacaaataaagaattcaattcttt

SEQ ID NO: 74973 - DNA, 1620 bp, Homo sapiens
ggcacgaggcccagatagtggagcggaggtggcggcggcggcggtagcggtggccttggttgtcttccagtctcctcggctcgccctttagccggcaccgctccccttccctcccccttcctctcttccttccttccctccgccttccctgttttgcccttgggggagccacttctaaggctgcttacccttgggggtgttcctctatttgcctgccacctctcttgtctctccctctgaagatggactcggccccacatacacatttttgtgttacagtcattgatggactctatttttttattattacttggaccttggtcgtttttatactagcaaaatgtcttgttttaatttgtgttttttggggggagggagggagtgaacttgctgattctgtagcaaaacctgggtgggggttggggtggggggtagtttactttgttgtaaggacttgataacctggctacagcgttttctatgaaatctacttggatcccatgcctgaaatttggaagcatatgtacaaaaatcatttttacgttttatttttaataaatcattgtgtttgaccgtacatgtctaacattttttttctaggatccattccgtaccgttttttaagggatatttgtttaagactttacgtgttaattctttattcttgatgtgtacttagagaaacttaagaggtcctgtggtttttttcccctctcctgttgccctgctagttgcgtgttgaattatatcccttacaggcaaaacttttgaagtggtggatgtggctttttaaactcttaagtttctgtgcatccatctcttgtactaagcgaattgtttatcatcttgacatggttggtcatttctatgacaatttacttcaaactgtgtactgtgtagttctatatagtttgtgttaagcatgtcattcatataaactgtttaaaatttttcagatggcctagtttcatccctcttactggtttgtctgtaatgaatggttaaaaataagggttatattttaccctcaaatgcgtttttgtactttcagagcaggtttaaacgttttttttttttttttcctatatccgaactgttggcctcatggaaatccctttcccgatctttgtagcaccatctactggcagaatggcagagtagctgcgaaacaatttgtttaaaaacttgcttaagacaattgcatcagatttggaagttttgccatcaaaattctttgcagaattggaagttaacacatttgcttgtaactgagatgggcttcacaggaatgtagttgccagttcatatcacaatagccctttctatatgaggtttgaaaatgtaaactgctatgcatagcttgggcaatagccctaaattgctatgacaactaatgaaccagctacgtatactggtattttaggtgcaagttgtaaagcaaaatatctgtgtattctgcttggttaacaaatgtatatttgtagccctttcctgcaatagcattcaagttgttgtttataagagaagaacaaaagtgataataggtgaaaattgcctttctggatagaaatagagaatagcaacgtttatggatatcacaaataaagaattcaattcttt

SEQ ID NO: 74974 - DNA, 3922 bp, Homo sapiens
  misc_feature (3816)..(3816): n is a, c, g, or t
ggcacgaggcccagatagtggagcggaggtggcggcggcggcggtagcggtggccttggttgtcttccagtctcctcggctcgccctttagccggcaccgctccccttccctcccccttcctctcttccttccttccctccccttccctttttcccttccccgtcggtgagcggcgggggtggctccagcaacggctgggcccaagctgtgtagaggccttaaccaacgataacggcggcgacggcgaaacctcggagctcgcagggcgggggcaaggcccgggccttggagatggagaattctcagttgtgtaagctgttcatcggcggcctcaatgtgcagacgagtgagtcgggcctgcgcggccactttgaggcctttgggactctgacggactgcgtggtggtggtgaatccccagaccaagcgctcccgttgctttggcttcgtgacctactccaatgtggaggaggcggacgccgccatggccgcctcgccccatgccgtggacggcaacactgtggagctgaagcgggcggtgtcccgggaggattcggcgcggcccggtgcccacgccaaggttaagaagctctttgtcggaggccttaaaggagacgtggctgagggcgacctgatcgagcacttctcgcagtttggcaccgtggaaaaggccgagattattgccgacaagcagtccggcaagaagcgtggattcggcttcgtgtatttccagaatcacgacgcggcagacaaggccgcggtggtcaagttccatccgattcagggccatcgcgtggaggtgaagaaagcagtccccaaggaggatatctactccggtgggggtggaggcggctcccgatcctcccggggcggccgaggcggccgggggcgcggcggtggtcgagaccagaacggcctttccaagggcggcggcggcggttacaacagctacggtggttacggcggcggcggaggcggcggctacaatgcctacggaggcggcggcggcggttcgtcctacggtgggagcgactacggtaacggcttcggcggcttcggcagctacagccagcatcagtcctcctatgggcccatgaagagcggcggcggcggcggcggtggaggcagtagctggggcggtcgcagtaatagtggaccttacagaggcggctatggcggtgggggtggctatggaggcagctccttctaaaagaaaatttaaaatgcctgggagtggctataggggtagctctttccaacagcccaagtggggtcaactcctaagccccaccccctcacacacaccgccttccctgttttgcccttgggggagccacttctaaggctgcttacccttgggggtgttcctctatttgcctgccacctctcttgtctctccctctgaagatggactcggccccacatacacatttttgtgttacagtcattgatggactctatttttttattattacttggaccttggtcgtttttatactagcaaaatgtcttgttttaatttgtgttttttggggggagggagggagtgaacttgctgattctgtagcaaaacctgggtgggggttggggtggggggtagtttactttgttgtaaggacttgataacctggctacagcgttttctatgaaatctacttggatcccatgcctgaaatttggaagcatatgtacaaaaatcatttttacgttttatttttaataaatcattgtgtttgaccgtacatgtctaacattttttttctaggatccattccgtaccgttttttaagggatatttgtttaagactttacgtgttaattctttattcttgatgtgtacttagagaaacttaagaggtcctgtggtttttttcccctctcctgttgccctgctagttgcgtgttgaattatatcccttacaggcaaaacttttgaagtggtggatgtggctttttaaactcttaagtttctgtgcatccatctcttgtactaagcgaattgtttatcatcttgacatggttggtcatttctatgacaatttacttcaaactgtgtactgtgtagttctatatagtttgtgttaagcatgtcattcatataaactgtttaaaatttttcagatggcctagtttcatccctcttactggtttgtctgtaatgaatggttaaaaataagggttatattttaccctcaaatgcgtttttgtactttcagagcaggtttaaacgttttttttttttttttcctatatccgaactgttggcctcatggaaatccctttcccgatctttgtagcaccatctactggcagaatggcagagtagctgcgaaacaatttgtttaaaaacttgcttaagacaattgcatcagatttggaagttttgccatcaaaattctttgcagaattggaagttaacacatttgcttgtaactgagatgggcttcacaggaatgtagttgccagttcatatcacaatagccctttctatatgaggtttgaaaatgtaaactgctatgcatagcttgggcaatagccctaaattgctatgacaactaatgaaccagctacgtatactggtattttaggtgcaagttgtaaagcaaaatatctgtgtattctgcttggttaacaaatgtatatttgtagccctttcctgcaatagcattcaagttgttgtttataagagaagaacaaaagtgataataggtgaaaattgcctttctggatagaaatagagaatagcaacgtttatggatatcacaaataaagaattcaattctttacatgattgagtgagagtatgtataacctggtgggtgggttcagagtaccttttaatctagtatgcttaacttgatgttaatatttaacttaaatatttgacttacatgttgacgttgaaggctcaaagctatactaagaagctttctgaaagattgggctttaaaataaaataatattttaatattgaaccattttttaacttcttgtcactgttcaattcctaaggtctagttcttgccagttttttttttttttttcctgattggcagggcttttaaagaagtaagaagaaaggttaagattattaggctaggttatagctgctcagtagtcattttgacaaagggtagcggatggttggtacaaatagtgttatatcctctatgacaaacggggtggatgtttttacacattgaggtaatacatagtcaaatcctttgctctcaaatagttgtacactttccatacatttctgtcttattttttaattctagtgatacacaaattacatgtgggctacttcatttggtaatttggtccagctttttggtggctgtagagtggcctctaggatacagaaaatgattctctgaaatttttcgttgtaattgttaaatactactctgcttgacttactcagttttggtgggaagatctgggtcaattggaatagtacacctttctcagggttttcagtttaataaggttgtcatattattcccaacatgggaatatagtggcttctaaagtttgcaaatgaattatgtaaaaggattttctgtgtattaggaaggcaacctgttctgttcatggtatattaacacttcattgtcatgtgtctacccttaaaattgctatttgtagtgaagaaaaaagcatagtggtatttagtcacttctgggttcctcttgtcagtttatatgcaaacattttggcatgtgggacttggggaggaggggctggggtgaggggccaggccatggccaagggccagctgcccctcatttatcactctgaccttcacagggnacagatctgatttatttatttcggttcaaaaaacacaacaaccacggaccagaaacaactttgcattgccattgggtttgacccataaactaagttatttcccgtg

SEQ ID NO: 74975 - DNA, 1048 bp, Homo sapiens
tcctacgagcgcactcctacgagcgcaggatccattccgtaccgttttttaagggatatttgtttaagactttacgtgttaattctttattcttgatgtgtacttagagaaacttaagaggtcctgtggtttttttcccctctcctgttgccctgctagttgcgtgttgaattatatcccttacaggcaaaacttttgaagtggtggatgtggctttttaaactcttaagtttctgtgcatccatctcttgtactaagcgaattgtttatcatcttgacatggttggtcatttctatgacaatttacttcaaactgtgtactgtgtagttctatatagtttgtgttaagcatgtcattcatataaactgtttaaaatttttcagatggcctagtttcatccctcttactggtttgtctgtaatgaatggttaaaaataagggttatattttaccctcaaatgcgtttttgtactttcagagcaggtttaaacgttttttttttttttttcctatatccgaactgttggcctcatggaaatccctttcccgatctttgtagcaccatctactggcagaatggcagagtagctgcgaaacaatttgtttaaaaacttgcttaagacaattgcatcagatttggaagttttgccatcaaaattctttgcagaattggaagttaacacatttgcttgtaactgagatgggcttcacaggaatgtagttgccagttcatatcacaatagccctttctatatgaggtttgaaaatgtaaactgctatgcatagcttgggcaatagccctaaattgctatgacaactaatgaaccagctacgtatactggtattttaggtgcaagttgtaaagcaaaatatctgtgtattctgcttggttaacaaatgtatatttgtagccctttcctgcaatagcattcaagttgttgtttataagagaagaacaaaagtgataataggtgaaaattgcctttctggatagaaatagagaatagcaacgtttatggatatcacaaataaagaattcaattcttt

SEQ ID NO: 74976 - DNA, 1750 bp, Homo sapiens
  misc_feature (1515)..(1515): n is a, c, g, or t
  misc_feature (1650)..(1650): n is a, c, g, or t
ggcacgaggcccagatagtggagcggaggtggcggcggcggcggtagcggtggccttggttgtcttccagtctcctcggctcgccctttagccggcaccgctccccttccctcccccttcctctcttccttccttccctccccttccctttttcccttccccgtcggtgagcggcgggggtggctccagcaacggctgggcccaagctgtgtagaggccttaaccaacgataacggcggcgacggcgaaacctcggagctcgcagggcgggggcaaggcccgggccttggagatggagaattctcagttgtgtaagctgttcatcggcggcctcaatgtgcagacgagtgagtcgggcctgcgcggccactttgaggcctttgggactctgacggactgcgtggtggtggtgaatccccagaccaagcgctcccgttgctttggcttcgtgacctactccaatgtggaggaggcggacgccgccatggccgcctcgccccatgccgtggacggcaacactgtggagctgaagcgggcggtgtcccgggaggattcggcgcggcccggtgcccacgccaaggttaagaagctctttgtcggaggccttaaaggagacgtggctgagggcgacctgatcgagcacttctcgcagtttggcaccgtggaaaaggccgagattattgccgacaagcagtccggcaagaagcgtggattcggcttcgtgtatttccagaatcacgacgcggcagacaaggccgcggtggtcaagttccatccgattcagggccatcgcgtggaggtgaagaaagcagtccccaaggaggatatctactccggtgggggtggaggcggctcccgatcctcccggggcggccgaggcggccgggggcgcggcggtggtcgagaccagaacggcctttccaagggcggcggcggcggttacaacagctacggtggttacggcggcggcggaggcggcggctacaatgcctacggaggcggcggcggcggttcgtcctacggtgggagcgactacggtaacggcttcggcggcttcggcagctacagccagcatcagtcctcctatgggcccatgaagagcggcggcggcggcggcggtggaggcagtagctggggcggtcgcagtaatagtggaccttacagaggcggctatggcggtgggggtggctatggaggcagctccttctaaaagaaaatttaaaatgcctgggagtggctataggggtagctctttccaacagcccaagtggggtcaactcctaagccccaccccctcacacacaccgccttccctgttttgcccttgggggagccacttctaaggctgcttacccttgggggtgttcctctatttgcctgccacctctcttgtctctccctctgaagatggactcggccccacatacacatttttgtgttacagtcattgatggactctatttttttattattacttggaccttggtcgtttttatactagccccctctttcctntccttcttctcctccctcctttcctcttctctcttccctcctcctctctccttcccccttttctccccttttttcctcttccctcttctccccctctctcttctcctcccccttccctccctccttccttcttcnccctttttctcttcctcctcttcctcttctcccttcctcttttctctctcttctcctcttcctcttcttttctccttctttcccttctctctcttcctcc

SEQ ID NO: 74977 - DNA, 1501 bp, Homo sapiens
accctgcaggattgcgagcagtagcccattcatatcacaatagccctttctatatgaggtttgaaaatgtaaactgctatgcatagcttgggcaatagccctaaattgctatgacaactaatgaaccagctacgtatactggtattttaggtgcaagttgtaaagcaaaatatctgtgtattctgcttggttaacaaatgtatatttgtagccctttcctgcaatagcattcaagttgttgtttataagagaagaacaaaagtgataataggtgaaaattgcctttctggatagaaatagagaatagcaacgtttatggatatcacaaataaagaattcaattctttacatgattgagtgagagtatgtataacctggtgggtgggttcagagtaccttttaatctagtatgcttaacttgatgttaatatttaacttaaatatttgacttacatgttgacgttgaaggctcaaagctatactaagaagctttctgaaagattgggctttaaaataaaataatattttaatattgaaccattttttaacttcttgtcactgttcaattcctaaggtctagttcttgccagttttttttttttttttcctgattggcagggcttttaaagaagtaagaagaaaggttaagattattaggctaggttatagctgctcagtagtcattttgacaaagggtagcggatggttggtacaaatagtgttatatcctctatgacaaacggggtggatgtttttacacattgaggtaatacatagtcaaatcctttgctctcaaatagttgtacactttccatacatttctgtcttattttttaattctagtgatacacaaattacatgtgggctacttcatttggtaatttggtccagctttttggtggctgtagagtggcctctaggatacagaaaatgattctctgaaatttttcgttgtaattgttaaatactactctgcttgacttactcagttttggtgggaagatctgggtcaattggaatagtacacctttctcagggttttcagtttaataaggttgtcatattattcccaacatgggaatatagtggcttctaaagtttgcaaatgaattatgtaaaaggattttctgtgtattaggaaggcaacctgttctgttcatggtatattaacacttcattgtcatgtgtctacccttaaaattgctatttgtagtgaagaaaaaagcatagtggtatttagtcacttctgggttcctcttgtcagtttatatgcaaacattttggcatgtgggacttggggaggagggacaattggttgtatgttttgaccacttccacctatgaaaattatctgaacattattcagatttaagagttcatgggagcaggtggtacagaacctagtgttgaatataatttttgtgccatgcttgaatgtattttgacggattagcaaaataaaagtgaacctcctatttttcatcttaatgtgaagatcttt

SEQ ID NO: 74978 - DNA, 1484 bp, Homo sapiens
ggcacgaggcccagatagtggagcggaggtggcggcggcggcggtagcggtggccttggttgtcttccagtctcctcggctcgccctttagccggcaccgctccccttccctcccccttcctctcttccttccttccctccccttccctttttcccttccccgtcggtgagcggcgggggtggctccagcaacggctgggcccaagctgtgtagaggccttaaccaacgataacggcggcgacggcgaaacctcggagctcgcagggcgggggcaaggcccgggccttggagatggagaattctcagttgtgtaagctgttcatcggcggcctcaatgtgcagacgagtgagtcgggcctgcgcggccactttgaggcctttgggactctgacggactgcgtggtggtggtgaatccccagaccaagcgctcccgttgctttggcttcgtgacctactccaatgtggaggaggcggacgccgccatggccgcctcgccccatgccgtggacggcaacactgtggagctgaagcgggcggtgtcccgggaggattcggcgcggcccggtgcccacgccaaggttaagaagctctttgtcggaggccttaaaggagacgtggctgagggcgacctgatcgagcacttctcgcagtttggcaccgtggaaaaggccgagattattgccgacaagcagtccggcaagaagcgtggattcggcttcgtgtatttccagaatcacgacgcggcagacaaggccgcggtggtcaagttccatccgattcagggccatcgcgtggaggtgaagaaagcagtccccaaggaggatatctactccggtgggggtggaggcggctcccgatcctcccggggcggccgaggcggccgggggcgcggcggtggtcgagaccagaacggcctttccaagggcggcggcggcggttacaacagctacggtggttacggcggcggcggaggcggcggctacaatgcctacggaggcggcggcggcggttcgtcctacggtgggagcgactacggtaacggcttcggcggcttcggcagctacagccagcatcagtcctcctatgggcccatgaagagcggcggcggcggcggcggtggaggcagtagctggggcggtcgcagtaatagtggaccttacagaggcggctatggcggtgggggtggctatggaggcagctccttctaaaagaaaatttaaaatgcctgggagtggctataggggtagctctttccaacagcccaagtggggtcaactcctaagccccaccccctcacacacaccgccttccctgttttgcccttgggggagccacttctaaggctgcttacccttgggggtgttcctctatttgcctgccacctctcttgtctctccctctgaagatggactcggccccacatacacatcatgtgtagatagctagactatgcaccatagtagtactgcctcgcttgcatgc

SEQ ID NO: 74979 - DNA, 1420 bp, Homo sapiens
ggcacgaggcccagatagtggagcggaggtggcggcggcggcggtagcggtggccttggttgtcttccagtctcctcggctcgccctttagccggcaccgctccccttccctcccccttcctctcttccttccttccctccccttccctttttcccttccccgtcggtgagcggcgggggtggctccagcaacggctgggcccaagctgtgtagaggccttaaccaacgataacggcggcgacggcgaaacctcggagctcgcagggcgggggcaaggcccgggccttggagatggagaattctcagttgtgtaagctgttcatcggcggcctcaatgtgcagacgagtgagtcgggcctgcgcggccactttgaggcctttgggactctgacggactgcgtggtggtggtgaatccccagaccaagcgctcccgttgctttggcttcgtgacctactccaatgtggaggaggcggacgccgccatggccgcctcgccccatgccgtggacggcaacactgtggagctgaagcgggcggtgtcccgggaggattcggcgcggcccggtgcccacgccaaggttaagaagctctttgtcggaggccttaaaggagacgtggctgagggcgacctgatcgagcacttctcgcagtttggcaccgtggaaaaggccgagattattgccgacaagcagtccggcaagaagcgtggattcggcttcgtgtatttccagaatcacgacgcggcagacaaggccgcggtggtcaagttccatccgattcagggccatcgcgtggaggtgaagaaagcagtccccaaggaggatatctactccggtgggggtggaggcggctcccgatcctcccggggcggccgaggcggccgggggcgcggcggtggtcgagaccagaacggcctttccaagggcggcggcggcggttacaacagctacggtggttacggcggcggcggaggcggcggctacaatgcctacggaggcggcggcggcggttcgtcctacggtgggagcgactacggtaacggcttcggcggcttcggcagctacagccagcatcagtcctcctatgggcccatgaagagcggcggcggcggcggcggtggaggcagtagctggggcggtcgcagtaatagtggaccttacagaggcggctatggcggtgggggtggctatggaggcagctccttctaaaagaaaatttaaaatgcctgggagtggctataggggtaggggtagtttactttgttgtaaggacttgataacctggctacagcgttttctatgaaatctacttggatcccatgcctgaaatttggaagcatatgtacaaaaatcatttttacgttttatttttaataaatcattgtgtttgaccgtacatgtctaacattttttttctag

SEQ ID NO: 74980 - DNA, 1765 bp, Homo sapiens
ggcacgaggcccagatagtggagcggaggtggcggcggcggcggtagcggtggccttggttgtcttccagtctcctcggctcgccctttagccggcaccgctccccttccctcccccttcctctcttccttccttccctccccttccctttttcccttccccgtcggtgagcggcgggggtggctccagcaacggctgggcccaagctgtgtagaggccttaaccaacgataacggcggcgacggcgaaacctcggagctcgcagggcgggggcaaggcccgggccttggagatggagaattctcagttgtgtaagctgttcatcggcggcctcaatgtgcagacgagtgagtcgggcctgcgcggccactttgaggcctttgggactctgacggactgcgtggtggtggtgaatccccagaccaagcgctcccgttgctttggcttcgtgacctactccaatgtggaggaggcggacgccgccatggccgcctcgccccatgccgtggacggcaacactgtggagctgaagcgggcggtgtcccgggaggattcggcgcggcccggtgcccacgccaaggttaagaagctctttgtcggaggccttaaaggagacgtggctgagggcgacctgatcgagcacttctcgcagtttggcaccgtggaaaaggccgagattattgccgacaagcagtccggcaagaagcgtggattcggcttcgtgtatttccagaatcacgacgcggcagacaaggccgcggtggtcaagttccatccgattcagggccatcgcgtggaggtgaagaaagcagtccccaaggaggatatctactccggtgggggtggaggcggctcccgatcctcccggggcggccgaggcggccgggggcgcggcggtggtcgagaccagaacggcctttccaagggcggcggcggcggttacaacagctacggtggttacggcggcggcggaggcggcggctacaatgcctacggaggcggcggcggcggttcgtcctacggtgggagcgactacggtaacggcttcggcggcttcggcagctacagccagcatcagtcctcctatgggcccatgaagagcggcggcggcggcggcggtggaggcagtagctggggcggtcgcagtaatagtggaccttacagaggcggctatggcggtgggggtggctatggaggcagctccttctaaaagaaaatttaaaatgcctgggagtggctataggggtagctctttccaacagcccaagtggggtcaactcctaagccccaccccctcacacacaccgccttccctgttttgcccttgggggagccacttctaaggctgcttacccttgggggtgttcctctatttgcctgccacctctcttgtctctccctctgaagatggactcggccccacatacacatttttgtgttacagtcattgatggactctatttttttattattacttggaccttggtcgtttttatactagcaaaatgtcttgttttaatttgtgttttttggggggagggagggagtgaacttgctgattctgtagcaaaacctgggtgggggttggggtggggggtagtttactttgttgtaaggacttgataacctggctacagcgttttctatgaaatctacttggatcccatgcctgaaatttggaagcatatgtacaaaaatcatttttacgttttatttttaataaatcattgtgtttgaccgtacatgtctaacattttttttctag

SEQ ID NO: 74981 - DNA, 2793 bp, Homo sapiens
  misc_feature (1410)..(1422): n is a, c, g, or t
  misc_feature (1441)..(1442): n is a, c, g, or t
  misc_feature (1444)..(1444): n is a, c, g, or t
  misc_feature (1447)..(1448): n is a, c, g, or t
  misc_feature (1451)..(1451): n is a, c, g, or t
  misc_feature (1456)..(1456): n is a, c, g, or t
  misc_feature (1458)..(1458): n is a, c, g, or t
  misc_feature (1465)..(1465): n is a, c, g, or t
  misc_feature (1473)..(1473): n is a, c, g, or t
  misc_feature (1482)..(1482): n is a, c, g, or t
  misc_feature (1487)..(1487): n is a, c, g, or t
  misc_feature (1490)..(1491): n is a, c, g, or t
  misc_feature (1508)..(1509): n is a, c, g, or t
  misc_feature (1517)..(1517): n is a, c, g, or t
  misc_feature (1525)..(1525): n is a, c, g, or t
  misc_feature (1553)..(1554): n is a, c, g, or t
ggcacgaggcccagatagtggagcggaggtggcggcggcggcggtagcggtggccttggttgtcttccagtctcctcggctcgccctttagccggcaccgctccccttccctcccccttcctctcttccttccttccctccccttccctttttcccttccccgtcggtgagcggcgggggtggctccagcaacggctgggcccaagctgtgtagaggccttaaccaacgataacggcggcgacggcgaaacctcggagctcgcagggcgggggcaaggcccgggccttggagatggagaattctcagttgtgtaagctgttcatcggcggcctcaatgtgcagacgagtgagtcgggcctgcgcggccactttgaggcctttgggactctgacggactgcgtggtggtggtgaatccccagaccaagcgctcccgttgctttggcttcgtgacctactccaatgtggaggaggcggacgccgccatggccgcctcgccccatgccgtggacggcaacactgtggagctgaagcgggcggtgtcccgggaggattcggcgcggcccggtgcccacgccaaggttaagaagctctttgtcggaggccttaaaggagacgtggctgagggcgacctgatcgagcacttctcgcagtttggcaccgtggaaaaggccgagattattgccgacaagcagtccggcaagaagcgtggattcggcttcgtgtatttccagaatcacgacgcggcagacaaggccgcggtggtcaagttccatccgattcagggccatcgcgtggaggtgaagaaagcagtccccaaggaggatatctactccggtgggggtggaggcggctcccgatcctcccggggcggccgaggcggccgggggcgcggcggtggtcgagaccagaacggcctttccaagggcggcggcggcggttacaacagctacggtggttacggcggcggcggaggcggcggctacaatgcctacggaggcggcggcggcggttcgtcctacggtgggagcgactacggtaacggcttcggcggcttcggcagctacagccagcatcagtcctcctatgggcccatgaagagcggcggcggcggcggcggtggaggcagtagctggggcggtcgcagtaatagtggaccttacagaggcggctatggcggtgggggtggctatggaggcagctccttctaaaagaaaatttaaaatgcctgggagtggctataggggtagctctttccaacagcccaagtggggtcaactcctaagccccaccccctcacacacaccgccttccctgttttgcccttgggggagccacttctaaggctgcttacccttgggggtgttcctctatttgcctgccacctctcttgtctctccctctgaatagnnnnnnnnnnnnnccaccacaataatataatnncncanncantcatnanagacaanataacaanaccgaattngaaantcnncgtaaaacagactaacnncatagttntatttacnttataatatttttttttatatttatatnnttgaacttgctgattctgtagcaaaacctgggtgggggttggggtggggggtagtttactttgttgtaaggacttgataacctggctacagcgttttctatgaaatctacttggatcccatgcctgaaatttggaagcatatgtacaaaaatcatttttacgttttatttttaataaatcattgtgtttgaccgtacatgtctaacattttttttctaggatccattccgtaccgttttttaagggatatttgtttaagactttacgtgttaattctttattcttgatgtgtacttagagaaacttaagaggtcctgtggtttttttcccctctcctgttgccctgctagttgcgtgttgaattatatcccttacaggcaaaacttttgaagtggtggatgtggctttttaaactcttaagtttctgtgcatccatctcttgtactaagcgaattgtttatcatcttgacatggttggtcatttctatgacaatttacttcaaactgtgtactgtgtagttctatatagtttgtgttaagcatgtcattcatataaactgtttaaaatttttcagatggcctagtttcatccctcttactggtttgtctgtaatgaatggttaaaaataagggttatattttaccctcaaatgcgtttttgtactttcagagcaggtttaaacgttttttttttttttttcctatatccgaactgttggcctcatggaaatccctttcccgatctttgtagcaccatctactggcagaatggcagagtagctgcgaaacaatttgtttaaaaacttgcttaagacaattgcatcagatttggaagttttgccatcaaaattctttgcagaattggaagttaacacatttgcttgtaactgagatgggcttcacaggaatgtagttgccagttcatatcacaatagccctttctatatgaggtttgaaaatgtaaactgctatgcatagcttgggcaatagccctaaattgctatgacaactaatgaaccagctacgtatactggtattttaggtgcaagttgtaaagcaaaatatctgtgtattctgcttggttaacaaatgtatatttgtagccctttcctgcaatagcattcaagttgttgtttataagagaagaacaaaagtgataataggtgaaaattgcctttctggatagaaatagagaatagcaacgtttatggatatcacaaataaagaattcaattcttt

SEQ ID NO: 74982 - DNA, 3939 bp, Homo sapiens
ggcacgaggcccagatagtggagcggaggtggcggcggcggcggtagcggtggccttggttgtcttccagtctcctcggctcgccctttagccggcaccgctccccttccctcccccttcctctcttccttccttccctccccttccctttttcccttccccgtcggtgagcggcgggggtggctccagcaacggctgggcccaagctgtgtagaggccttaaccaacgataacggcggcgacggcgaaacctcggagctcgcagggcgggggcaaggcccgggccttggagatggagaattctcagttgtgtaagctgttcatcggcggcctcaatgtgcagacgagtgagtcgggcctgcgcggccactttgaggcctttgggactctgacggactgcgtggtggtggtgaatccccagaccaagcgctcccgttgctttggcttcgtgacctactccaatgtggaggaggcggacgccgccatggccgcctcgccccatgccgtggacggcaacactgtggagctgaagcgggcggtgtcccgggaggattcggcgcggcccggtgcccacgccaaggttaagaagctctttgtcggaggccttaaaggagacgtggctgagggcgacctgatcgagcacttctcgcagtttggcaccgtggaaaaggccgagattattgccgacaagcagtccggcaagaagcgtggattcggcttcgtgtatttccagaatcacgacgcggcagacaaggccgcggtggtcaagttccatccgattcagggccatcgcgtggaggtgaagaaagcagtccccaaggaggatatctactccggtgggggtggaggcggctcccgatcctcccggggcggccgaggcggccgggggcgcggcggtggtcgagaccagaacggcctttccaagggcggcggcggcggttacaacagctacggtggttacggcggcggcggaggcggcggctacaatgcctacggaggcggcggcggcggttcgtcctacggtgggagcgactacggtaacggcttcggcggcttcggcagctacagccagcatcagtcctcctatgggcccatgaagagcggcggcggcggcggcggtggaggcagtagctggggcggtcgcagtaatagtggaccttacagaggcggctatggcggtgggggtggctatggaggcagctccttctaaaagaaaatttaaaatgcctgggagtggctataggggtagctctttccaacagcccaagtggggtcaactcctaagccccaccccctcacacacaccgccttccctgttttgcccttgggggagccacttctaaggctgcttacccttgggggtgttcctctatttgcctgccacctctcttgtctctccctctgaagatggactcggccccacatacacatttttgtgttacagtcattgatggactctatttttttattattacttggaccttggtcgtttttatactagcaaaatgtcttgttttaatttgtgttttttggggggagggagggagtgaacttgctgattctgtagcaaaacctgggtgggggttggggtggggggtagtttactttgttgtaaggacttgataacctggctacagcgttttctatgaaatctacttggatcccatgcctgaaatttggaagcatatgtacaaaaatcatttttacgttttatttttaataaatcattgtgtttgaccgtacatgtctaacattttttttctaggatccattccgtaccgttttttaagggatatttgtttaagactttacgtgttaattctttattcttgatgtgtacttagagaaacttaagaggtcctgtggtttttttcccctctcctgttgccctgctagttgcgtgttgaattatatcccttacaggcaaaacttttgaagtggtggatgtggctttttaaactcttaagtttctgtgcatccatctcttgtactaagcgaattgtttatcatcttgacatggttggtcatttctatgacaatttacttcaaactgtgtactgtgtagttctatatagtttgtgttaagcatgtcattcatataaactgtttaaaatttttcagatggcctagtttcatccctcttactggtttgtctgtaatgaatggttaaaaataagggttatattttaccctcaaatgcgtttttgtactttcagagcaggtttaaacgttttttttttttttttcctatatccgaactgttggcctcatggaaatccctttcccgatctttgtagcaccatctactggcagaatggcagagtagctgcgaaacaatttgtttaaaaacttgcttaagacaattgcatcagatttggaagttttgccatcaaaattctttgcagaattggaagttaacacatttgcttgtaactgagatgggcttcacaggaatgtagttgccagttcatatcacaatagccctttctatatgaggtttgaaaatgtaaactgctatgcatagcttgggcaatagccctaaattgctatgacaactaatgaaccagctacgtatactggtattttaggtgcaagttgtaaagcaaaatatctgtgtattctgcttggttaacaaatgtatatttgtagccctttcctgcaatagcattcaagttgttgtttataagagaagaacaaaagtgataataggtgaaaattgcctttctggatagaaatagagaatagcaacgtttatggatatcacaaataaagaattcaattctttacatgattgagtgagagtatgtataacctggtgggtgggttcagagtaccttttaatctagtatgcttaacttgatgttaatatttaacttaaatatttgacttacatgttgacgttgaaggctcaaagctatactaagaagctttctgaaagattgggctttaaaataaaataatattttaatattgaaccattttttaacttcttgtcactgttcaattcctaaggtctagttcttgccagttttttttttttttttcctgattggcagggcttttaaagaagtaagaagaaaggttaagattattaggctaggttatagctgctcagtagtcattttgacaaagggtagcggatggttggtacaaatagtgttatatcctctatgacaaacggggtggatgtttttacacattgaggtaatacatagtcaaatcctttgctctcaaatagttgtacactttccatacatttctgtcttattttttaattctagtgatacacaaattacatgtgggctacttcatttggtaatttggtccagctttttggtggctgtagagtggcctctaggatacagaaaatgattctctgaaatttttcgttgtaattgttaaatactactctgcttgacttactcagttttggtgggaagatctgggtcaattggaatagtacacctttctcagggttttcagtttaataaggttgtcatattattcccaacatgggaatatagtggcttctaaagtttgcaaatgaattatgtaaaaggattttctgtgtattaggaaggcaacctgttctgttcatggtatattaacacttcattgtcatgtgtctacccttaaaattgctatttgtagtgaagaaaaaagcatagtggtatttagtcacttctgggttcctcttgtcagtttatatgcaaacattttggcatgtgggacttggggaggagggacaattggttgtatgttttgaccacttccacctatgaaaattatctgaacattattcagatttaagagttcatgggagcaggtggtacagaacctagtgttgaatataatttttgtgccatgcttgaatgtattttgacggattagcaaaataaaagtgaacctcctatttttcatcttaatgtgaagatcttt

SEQ ID NO: 74983 - DNA, 2824 bp, Homo sapiens
ggcacgaggcccagatagtggagcggaggtggcggcggcggcggtagcggtggccttggttgtcttccagtctcctcggctcgccctttagccggcaccgctccccttccctcccccttcctctcttccttccttccctccccttccctttttcccttccccgtcggtgagcggcgggggtggctccagcaacggctgggcccaagctgtgtagaggccttaaccaacgataacggcggcgacggcgaaacctcggagctcgcagggcgggggcaaggcccgggccttggagatggagaattctcagttgtgtaagctgttcatcggcggcctcaatgtgcagacgagtgagtcgggcctgcgcggccactttgaggcctttgggactctgacggactgcgtggtggtggtgaatccccagaccaagcgctcccgttgctttggcttcgtgacctactccaatgtggaggaggcggacgccgccatggccgcctcgccccatgccgtggacggcaacactgtggagctgaagcgggcggtgtcccgggaggattcggcgcggcccggtgcccacgccaaggttaagaagctctttgtcggaggccttaaaggagacgtggctgagggcgacctgatcgagcacttctcgcagtttggcaccgtggaaaaggccgagattattgccgacaagcagtccggcaagaagcgtggattcggcttcgtgtatttccagaatcacgacgcggcagacaaggccgcggtggtcaagttccatccgattcagggccatcgcgtggaggtgaagaaagcagtccccaaggaggatatctactccggtgggggtggaggcggctcccgatcctcccggggcggccgaggcggccgggggcgcggcggtggtcgagaccagaacggcctttccaagggcggcggcggcggttacaacagctacggtggttacggcggcggcggaggcggcggctacaatgcctacggaggcggcggcggcggttcgtcctacggtgggagcgactacggtaacggcttcggcggcttcggcagctacagccagcatcagtcctcctatgggcccatgaagagcggcggcggcggcggcggtggaggcagtagctggggcggtcgcagtaatagtggaccttacagaggcggctatggcggtgggggtggctatggaggcagctccttctaaaagaaaatttaaaatgcctgggagtggctataggggtagctctttccaacagcccaagtggggtcaactcctaagccccaccccctcacacacaccgccttccctgttttgcccttgggggagccacttctaaggctgcttacccttgggggtgttcctctatttgcctgccacctctcttgtctctccctctgaagatggactcggccccacatacacatttttgtgttacagtcattgatggactctatttttttattattacttggaccttggtcgtttttatactagcaaaatgtcttgttttaatttgtgttttttggggggagggagggagtgaacttgctgattctgtagcaaaacctgggtgggggttggggtggggggtagtttactttgttgtaaggacttgataacctggctacagcgttttctatgaaatctacttggatcccatgcctgaaatttggaagcatatgtacaaaaatcatttttacgttttatttttaataaatcattgtgtttgaccgtacatgtctaacattttttttctaggatccattccgtaccgttttttaagggatatttgtttaagactttacgtgttaattctttattcttgatgtgtacttagagaaacttaagaggtcctgtggtttttttcccctctcctgttgccctgctagttgcgtgttgaattatatcccttacaggcaaaacttttgaagtggtggatgtggctttttaaactcttaagtttctgtgcatccatctcttgtactaagcgaattgtttatcatcttgacatggttggtcatttctatgacaatttacttcaaactgtgtactgtgtagttctatatagtttgtgttaagcatgtcattcatataaactgtttaaaatttttcagatggcctagtttcatccctcttactggtttgtctgtaatgaatggttaaaaataagggttatattttaccctcaaatgcgtttttgtactttcagagcaggtttaaacgttttttttttttttttcctatatccgaactgttggcctcatggaaatccctttcccgatctttgtagcaccatctactggcagaatggcagagtagctgcgaaacaatttgtttaaaaacttgcttaagacaattgcatcagatttggaagttttgccatcaaaattctttgcagaattggaagttaacacatttgcttgtaactgagatgggcttcacaggaatgtagttgccagttcatatcacaatagccctttctatatgaggtttgaaaatgtaaactgctatgcatagcttgggcaatagccctaaattgctatgacaactaatgaaccagctacgtatactggtattttaggtgcaagttgtaaagcaaaatatctgtgtattctgcttggttaacaaatgtatatttgtagccctttcctgcaatagcattcaagttgttgtttataagagaagaacaaaagtgataataggtgaaaattgcctttctggatagaaatagagaatagcaacgtttatggatatcacaaataaagaattcaattctttttaaacagacagatgaccacaaacaacaacaaagagggg

SEQ ID NO: 74984 - DNA, 1639 bp, Homo sapiens
ggcacgaggcccagatagtggagcggaggtggcggcggcggcggtagcggtggccttggttgtcttccagtctcctcggctcgccctttagccggcaccgctccccttccctcccccttcctctcttccttccttccctccccttccctttttcccttccccgtcggtgagcggcgggggtggctccagcaacggctgggcccaagctgtgtagaggccttaaccaacgataacggcggcgacggcgaaacctcggagctcgcagggcgggggcaaggcccgggccttggagatggagaattctcagttgtgtaagctgttcatcggcggcctcaatgtgcagacgagtgagtcgggcctgcgcggccactttgaggcctttgggactctgacggactgcgtggtggtggtgaatccccagaccaagcgctcccgttgctttggcttcgtgacctactccaatgtggaggaggcggacgccgccatggccgcctcgccccatgccgtggacggcaacactgtggagctgaagcgggcggtgtcccgggaggattcggcgcggcccggtgcccacgccaaggttaagaagctctttgtcggaggccttaaaggagacgtggctgagggcgacctgatcgagcacttctcgcagtttggcaccgtggaaaaggccgagattattgccgacaagcagtccggcaagaagcgtggattcggcttcgtgtatttccagaatcacgacgcggcagacaaggccgcggtggtcaagttccatccgattcagggccatcgcgtggaggtgaagaaagcagtccccaaggaggatatctactccggtgggggtggaggcggctcccgatcctcccggggcggccgaggcggccgggggcgcggcggtggtcgagaccagaacggcctttccaagggcggcggcggcggttacaacagctacggtggttacggcggcggcggaggcggcggctacaatgcctacggaggcggcggcggcggttcgtcctacggtgggagcgactacggtaacggcttcggcggcttcggcagctacagccagcatcagtcctcctatgggcccatgaagagcggcggcggcggcggcggtggaggcagtagctggggcggtcgcagtaatagtggaccttacagaggcggctatggcggtgggggtggctatggaggcagctccttctaaaagaaaatttaaaatgcctgggagtggctataggggtagctctttccaacagcccaagtggggtcaactcctaagccccaccccctcacacacatttttgtgttacagtcattgatggactctatttttttattattacttggaccttggtcgtttttatactagcaaaatgtcttgttttaatttgtgttttttggggggagggagggagtgaacttgctgattctgtagcaaaacctgggtgggggttggggtggggggtagtttactttgttgtaaggacttgataacctggctacagcgttttctatgaaatctacttggatcccatgcctgaaatttggaagcatatgtacaaaaatcatttttacgttttatttttaataaatcattgtgtttgaccgtacatgtctaacattttttttctag

SEQ ID NO: 74985 - DNA, 1438 bp, Homo sapiens
ggcacgaggcccagatagtggagcggaggtggcggcggcggcggtagcggtggccttggttgtcttccagtctcctcggctcgccctttagccggcaccgctccccttccctcccccttcctctcttccttccttccctccccttccctttttcccttccccgtcggtgagcggcgggggtggctccagcaacggctgggcccaagctgtgtagaggccttaaccaacgataacggcggcgacggcgaaacctcggagctcgcagggcgggggcaaggcccgggccttggagatggagaattctcagttgtgtaagctgttcatcggcggcctcaatgtgcagacgagtgagtcgggcctgcgcggccactttgaggcctttgggactctgacggactgcgtggtggtggtgaatccccagaccaagcgctcccgttgctttggcttcgtgacctactccaatgtggaggaggcggacgccgccatggccgcctcgccccatgccgtggacggcaacactgtggagctgaagcgggcggtgtcccgggaggattcggcgcggcccggtgcccacgccaaggttaagaagctctttgtcggaggccttaaaggagacgtggctgagggcgacctgatcgagcacttctcgcagtttggcaccgtggaaaaggccgagattattgccgacaagcagtccggcaagaagcgtggattcggcttcgtgtatttccagaatcacgacgcggcagacaaggccgcggtggtcaagttccatccgattcagggccatcgcgtggaggtgaagaaagcagtccccaaggaggatatctactccggtgggggtggaggcggctcccgatcctcccggggcggccgaggcggccgggggcgcggcggtggtcgagaccagaacggcctttccaagggcggcggcggcggttacaacagctacggtggttacggcggcggcggaggcggcggctacaatgcctacggaggcggcggcggcggttcgtcctacggtgggagcgactacggtaacggcttcggcggcttcggcagctacagccagcatcagtcctcctatgggcccatgaagagcggcggcggcggcggcggtggaggcagtagctggggcggtcgcagtaatagtggaccttacagaggcggctatggcggtgggggtggctatggaggcagctccttctaaaagaaaatttaaaatgcctgggagtggctataggggtagctctttccaacagcccaagggtagtttactttgttgtaaggacttgataacctggctacagcgttttctatgaaatctacttggatcccatgcctgaaatttggaagcatatgtacaaaaatcatttttacgttttatttttaataaatcattgtgtttgaccgtacatgtctaacattttttttctag

SEQ ID NO: 74986 - DNA, 583 bp, Homo sapiens
tcaatttgtaggaagaaccaatagaacggcttagtgttcctgatatacccaaagaacattttggtcaaagacttcttgtaaaatgcttatcactcaagtttgaaattgaaattgaacccatttttgcaagtttggctttatatgatgtcaaggaaaagaaaaagatttcagaaaacttttattttgaccttaattctgagcagatgaaagggttgttacgtccacatgtaccacctgctgccattactaccctggcaagatcagcaattttttctatcacttatccttcccaagatgtttttcttgtaataaagctagaaaaagtcctacagcaaggagacattggagagtgtgcagaaccatatatgattttcaaagaagcagatgccaccaagaataaagaaaaactggagaaactgaagagtcaagcagatcagttttgccaaagacttgggaaatatcgcatgccttttgcttggactgcaatccatttaatgaatattgttagcagtgctgggagtttggaaagagattctacagaagtagaaatcagtactggaggtaagagtgtttcatacaaaac

SEQ ID NO: 74987 - DNA, 884 bp, Homo sapiens
agcggaaaagccagctgggctcctgagtccggtgggtacttggagaacttactacgtctagctggaggattgtaaatgcaccaatcagcatgctgtgtctagctcaagaactcaagctccatgaggagatgtttcattgtcgagagcagtcatgatggcctgcactccacacaatgcaacagagtgaaagagcaggttctgcttctttggtgtagtcctgaagcttcctaagaaacttcacatcaggtgatggataggagcaaccctgtaaaaccagccttagactatttttcaaacagatgaagtgtttataagtcatcccaaggaagaaacaattcagatgagaactattcaatggatttgcaataacaatccaaagatggaagaagacacttctaggtagacaaaattgcaagtatagagaatgtaaattaagagagagcttagctttcagatgaattaaaagattgtggtgatcagaatgtagagattgacgagagacaaatgaaataaaactagaaggacaagtagagatttgtgggtcaagttttaaaattttattataaatgcactgatactgttctgaacattttcttacacatggaaatttaatgattatggctattgaaaaatgtaactcttcatttatatttttccgagaatgaaatcggtggaattgctggggggtgaaaatgtccaatgcgaaacaggaggctaatttaagaagggatactgcaaaattggtcatgatggctcaaactgctgttcataatagagagaagaaaatggatagagttacatatggatgagagtaaattgacaaggctaaatgctaaaacgtgggtagtgacagaaagtaggtgtcaaaatagacttccaggaaa

SEQ ID NO: 74988 - DNA, 808 bp, Homo sapiens
agcggaaaagccagctgggctcctgagtccggtgggtacttggagaacttactacgtctagctggaggattgtaaatgcaccaatcagcatgctgtgtctagctcaagaactcaagctccatgaggagatgtttcattgtcgagagcagtcatgatggcctgcactccacacaatgcaacagagtgaaagagcaggttctgcttctttggtgtagtcctgaagcttcctaagaaacttcacatcaggtgatggataggagcaaccctgtaaaaccagccttagactatttttcaaacaggctggtgaattaccagatctccgtcaagtgcagtaaccagttcaagttggaagtgtgtcttttgaatgcagaaaacaaagtcgtggacaaccaggctgggacccagggccagctgaaggtgctgggtgccaacctctggtggccgtacctgatgcacgaacaccccgcctccctgtactcgtgggaggatggtgattgctcacaccaaagccttggacccctcccagcctgtgacctttgtgaccaactccacctacgcagcagacaagggggctctgtatgtggatgtgatccgtgtgaacagctactactcttggtatcgcaactacgggcacctggagttgattcagctgcagctggccgcccagtttgagaattggtgtaagacatcacaatcccattattcagagcgcgtatggagtggaaacgcttgtagggtttcaccagaggatccatctctgatgttcagtgaagaggaccgggaaaaagcctgctagaagcaagtacca

SEQ ID NO: 74989 - DNA, 490 bp, Homo sapiens
atgttagcaccatctaagttctgtaggtctggaacacagactggttaaatgagcatttcaggagcgctatagttgcaaagttaagcagtcaccacaattttatgtgtcatacaaagatttttaactttatgtttaagcaacgagcctagaagcaaatggtatttccatcaagaattgtctcatataaagtagagcgttttggaaaatggagttattaatagataaaaacatgtttatacagttggtttctaagtatgacaaacctatttcttggtaaattgcaagtccattccacctgtgtttgtaggctcatttgcctaaaagtcttgggatttttttctgatgatctattaaattttctttctgattatcttttctaatgctgtaatagcatttctaacactgtaatgatgagcaagcgtgtacttcggtgctctatcattacagtgtcagaaatgctattacagccattagaaaggatgggtaccga

SEQ ID NO: 74990 - DNA, 1409 bp, Homo sapiens
acgcgtccggggtcaagcaatcctcccacctcagcctctcaggtagctggaactacaggcacatgccccatgcccagctaacttttgtattttctgtagacacagagactggcgggcagctccgcccgcggccgggatgcactaggcaaagccagctgggctcctgagtccggtgggtacttggagaacttactacgtctagctggaggattgtaaatgcaccaatcagcatgctgtgtctagctcaagaactcaagctccatgaggagatgtttcattgtcgagagcagtcatgatggcctgcactccacacaatgcaacagagtgaaagagcaggttctgcttctttggtgtagtcctgaagcttcctaagaaacttcacatcaggtgatggataggagcaaccctgtaaaaccagccttagactatttttcaaacaggctggtgaattaccagatctccgtcaagtgcagtaaccagttcaagttggaagtgtgtcttttgaatgcagaaaacaaagtcgtggacaaccaggctgggacccagggccagctgaaggtgctgggtgccaacctctggtggccgtacctgatgcacgaacaccccgcctccctgtactcgtgggaggatggtgattgctcacaccaaagccttggacccctcccagcctgtgacctttgtgaccaactccacctacgcagcagacaagggggctctgtatgtggatgtgatccgtgtgaacagctactactcttggtatcgcaactacgggcacctggagttgattcagctgcagctggccgcccagtttgagaattggtgtaagacatcacaatcccattattcagagcgcgtatggagtggaaacgcttgtagggtttcaccagtctttcccagggaactccgatgaagtgttccaacaaaatgagcgagtgaaccaagaagaggatgacattagatccaggagatacaacagaggagataatctccaggatgcctgtgaagaaagatccctggatcccaggatgattataggacaagttgttcataatccagcaggccagaagacttccagggaaactcattcaaggaggtgaaaatgatggatgactcctccaagatgaaaatggaccagccgcagtgctcacgcctgtaataccagcactttgggaggctgaggcaggcggatcacttgaggtcaggagtttgaaactagcctggccaacgtggcaaaactccatctctattaaaaatacaaaaattagccaggcatagtggtgcatgcctgtagtcccagctacttgggatgccgaggcaggaagaattgcttgaacctgggaggcagagtctgcagtgagccgagatcatgccactgcactccagcctgggtgacagagccactccgtctc

SEQ ID NO: 74991 - DNA, 1371 bp, Homo sapiens
acgcgtccggggtcaagcaatcctcccacctcagcctctcaggtagctggaactacaggcacatgccccatgcccagctaacttttgtattttctgtagacacagagactggcgggcagctccgcccgcggccgggatgcactaggcaaagccagctgggctcctgagtccggtgggtacttggagaacttactacgtctagctggaggattgtaaatgcaccaatcagcatgctgtgtctagctcaagaactcaagctccatgaggagatgtttcattgtcgagagcagtcatgatggcctgcactccacacaatgcaacagagtgaaagagcaggttctgcttctttggtgtagtcctgaagcttcctaagaaacttcacatcaggtgatggataggagcaaccctgtaaaaccagccttagactatttttcaaacaggctggtgaattaccagatctccgtcaagtgcagtaaccagttcaagttggaagtgtgtcttttgaatgcagaaaacaaagtcgtggacaaccaggctgggacccagggccagctgaaggtgctgggtgccaacctctggtggccgtacctgatgcacgaacaccccgcctccctgtactcgtgggaggatggtgattgctcacaccaaagccttggacccctcccagcctgtgacctttgtgaccaactccacctacgcagcagacaagggggctctgtatgtggatgtgatccgtgtgaacagctactactcttggtatcgcaactacgggcacctggagttgattcagctgcagctggccgcccagtttgagaattggtgtaagacatcacaatcccattattcagagcgcgtatggagtggaaacgcttgtagggtttcaccagggtaagcggtgttgaactttctgcttgtgtattctctctgggcagagatgccacttgcctcccccaccatgccatctctgaagaatattacagaccattttggagcatggtgaataagaaattttcaccttaggagttcacttgaatagtcatttttatatttgtgactgcaagtcactcttaggggctgtacttccttagtactggtagcattattatccaatggacttttatagctttcattaggttttctttttttttttgagacagagtctcgctctgtctgtcacccaggctggagtgcagtggcacaatctcggctctctacaagctccgcctcctgggttcacgccgttctcctgcgtcagcctcctcagtagctgggactaaggcgcccgccactgcgcccggctaattttttgtattttcagtagagacggggttttaccatgttagccaggatgatctcgatctcctgacctca

SEQ ID NO: 74992 - DNA, 1330 bp, Homo sapiens
acgcgtccggggtcaagcaatcctcccacctcagcctctcaggtagctggaactacaggcacatgccccatgcccagctaacttttgtattttctgtagacacagagactggcgggcagctccgcccgcggccgggatgcactaggcaaagccagctgggctcctgagtccggtgggtacttggagaacttactacgtctagctggaggattgtaaatgcaccaatcagcatgctgtgtctagctcaagaactcaagctccatgaggagatgtttcattgtcgagagcagtcatgatggcctgcactccacacaatgcaacagagtgaaagagcaggttctgcttctttggtgtagtcctgaagcttcctaagaaacttcacatcaggtgatggataggagcaaccctgtaaaaccagccttagactatttttcaaacaggctggtgaattaccagatctccgtcaagtgcagtaaccagttcaagttggaagtgtgtcttttgaatgcagaaaacaaagtcgtggacaaccaggctgggacccagggccagctgaaggtgctgggtgccaacctctggtggccgtacctgatgcacgaacaccccgcctccctgtactcgtgggaggatggtgattgctcacaccaaagccttggacccctcccagcctgtgacctttgtgaccaactccacctacgcagcagacaagggggctctgtatgtggatgtgatccgtgtgaacagctactactcttggtatcgcaactacgggcacctggagttgattcagctgcagctggccgcccagtttgagaattggtgtaagacatcacaatcccattattcagagcgcgtatggagtggaaacgcttgtagggtttcaccagggtaagcggtgttgaactttctgcttgtgtattctctctgggcagagatgccacttgcctcccccaccatgccatctctgaagaatattacagaccattttggagcatggtgaataagaaattttcaccttaggagttcacttgaatagtcatttttatatttgtgactgcaagtcactcttaggggctgtacttccttagtactggtagcattattatccaatggacttttatagctttcattaggttttcttttgtttttgttctttaaagaacgttttacttatcttagtatttcatttttcatctatattatgaggcagtaagagtcttctgtttttccaaaaggctgggattacagggcatgaacccacccgcgccttgggccttttcattatggaaatttttgagagggaaacaacaaattcactgcccagttcctg

SEQ ID NO: 74993 - DNA, 1002 bp, Homo sapiens
acgcgtccggggtcaagcaatcctcccacctcagcctctcaggtagctggaactacaggcacatgccccatgcccagctaacttttgtattttctgtagacacagagactggcgggcagctccgcccgcggccgggatgcactaggcaaagccagctgggctcctgagtccggtgggtacttggagaacttactacgtctagctggaggattgtaaatgcaccaatcagcatgctgtgtctagctcaagaactcaagctccatgaggagatgtttcattgtcgagagcagtcatgatggcctgcactccacacaatgcaacagagtgaaagagcaggttctgcttctttggtgtagtcctgaagcttcctaagaaacttcacatcaggtgatggataggagcaaccctgtaaaaccagccttagactatttttcaaacaggctggtgaattaccagatctccgtcaagtgcagtaaccagttcaagttggaagtgtgtcttttgaatgcagaaaacaaagtcgtggacaaccaggctgggacccagggccagctgaaggtgctgggtgccaacctctggtggccgtacctgatgcacgaacaccccgcctccctgtactcgtgggaggatggtgattgctcacaccaaagccttggacccctcccagcctgtgacctttgtgaccaactccacctacgcagcagacaagggggctctgtatgtggatgtgatccgtgtgaacagctactactcttggtatcgcaactacgggcacctggagttgattcagctgcagctggccgcccagtttgagaattggtgtaagacatcacaatcccattattcagagcgcgtatggagtggaaacgcttgtagggtttcaccagattgtatatattcctaccagatggagataattacagctttaaaaatttttattttttcattttatttcacacattgacattaaatttttatggacacataataactgtacatata

SEQ ID NO: 74994 - DNA, 1184 bp, Homo sapiens
cacctcctgctacgcggcacccggtcacgtcaaccgcccaacggctgaggagtgcggcagcgcgccagagactggcgggcagctccgcccgcggccgggatgcactaggcaaagccagctgggctcctgagtccggtgggtacttggagaacttactacgtctagctggaggattgtaaatgcaccaatcagcatgctgtgtctagctcaagaactcaagctccatgaggagatgtttcattgtcgagagcagtcatgatggcctgcactccacacaatgcaacagagtgaaagagcaggttctgcttctttggtgtagtcctgaagcttcctaagaaacttcacatcaggtgatggataggagcaaccctgtaaaaccagccttagactatttttcaaacagatggtgattgctcacaccaaagccttggacccctcccagcctgtgacctttgtgaccaactccacctacgcagcagacaagggggctctgtatgtggatgtgatccgtgtgaacagctactactcttggtatcgcaactacgggcacctggagttgattcagctgcagctggccgcccagtttgagaattggtgtaagacatcacaatcccattattcagagcgcgtatggagtggaaacgcttgtagggtttcaccagtctttcccagggaactccgatgaagtgttccaacaaaatgagcgagtgaaccaagaagaggatgacattagatccaggagatacaacagaggagataatctccaggatgcctgtgaagaaagatccctggatcccaggatgattataggacaagttgttcataatccagcaggccagaagacttccagggaaactcattcaaggaggtgaaaatgatggatgactcctccaagatgaaaatggaccagccgcagtgctcacgcctgtaataccagcactttgggaggctgaggcaggcggatcacttgaggtcaggagtttgaaactagcctggccaacgtggcaaaactccatctctattaaaaatacaaaaattagccaggcatagtggtgcatgcctgtagtcccagctacttgggatgccgaggcaggaagaattgcttgaacctgggaggcagagtctgcagtgagccgagatcatgccactgcactccagcctgggtgacagagccactccgtctc

SEQ ID NO: 74995 - DNA, 1630 bp, Homo sapiens
acgcgtccggggtcaagcaatcctcccacctcagcctctcaggtagctggaactacaggcacatgccccatgcccagctaacttttgtattttctgtagacacagagactggcgggcagctccgcccgcggccgggatgcactaggcaaagccagctgggctcctgagtccggtgggtacttggagaacttactacgtctagctggaggattgtaaatgcaccaatcagcatgctgtgtctagctcaagattttctccatccccttattttgggccagtggctgtcattacatatgagaactcaagctccatgaggagatgtttcattgtcgagagcagtcatgatggcctgcactccacacaatgcaacagagtgaaagagcaggttctgcttctttggtgtagtcctgaagcttcctaagaaacttcacatcaggtgatggataggagcaaccctgtaaaaccagccttagactatttttcaaacaatgaagaaactgaagctgagagaggtttagtgaatgactgaaaaggttgtcaggctgcagggaaaaaaacaaaacaaaactgtacgactagcctgcaatgcttcccaaagatgaagtgtttataagtcatcccaaggaagaaacaattcagatgagaactattcaatggatttgcaataacaatccaaagatggaagaagacacttctagggctggtgaattaccagatctccgtcaagtgcagtaaccagttcaagttggaagtgtgtcttttgaatgcagaaaacaaagtcgtggacaaccaggctgggacccagggccagctgaaggtgctgggtgccaacctctggtggccgtacctgatgcacgaacaccccgcctccctgtactcgtgggaggatggtgattgctcacaccaaagccttggacccctcccagcctgtgacctttgtgaccaactccacctacgcagcagacaagggggctctgtatgtggatgtgatccgtgtgaacagctactactcttggtatcgcaactacgggcacctggagttgattcagctgcagctggccgcccagtttgagaattggtgtaagacatcacaatcccattattcagagcgcgtatggagtggaaacgcttgtagggtttcaccagggtaagcggtgttgaactttctgcttgtgtattctctctgggcagagatgccacttgcctcccccaccatgccatctctgaagaatattacagaccattttggagcatggtgaataagaaattttcaccttaggagttcacttgaatagtcatttttatatttgtgactgcaagtcactcttaggggctgtacttccttagtactggtagcattattatccaatggacttttatagctttcattaggttttctttttttttttgagacagagtctcgctctgtctgtcacccaggctggagtgcagtggcacaatctcggctctctacaagctccgcctcctgggttcacgccgttctcctgcgtcagcctcctcagtagctgggactaaggcgcccgccactgcgcccggctaattttttgtattttcagtagagacggggttttaccatgttagccaggatgatctcgatctcctgacctca

SEQ ID NO: 74996 - DNA, 866 bp, Homo sapiens
tgagccatcgtgcctggcccccagttgtgttctggcaggggaagatgggacagagaggatgggagggtgtctgagcctttcccggactgacggaacctgtgtcttctctcttttgtggacaggatggtgattgctcacaccaaagccttggacccctcccagcctgtgacctttgtgaccaactccacctacgcagcagacaagggggctctgtatgtggatgtgatccgtgtgaacagctactactcttggtatcgcaactacgggcacctggagttgattcagctgcagctggccgcccagtttgagaattggtgtaagacatcacaatcccattattcagagcgcgtatggagtggaaacgcttgtagggtttcaccagggtaagcggtgttgaactttctgcttgtgtattctctctgggcagagatgccacttgcctcccccaccatgccatctctgaagaatattacagaccattttggagcatggtgaataagaaattttcaccttaggagttcacttgaatagtcatttttatatttgtgactgcaagtcactcttaggggctgtacttccttagtactggtagcattattatccaatggacttttatagctttcattaggttttctttttttttttgagacagagtctcgctctgtctgtcacccaggctggagtgcagtggcacaatctcggctctctacaagctccgcctcctgggttcacgccgttctcctgcgtcagcctcctcagtagctgggactaaggcgcccgccactgcgcccggctaattttttgtattttcagtagagacggggttttaccatgttagccaggatgatctcgatctcctgacctca

SEQ ID NO: 74997 - DNA, 935 bp, Homo sapiens
acgcgtccggggtcaagcaatcctcccacctcagcctctcaggtagctggaactacaggcacatgccccatgcccagctaacttttgtattttctgtagacacagagactggcgggcagctccgcccgcggccgggatgcactaggcaaagccagctgggctcctgagtccggtgggtacttggagaacttactacgtctagctggaggattgtaaatgcaccaatcagcatgctgtgtctagctcaagattttctccatccccttattttgggccagtggctgtcattacatatgagaactcaagctccatgaggagatgtttcattgtcgagagcagtcatgatggcctgcactccacacaatgcaacagagtgaaagagcaggttctgcttctttggtgtagtcctgaagcttcctaagaaacttcacatcaggtgatggataggagcaaccctgtaaaaccagccttagactatttttcaaacaatgaagaaactgaagctgagagaggtttagtgaatgactgaaaaggttgtcaggctgcagggaaaaaaacaaaacaaaactgtacgactagcctgcaatgcttcccaaagatgaagtgtttataagtcatcccaaggaagaaacaattcagatgagaactattcaatggatttgcaataacaatccaaagatggaagaagacacttctagggctggtgaattaccagatctccgtcaagtgcagtaaccagttcaagttggaagtgtgtcttttgaatgcagaaaacaaagtcgtggacaaccaggctgggacccagggccagctgaaggtgctgggtgccaacctctggtggccgtacctgatgcacgaacaccatgcccggcgttgacttcttaataataaccatactgactggtgtgagatggtatgccattgtggttttgatt

SEQ ID NO: 74998 - DNA, 321 bp, Homo sapiens
ttgggattctcaattcacaaacttttgtgcgtttcttaattatttcctttctttttcttgtagagagcagtcatgatggcctgcactccacacaatgcaacagagtgaaagagcaggttctgcttctttggtgtagtcctgaagcttcctaagaaacttcacatcaggtgatggataggagcaaccctgtaaaaccagccttagactatttttcaaacagtaagtaataaaggtgacgttttgatctttatctgcttaattacttctgctatgattctattgattctaacattgaaggagcagtaaatttatatgtattat

SEQ ID NO: 74999 - DNA, 681 bp, Homo sapiens
aagagaacaaaagtacacgcttgctcatcatttactaattctaaaaatatatattgaatacatctatgtagcaggtactgtggtaggtgtggaagatagttgagacaggtaacaagcccaacattacggagcttagcatcaccacctagaagagtttttaaaaaacatagataagtgaatcatgattataaagacaaagagattcttgccatataattacatataagcaaatttaggatgtgatgaaagattttgatattggtcttctgatttggctgtaggatgaagtgtttataagtcatcccaaggaagaaacaattcagatgagaactattcaatggatttgcaataacaatccaaagatggaagaagacacttctaggtagacaaaattgcaagtatagagaatgtaaattaagagagagcttagctttcagatgaattaaaagattgtggtgatcagaatgtagagattgacgagagacaaatgaaataaaactagaaggacaagtagagatttgtgggtcaagttttaaaattttattataaatgcactgatactgttctgaacattttcttacacatggaaatttaatgattatggctattgaaaaatgtaactcttcatttatatttttccgagaatgaaatcggtggaattgctggggggtgaaaatgtcc

SEQ ID NO: 75000 - DNA, 1372 bp, Homo sapiens
cacctcctgctacgcggcacccggtcacgtcaaccgcccaacggctgaggagtgcggcagcgcgccagagactggcgggcagctccgcccgcggccgggatgcactaggcaaagccagctgggctcctgagtccggtgggtacttggagaacttactacgtctagctggaggattgtaaatgcaccaatcagcatgctgtgtctagctcaagaactcaagctccatgaggagatgtttcattgtcgagagcagtcatgatggcctgcactccacacaatgcaacagagtgaaagagcaggttctgcttctttggtgtagtcctgaagcttcctaagaaacttcacatcaggtgatggataggagcaaccctgtaaaaccagccttagactatttttcaaacaggctggtgaattaccagatctccgtcaagtgcagtaaccagttcaagttggaagtgtgtcttttgaatgcagaaaacaaagtcgtggacaaccaggctgggacccagggccagctgaaggtgctgggtgccaacctctggtggccgtacctgatgcacgaacaccccgcctccctgtactcgtgggaggatggtgattgctcacaccaaagccttggacccctcccagcctgtgacctttgtgaccaactccacctacgcagcagacaagggggctctgtatgtggatgtgatccgtgtgaacagctactactcttggtatcgcaactacgggcacctggagttgattcagctgcagctggccgcccagtttgagaattggtgtaagacatcacaatcccattattcagagcgcgtatggagtggaaacgcttgtagggtttcaccagtctttcccagggaactccgatgaagtgttccaacaaaatgagcgagtgaaccaagaagaggatgacattagatccaggagatacaacagaggagataatctccaggatgcctgtgaagaaagatccctggatcccaggatgattataggacaagttgttcataatccagcaggccagaagacttccagggaaactcattcaaggaggtgaaaatgatggatgactcctccaagatgaaaatggaccagccgcagtgctcacgcctgtaataccagcactttgggaggctgaggcaggcggatcacttgaggtcaggagtttgaaactagcctggccaacgtggcaaaactccatctctattaaaaatacaaaaattagccaggcatagtggtgcatgcctgtagtcccagctacttgggatgccgaggcaggaagaattgcttgaacctgggaggcagagtctgcagtgagccgagatcatgccactgcactccagcctgggtgacagagccactccgtctc

SEQ ID NO: 75001 - DNA, 962 bp, Homo sapiens
cacctcctgctacgcggcacccggtcacgtcaaccgcccaacggctgaggagtgcggcagcgcgccagagactggcgggcagctccgcccgcggccgggatgcactaggcaaagccagctgggctcctgagtccggtgggtacttggagaacttactacgtctagctggaggattgtaaatgcaccaatcagcatgctgtgtctagctcaagaactcaagctccatgaggagatgtttcattgtcgagagcagtcatgatggcctgcactccacacaatgcaacagagtgaaagagcaggttctgcttctttggtgtagtcctgaagcttcctaagaaacttcacatcaggtgatggataggagcaaccctgtaaaaccagccttagactatttttcaaacagatggtgattgctcacaccaaagccttggacccctcccagcctgtgacctttgtgaccaactccacctacgcagcagacaagggggctctgtatgtggatgtgatccgtgtgaacagctactactcttggtatcgcaactacgggcacctggagttgattcagctgcagctggccgcccagtttgagaattggtgtaagacatcacaatcccattattcagagcgcgtatggagtggaaacgcttgtagggtttcaccagggctggtgaattaccagatctccgtcaagtgcagtaaccagttcaagttggaagtgtgtcttttgaatgcagaaaacaaagtcgtggacaaccaggctgggacccagggccagctgaaggtgctgggtgccaacctctggtggccgtacctgatgcacgaacaccccgcctccctgtactcgtgggaggatggtgattgctcacaccaaagccttggacccctcccagcctgtgacctttgtgaccaactccacctacgcagcagacaagggggctctgtatgtggatgtgatccgtgtg

SEQ ID NO: 75002 - DNA, 1420 bp, Homo sapiens
acgcgtccggggtcaagcaatcctcccacctcagcctctcaggtagctggaactacaggcacatgccccatgcccagctaacttttgtattttctgtagacacagagactggcgggcagctccgcccgcggccgggatgcactaggcaaagccagctgggctcctgagtccggtgggtacttggagaacttactacgtctagctggaggattgtaaatgcaccaatcagcatgctgtgtctagctcaagattttctccatccccttattttgggccagtggctgtcattacatatgagaactcaagctccatgaggagatgtttcattgtcgagagcagtcatgatggcctgcactccacacaatgcaacagagtgaaagagcaggttctgcttctttggtgtagtcctgaagcttcctaagaaacttcacatcaggtgatggataggagcaaccctgtaaaaccagccttagactatttttcaaacaggctggtgaattaccagatctccgtcaagtgcagtaaccagttcaagttggaagtgtgtcttttgaatgcagaaaacaaagtcgtggacaaccaggctgggacccagggccagctgaaggtgctgggtgccaacctctggtggccgtacctgatgcacgaacaccccgcctccctgtactcgtgggaggatggtgattgctcacaccaaagccttggacccctcccagcctgtgacctttgtgaccaactccacctacgcagcagacaagggggctctgtatgtggatgtgatccgtgtgaacagctactactcttggtatcgcaactacgggcacctggagttgattcagctgcagctggccgcccagtttgagaattggtgtaagacatcacaatcccattattcagagcgcgtatggagtggaaacgcttgtagggtttcaccagggtaagcggtgttgaactttctgcttgtgtattctctctgggcagagatgccacttgcctcccccaccatgccatctctgaagaatattacagaccattttggagcatggtgaataagaaattttcaccttaggagttcacttgaatagtcatttttatatttgtgactgcaagtcactcttaggggctgtacttccttagtactggtagcattattatccaatggacttttatagctttcattaggttttctttttttttttgagacagagtctcgctctgtctgtcacccaggctggagtgcagtggcacaatctcggctctctacaagctccgcctcctgggttcacgccgttctcctgcgtcagcctcctcagtagctgggactaaggcgcccgccactgcgcccggctaattttttgtattttcagtagagacggggttttaccatgttagccaggatgatctcgatctcctgacctca

SEQ ID NO: 75003 - DNA, 378 bp, Homo sapiens
gtttcactatgttgaccaggctggtcttgaactcctgacctcaggtgatccacccatctcagcctttcaaagtgctgcgactaaaggtatgagccaccgcacccggcctcataattgcttcttacaggctagatactgggctgggtatattggggttttggaaagaattaagatgctctaagcagcctaggcaacacggtgagaccctgtctctacaaaaattaaaaaatgaaaaagccaggcatgatggcatgtgcctgtagtcctagctactcaggaggctgaaacaggaggatcacgagcccaggaattctaggctgcagtgagctatgattgcgccactgtgctgcagcctaggtgacagtaagatctggtctc

SEQ ID NO: 75004 - DNA, 520 bp, Homo sapiens
caagcagaagtaatcaagcctactgtgtatataagatgaaaagaatcaaaggggaagctccacaaagcgacttctttggtcctggcagtgtctctgcatcacctgtgtccttccttttcccgtgccctgccctctgccccgcttctgctctactttcttgctatttgcctcctaaggcttcaaaatactgctaaacacatttctaaagccttctagacataggacagtttgtgtatgaatcattttatttaagaattagggcaatcttttttgttggaagtagaataaattgtgctccaatttcaggtgcttatgaaaaatacattgtaccacaacctgaatattatgttgtgtaaatccctccagccatctcatttggggcaacttttagataaggaatgaaattacttgtggtataatctataattatttttggcaaatgcatgagtttctcctgcttgaaatataaatgttttattaggtagccacagtatttggcccctgcatgggtgcttaattg

SEQ ID NO: 75005 - DNA, 2234 bp, Homo sapiens
ctatatctattttcacggagcgggcaaccaacagtgaatgtggagctgagagacagtaaaataataactgacatgccaccgaagtacaaagtaaaataaataaataaatacacattttggcctattagcaaagattaagaaatgataacattaaatactcaataaatcaccatgagatggggactcaaacttctggtaaaaatacaaatagatataatttttcttgaaggcaatttagtagtctgtttatcctataattctacttgtaagatcctatcatatgaaaataaccagagatacaaagacattctgcaaagatatgttttatattgttatttattgtgacaaaaggaaataaaaagcctaaatgttcagaaaattattttaaaagatgaaagagggaaataggccatggacggtggctcacgcctgtaatcccagcactttaggaggccaaggtaggtggatcacttgaggttgggatttcgagaccagcctggccaacatggtgaaaccctgcctctactaaaaatacaaaaaatgagccgggtgcaatggcaggcacctataatgccagctactcgggaggctgaggcaggagaatcgcttgaacccgggaggcggaggttgcatgagccgagatggcgccactgctctccagcctggacgacagagcaagactccgtctctaaaaaaaaaaaaagagggaaataaacatttatttgtatattgttatgtagccattaaaattctgtttccaagtaattttaattacaggggtaaattcttatatatctaaataagaatatacacatacacatgttccaaaatatttattatgtacttaaggcatatatattatatatgtatgtgtgtgtatatatatatgtatttgtgtgtgtgaacactaatatttgcatatatatacacacaagaaataaaaacatgttaaaaatggctatatctgcattgtagaattatgagtgattcatgtttttctaacttccctatctgtattaagtgttctatagtttatatttgttactttttacatcaggaaatagtaaagttattatttaaaacttatgaacaaaaaagtaacaagcacatgcaagcacagagttctaccaaatgcaaaaaatttcaaatcaattattcaaatgagacattaacatcacttctgtggtagttttatatccataaagtctgattcttctcctttgaagagatgaagcttaatcttcctcatcctgaaaatgggctggacttagtgacttacgtctttttattttatttttaattgacaaataataattgtatgtatttatggggtacaatattatattattatatatgtatacattatggaattattaaatcaagctaattaacatatccataacctcttataatttctttgtggtgagaacatttaaaaatgtactcttttagcaattagggacttacttttaatacaggaaaatggaagagactgtgagactttgaagtaggtcataaaagtcaactgccatgtcctgagcagccctggaaagacctacatgatgaagaactgagaccttctatcaaatgccagcagggaattgaggcctcctgtcaacagccattttagaagtagatcttccagcctcagtcaagccttcagatgactgcagccctgtctaatagcttgaccgtaatttcatgagagaccttcagccagaaaacccaaggaaaccattctggattcctcatcctcagaaactgtatgagataagaagtgtttgttgtagtacgccgctaaatttggggcaatttgttacatagcaatgtatagctcatacaatttctgggaaaaaaatagtttattttagaatcatttttgcataatgcaagaatataaacttgtcacagaataatttatccttgttttaggtggtccaaatatttcattgtcagttatatattagctcaaattaaattttagataatatatattattattaatggtaaagaatgtgtcacatttatctttatagcttttctgtacctaatattgtgtcttgtgcgtaggatgtgctcaataaaaattgattgaataaataagtgaatgaaagaataaatgaatgagtgaaggaattatctgaaatatttttataaaattccccatatgtatgtattacttattacaagtctggtcccatagctgaaaaaatattaaacattatatatatata

SEQ ID NO: 75006 - DNA, 2286 bp, Homo sapiens
ctatatctattttcacggagcgggcaaccaacagtgaatgtggagctgagagacagtaaaataataactgacatgccaccgaagtacaaagtaaaataaataaataaatacacattttggcctattagcaaagattaagaaatgataacattaaatactcaataaatcaccatgagatggggactcaaacttctggtaaaaatacaaatagatataatttttcttgaaggcaatttagtagtctgtttatcctataattctacttgtaagatcctatcatatgaaaataaccagagatacaaagacattctgcaaagatatgttttatattgttatttattgtgacaaaaggaaataaaaagcctaaatgttcagaaaattattttaaaagatgaaagagggaaataggccatggacggtggctcacgcctgtaatcccagcactttaggaggccaaggtaggtggatcacttgaggttgggatttcgagaccagcctggccaacatggtgaaaccctgcctctactaaaaatacaaaaaatgagccgggtgcaatggcaggcacctataatgccagctactcgggaggctgaggcaggagaatcgcttgaacccgggaggcggaggttgcatgagccgagatggcgccactgctctccagcctggacgacagagcaagactccgtctctaaaaaaaaaaaaagagggaaataaacatttatttgtatattgttatgtagccattaaaattctgtttccaagtaattttaattacaggggtaaattcttatatatctaaataagaatatacacatacacatgttccaaaatatttattatgtacttaaggcatatatattatatatgtatgtgtgtgtatatatatatgtatttgtgtgtgtgaacactaatatttgcatatatatacacacaagaaataaaaacatgttaaaaatggctatatctgcattgtagaattatgagtgattcatgtttttctaacttccctatctgtattaagtgttctatagtttatatttgttactttttacatcaggaaatagtaaagttattatttaaaacttatgaacaaaaaagtaacaagcacatgcaagcacagagttctaccaaatgcaaaaaatttcaaatcaattattcaaatgagacattaacatcacttctgtggtagttttatatccataaagtctgattcttctcctttgaagagatgaagcttaatcttcctcatcctgaaaatgggctggacttagtgacttacgtctttttattttatttttaattgacaaataataattgtatgtatttatggggtacaatattatattattatatatgtatacattatggaattattaaatcaagctaattaacatatccataacctcttataatttctttgtggtgagaacatttaaaaatgtactcttttagcaattagggacttacttttaatacaggaaaatggaagagactgtgagactttgaagtaggtcataaaagtcactgtggcttcctccttgctctctcttggatcacttgctctgggggaaggtcaactgccatgtcctgagcagccctggaaagacctacatgatgaagaactgagaccttctatcaaatgccagcagggaattgaggcctcctgtcaacagccattttagaagtagatcttccagcctcagtcaagccttcagatgactgcagccctgtctaatagcttgaccgtaatttcatgagagaccttcagccagaaaacccaaggaaaccattctggattcctcatcctcagaaactgtatgagataagaagtgtttgttgtagtacgccgctaaatttggggcaatttgttacatagcaatgtatagctcatacaatttctgggaaaaaaatagtttattttagaatcatttttgcataatgcaagaatataaacttgtcacagaataatttatccttgttttaggtggtccaaatatttcattgtcagttatatattagctcaaattaaattttagataatatatattattattaatggtaaagaatgtgtcacatttatctttatagcttttctgtacctaatattgtgtcttgtgcgtaggatgtgctcaataaaaattgattgaataaataagtgaatgaaagaataaatgaatgagtgaaggaattatctgaaatatttttataaaattccccatatgtatgtattacttattacaagtctggtcccatagctgaaaaaatattaaacattatatatatata

SEQ ID NO: 75007 - DNA, 239 bp, Homo sapiens
gccccaggcatgggagttggcatatcatcctagttaagaatttctgagttaagaaatcttatatttgagtttagtgataagtttttctgacccagaaaacaaaacaataccaataataccttacgcttctcctattataacacttgttatgacattgaatttagttttctcattcttttgctaattgtgtaaactaggtgagaacaggaacctctgtttctctagttcattgtagtgcc

SEQ ID NO: 75008 - DNA, 698 bp, Homo sapiens
acctctggactctggaagcgtctcgcctcttcagcccttacacccgctagggagccaggctgttagcagaactcgtcatcctggatgcctgctgaaaggctagaattgaaaaggagacctgctgctttctggaccttcctgcctccctcacgctctccttgccctactctccaggacagcctgtgccagtacttcgcccaactcaggcacatgccccctggctgctcctgcaggccaaggaccggcatgcgctgcagcgccctctactgggcacctggccctcgctggttttctgatcctaaccagcttctcctcttagaatttcctgctgatccatcccagaatgaatgggagttcaatctgtactgaattatctttcatctagcaattgtgcaattccaaatgcaggtgaggttgagggaaagcgggcatcccctcacatccatgggatctatgtgtgggttgtatcaagagtctcaaaaatgctcatattctccggtcctagaattgggtctagcctaaggaaataattcagaactccatgtttttttaaagctttatgcacaaacatgatcataagacatgatttatgataaaaattggatgaagtaaactttcctatgaaagcagctgagtaggttaaattaaggtatacacttgatagccccttcataaagaattttcaagtgaaaaaaaaa

SEQ ID NO: 75009 - DNA, 392 bp, Homo sapiens
  misc_feature (8)..(8): n is a, c, g, or t
  misc_feature (18)..(18): n is a, c, g, or t
tgccctanaaccctagcnattttgggaagcctaggcaggaggatcacttggtgcccaggagttcgataccagcctgggcaacttagtgagaccgccatctccacaaaatgcccagccccagtggcttatgcctataatcctagcattttgggaagcctaggcaggaggatcacttggtgccaggagttcgataccagcctgggcaacttagtgagaccgccatctccacaaaaaagaaaaaaatcagccgagtgtggcggtgtgtgcctgtagtctaggtacaccagaggctgaggcaggaagatcacttgagcccagaggaggttgaggctacagtgagctgtgattgctccagtgctggatgacagagcaagaaagaccctgtctcaaaa

SEQ ID NO: 75010 - DNA, 365 bp, Homo sapiens
attttatatgctgtatgtattacatactgtattcttaagttataaaaaggaaaatgttactaggagagtcacaataaaagaggcccagccccagtggcttatgcctataatcctagcattttgggaagcctaggcaggaggatcacttggtgccaggagttcgataccagcctgggcaacttagtgagaccgccatctccacaaaaaagaaaaaaatcagccgagtgtggcggtgtgtgcctgtagtctaggtacaccagaggctgaggcaggaagatcacttgagcccagaggaggttgaggctacagtgagctgtgattgctccagtgctggatgacagagcaagaaagaccctgtctcaaaa

SEQ ID NO: 75011 - DNA, 678 bp, Homo sapiens
gcaaagtcatattgcactgggcatgagtccagggaagccattggctggggccatcagtgcaatctgtctacctcaccaggattcaaaggactcctgtttgactctaaaacccatactcttgtttccatactgtactaactataaacactcacacagccaaccttggtcactctcacacacttccccagtgcctattcgctgctctagtcagactcaccatgaggtgaacaaaacataattgtttccaactccaagcctttgacctattaaagaatcaatttttgtattgggtttgggaattaaattttctattgaaaataactttaaaaactgataaaccttgtaagaagaaagatctaaagagatttttcctccctaagttagcaacagaattcacatcacttatatactgcttcagttcattataacgagatcagtggtcatggtcaaaatgttcattatctcaaggtcagtgagaaaatttgacctgtgacaaacatagtttataacttcaagtaaagaagcacagttttatccgagaaacatgctaatgacagatgcagtgttctatagcaaacaattgtaatgtttggaaaagtttacagtccttgggtgataactataaacataaacccaattttgaaggaaaactcttgtctccaaagtaaagcaaaacaa

SEQ ID NO: 75012 - DNA, 721 bp, Homo sapiens
ggactacagctccatgactgctcgtgcagagcagggcttctccccaggcagagaatagcagctcagggcagttctgcaccatatttatacctacttttaattgcatgcagattaagggctggtttatgcagaaatttctagggaaagggtggttatttccgggtcatcaggtctttgccatggaaaagggcagtggctcctgagtgttgccatggtgatggcaaactgacatggcacactggtgggcgtgtccaatggaaagatgcttccgctctgtccctgttttggctagtcctcaatttggtcctgtgtctgagccctacctccagagtcaagatctgtttcttacctccagagggtgagggaagccccttcagaggccacctcacccctccacccaaccacactgtctataaactgggcctggcccccagctctgcaagaaggtgagttaagttggggcggcctcagggctcttggaggagcaaccctgatcctgctccatgctcctgtccaggtctggggtcagtgacatatcagagaccccagggagacccatataccctgatgacaagtcccaggtacaacacagagacccaaaccactgctgaatcaccctgtgacccttgtaggtattaagctcttgccctgtgtattatgtctgttctcactctgccaataaagatatacccgagactgggtaatttggtaatttataaag

SEQ ID NO: 75013 - DNA, 1087 bp, Homo sapiens
tcaaatccattgacataaagaccattcagttttacagtggaccatgtattgaaagtattttgtaacctctttcttacatttcttgttatgtaaccttttttctttcttttgttctcacttcaagaactaagccctcagggattctgtttggtaatcattagtactttaatcccttaagcctctggagaaatgaattactgtcttctagggtgctcagtcattcatactcagaaaattcttcttttttatgtacagtttgtgtgagatgctatgttgggtgtctgtatattctgcttgggcatcagatgaaaacttttctaggccttcagtcatatagctgtttttgttcacttgctgtcttagctctgtcttctgacaataattgattagctttttctcattctttcactaccctcttttagaacctttttcctacctactctctatcatatgtttttctcttctgtcatctgagttctaatttctcagctggctgtttcctttcttctgtctttgatcttaaaaagttttaaagttaaactctttgtaattttggatcattcagtacagccagaatttttctaaatattctttttactattagtaattgttcacactgtgtcagcacctctggccttgttagtataattatcataaaaaataaaggccttacaataataactaacatcttttatgcttctgccttttgtttgggttgccctgcacttcaaaatcacataggaagaaagagaatatcttggctatgttgtttaacaggaaaatgtttggggattggggtctattcttcagtttgtctggagaagacagcaaaccatagtgtgtttttacactttctgaaaactttttccagaacccagatattcatatgttacaattaatcaattaaatccatgtatgtggagtcactgtgtgatactaacttgaaaatatagaataggttggccgggtgcagtggttcaggcctgtaatcccaacactttgggaggccaaggtgagtggatgatttgaggtcaggagttcgagaccagcctgaccaacatggtgaaaccccatctctactaaaact

SEQ ID NO: 75014 - DNA, 636 bp, Homo sapiens
ggattccatgaaataaaattcatgtgtcacagcaggagtgaacatattcaagtatctcagtgcatataaccaaataactttccagaaaagctacaccagttacacttaacacccgcagtgtatgagcatgcccgtgtgatgggcacttcaacagcatggagtacccctgttgtgtttgctggccaggcgtggtggctcacgtctgtaattccagcactttgggaggccaaggcgggcggatcacctgaggtcagaagttcgagaccagcctgaccaacatgatgagaccctgtctctactgaaattacaaaaattagctgggcatggtggtaggctcctgcaatcctagctactcgggaggctgaggcaggagaaccgcttgaacccgggaggcggaagttgcagtgtgagatcacaccattccactccagcttgggtgacagagtgagactctgtctcaaaaataaaaaataaaaataaaagatgctaatttaccaagtgaaaaataatcaggaagtttttcttgaatgaataataaatagagataggactatgaattaagtagcattctgtcattgttttattagtaatataactattacaaatgtgatcaaatttttttttattaaaagtcac

SEQ ID NO: 75015 - DNA, 439 bp, Homo sapiens
ctttatctcaggaatccctgtcctgtgctgtttgctgtccagtgtccaagaactgttgtttcatatattttgtctggttttatttaaggaaggaggataaatgtggcctctgtaattccctgtgacctgaagcagctgataagtcccatattttataacaaaagactgacttcttagatgtcctttctcatataatttatactctctatatataacaattgaattgtaactcataaaattatagcagtgtcagatgtgtccatcaattaagttccataatacataagaataaaatggaaagtacattgtgaacttcgatagacatgttcacagaataacttgttattacttggtttaaaagtgcaatcctagttcatttgtttatatattttctaaaaagtttttatagatctcctgaattaaaatacttgtgatgata

SEQ ID NO: 75016 - DNA, 478 bp, Homo sapiens
gagctggtgagtggcctcatgtcttaccatcatggaaaggcgagggctgggggagagagaaggggcagccaaggcctcagagtggtgtaggcctcacccttgtgctcacatgtcccaaccactgccagcggtgccacctctgaatcccagaccccacatgtaaccatcctctacctggaccacaggaggaagctccacgttctttgccagggttcagggtaaggggcatgatctaagttgggcaaaagagagtcatcctgttaccttaaaaaggagtctagggtgagccccagtctgctggtggccatcttcaccacctttggggagagatggcctgagcagacacacaaagcaaagaggtggagagaaactgtgtctttgtgtcattgtttgagtccctggacccagcccagtccccccgactacgctgaacttttcaattgtggaaaacaataaattccatttagttaagaaaatt

SEQ ID NO: 75017 - DNA, 749 bp, Homo sapiens
gcagtccgtgtgtgtctgtgttgttgttcggcggcggcggcggcggtaagatggctgcccacgggggctccgcggcgtcctcggcgctgaaggggttaattcaacagttcaccaccattaccgacagagtcttgctctgtcacccaggctagagtacaatggtgcgatctcagctcactgcaacctccgcctcccgggttcaagcagttctccttgcctcagcctcccgagtagctgggattacaggcgcccaccaccacgcccagctaacttttgtatttttagtggagatgggggttcatcttgttggcgaggctggtctcaaactcttgacctcaggtgatccacccacctcagcctcccaaagcgctgggattacaggcttgagccaccatgcctggctgaagtttcagaaatttaagggaggtaattttgagttgcgaatggaatcttactagtagattcatttattggtagactgctacgtgccaggcatggttcacatcttaaggatacaactgtgagcaaggcgtggtgtctgtcctcagaaagcttaaaggttaacaggaatagagacacacgaataggtattagaatacagtgagagaatggtaaggagctaatactggagcacaaaagagggaggtcaagaaaaccttcccagaataaatacttttttatctaaaatctggaagatgtttcttgcaggagaaacatgcagagacttggaggggaattgggcagacatg

SEQ ID NO: 75018 - DNA, 6435 bp, Homo sapiens
  misc_feature (3645)..(3645): n is a, c, g, or t
gcagtccgtgtgtgtctgtgttgttgttcggcggcggcggcggcggtaagatggctgcccacgggggctccgcggcgtcctcggcgctgaaggggttaattcaacagttcaccaccattaccggtgcaagtgaaagtgtaggaaaacatatgcttgaagcgtgcaacaataatctggaaatggcagtcactatgtttttggatggtggaggaatcgctgaagagcccagtaccagttcagcaagtgtctctactgtcagaccacacacagaagaagaagttcgtgccccaattcctcaaaagcaggaaatactggtggaaccagaaccattatttggtgctcctaaaagacgacggcctgcacgttcaatttttgatggtttccgggattttcagactgaaactattcggcaagaacaagaattaagaaatggaggagctatcgataagaaattaactacccttgcagatctattccggccacccattgatttgatgcataaaggcagctttgaaacagccaaagagtgtggccagatgcaaaataagtggctgatgataaacattcaaaatgttcaagactttgcatgtcagtgcctcaaccgcgatgtgtggagcaacgaagctgtgaagaatattatccgggaacatttcattttctggcaggtttatcatgacagtgaggaaggtcagagatacatacagttttataagttaggggatttcccctatgtttccatattggacccacggacaggtcagaagctagtagaatggcaccagttagatgtatcttctttcttggaccaagtgacgggatttctgggtgaacatggacaactggatggactttctagcagtccccccaaaaaatgtgcccgttcagagagccttatagatgcaagtgaagacagccagctagaagctgccatcagagcctccttacaagaaacacattttgattcaacacagacaaaacaggatagccgctcagatgaagaatctgaatctgaacttttttctggcagtgaggagttcatatccgtttgtggctctgatgaagaagaagaggtagagaatcttgccaagtccagaaagtctccccacaaagatttggggcatagaaaagaggagaatagaaggccgctgactgagccaccagtcagaactgatcctggaacagccacaaaccaccaaggattgccagctgtggattcagagatactggagatgccacctgaaaaagcagatggagtagtggaggggatagatgtaaatggaccaaaagcacagctgatgttgcggtatccagatggaaaaagggaacagatcactcttccagagcaagctaaactgctagctttggtgaagcacgtgcagtctaaaggatacccaaatgaacgttttgaacttctcaccaactttcctcgaaggaaattatctcatctggactatgatattacattgcaagaggcaggcctttgtcctcaagagactgtctttgtacaggaaagaaattaacaccatggcttgacctctctcagcttaccccttttttcccttttcctgtgagatacatgtcactaagtatgcattttggctcataggaccacagagccaaagttgggcaagcaagtcaccttccttctcttatttcttgatctctcctataatcagtctctttctccccctttgtttctttctcctcttctgttttctcgctccccactccgtacccttctgcctccccctccccccacacttttctttcttacctaatctggtgaccaaactgaagtgtaaggataagacctctcctagtactagcagcaggaattgtgtgttccagtaagtggtctcttgcacggcacttttttgggatcaaatgttaacgttactccccagactcttcgggcaaaggaatggctagattcagagtaagaacaaccctcccttttttgtaagtccccgtgtttagcagggagaagaaattctctaacatgggtttggttttgttgtgttcttcatgtggaaatgtcgcttaacaaaatatccaggcttttgtttacgtggaaaaagcatcccttgtaatgattgctcatcatacttaaaaacctttttcaaaggattttcatgttcccagctataaggactatttccatgacatgtgttattggcagaatgagtgttaaatatggagcatatagcatggggtgactttcattgtcctaacctgagacagttttccttattactctgtattgatcctgctagtccaagaatggacatgaagtgaacctatcgtggtgactgggataggaaggtgcttgctatttttgccagcacagcatattagttcctttggagccctccattgtctgagtctgcagtgatctgtaggaaggcagctggtcaataatcatgtagtacaatggcttggaattgtaaccactatggttattgattgtcctgtgttgtttcaggcatacttaggtatgtccctggggaaaaagaaaaccattcagctgagagttgctaaccatgttcttttggttagaaataatggttcattttttgcccctggttggaatagtctctaaaaggctctggtgactgaattgaacatgagtccgcatgctgttttctttcaaaaggtatcaaaacggaaagcctctctaaggggaagacctttcaactccattcagaagacaacatttagtaaggaggatggcggaggttactagtaattttcagatgtcttgggctttttctgccaacaaaacccaaaatcaaattagagttggtgaaagctttcttcagtgtttttagaagaggccatcttgaatctgtagaataccatttacacatcaacttcaccctatgctcatttcgtattttgagcttaaatggagtcctctgaagggggggtagtcgtgattctggtggcaaaactagaacttttaacttgtaaaatgaaaaatattaaatggacctttttgtcagttgaggatttagattgattcttttatctgaggagcgtatgttcctcagatgttgcgtagagacctttaggttttcatctactttaagattgctctcttggcaattaggggatttgggaaaagaagaaaaaaagatgccatgtgttgctagtacacagttataggatatggtttctaatggttgaattttgaggaactctccctaaagaatgagttttatatctcctcaaggaaatcatggaaaaatctgtttattcttcagtgagtccttttgaattaatgttcttaaatttttttctaagtctgtgtaagtgcttatgtataagtatataattgtataaatatttataaatatatttatataattacggtttcatttctaccttgagtcaaagttctgtctttagattggtgactgagtaatacttacactttggtgttttttcttaggttcttgaggcttacttaactagcagcttctgatttattgagtgaaagatggttttcatgttaattcctcagttgcatctctgaacttggataacatacttgccgtttgaaaaatagagctgtatactgtcaaaggtgcactggagggtaaaacatttgttggtagtagacaagctcagaaatccaaaaattcngggagggcacagggtaagaagagaggtttgctcagctttgtgctctgatggcacccatctgtactccagcaaagtcatagctgaagcccaaatcgctcaaacgtgtgaagtcaatcatttttcctatagggctctgtttccttttctttaccttctagcttctcttgataaaacagttgggagaactgccaacgtgttcatcagtgagagggtgtggttctttccgatatgttcagcacgtgcatattcatttatgagaaaccaaagtaacttcttcaactcgggttactgtgggatgattaagtagatataaagtgatttaaaagacagcatggtactttcactcagcttaacatgcagctgggatgtctacaatacaagatgtggtgggttttattttattttattttgaggcaggagtgtaattatcttagggttgatataaaggcccatgggaagagttacggattgtacatgggaagaatccataaggagtattgccttgctcaagaatttaatccgctgacagtatgcttcttccagtttgccttacttcctctgcaagtttctttgctccttagggcagaggttttattgaatagattaaatgaggtcagtaagattagttaaaaatagtcattccttgtgggtgttggacacagcttgaaaggagtgtttaaaaaaaaaaagctagggaggaaaagaacaagaaagatagacttcgagagtgataagagaaaaatacagggagatggaatggaaactaccaggaaggccgggcgcggtggctcatgcctgtaatcccaacactttgggaggcggaggtgggcagatcacctaaggtcaggagatcgaggccagcctgagcaacatggtgaaaccccgtctctactaaaaatacaaaaattacctgggtgtggtggcgtgcacctgtaatcccagctactcagaggctgaggcaggggaatggcttgaacctgggaggcagaggttgcagtgagccaagatcgcaccattacactccagcctgggcgacaaagcgacactccatctcaaatttaaaaaaaaaaaaaaagaagaagaagaaaactagtgggaaaaaagtgagaggaatacttttttgaaattggtatcggaaggaactggagaagagaaaacaacagtgccaaatgagaaaagaacaggaaacttaatactaattggcatgcaccagatacttttgtgtacatttgcctcttcaatctcccgaagaatcgtacaaaatgtatactttcttcccatgttaagaaaacaggtatagagaacttattcaggactcatagctagtgagtggcaaatcagaattggaatccagagtccatgctgtggtctccttcagcaagagaatcaagctacccagatgattctcttctcattgtttggctttgtaaagtgtcacttagttttgttcccataaatatagaggaagtagttgggttaaagttgtgggatttgcactatgcctatacatttttatttatgccattattttgagaggctgattattgcttttttaaaatgatgcactggtgaagatgtgaaagtaaaattgccacgtggcattatttgccaagaataaatgaaaagggtaaaaaaacaattttttctttttttaaacatttttcagaaaagatacaattaccttttttaataggtgagcgccaccacgcccggctaatttttgcatttttagtgaaaccccatctctactgaaaaatacaaaaattagccaggcatggtggctgtctgtaatcccagctaatggggaggctgaggcacaagaatctcttgaacctgggaggcggaggttgcagtgagccgagatcacaccactgcactccatcctgggcaatggagcgagactctgtctcaaaaaataataaataagatatgattcctgcctgttttatccagttagagagacacactacacatgaaataattggagagcatgtaaatgtttacctattagttcaaacttagaaaaagggaagaatatgttttagttagcaaagtcttaaacaagactgaagtggcaagcactgtagctcacgttttcttttgactcacctttttctttagctccaccttttgtaacttctagatttggggcatgaagttctgccactaaggcataaccagtacccaagtaggaaaggattattgatccctggagtaaagattcctagcttgcggggatctcactattgatcccccggagtaaagattcctagctcgcaggaatcttacttgcacacttagggaaaataccagagggagccactagcaaccgaaaaatgaaggaaagatttaatttctctacccaggtacaaatccaatgcatagtatagtatatgttatatgcagaaagggcactggaggtgtgagagccctttgggtaacagctctgctagttgttaccttcacacttctctttcttcttaatctctggtttctcgtctgaaaaatgagataattggactagattaatagttctcagccttttctagaacaacaaattagattatctctgaagtccttttccaaaatttcatgcttccagtctctccccgtgattgcgtattatccctaggctaattaaaagtgtgctggttaatcagtttctttactttttttttctctcttttttttattctgtgttcaggtatcatttgaccaacaacttgctcttaatcttactgcgatgactgaaatctccaaagaggagagtatagtagttataggtctagt

SEQ ID NO: 75019 - DNA, 6820 bp, Homo sapiens
  misc_feature (3645)..(3645): n is a, c, g, or t
gcagtccgtgtgtgtctgtgttgttgttcggcggcggcggcggcggtaagatggctgcccacgggggctccgcggcgtcctcggcgctgaaggggttaattcaacagttcaccaccattaccggtgcaagtgaaagtgtaggaaaacatatgcttgaagcgtgcaacaataatctggaaatggcagtcactatgtttttggatggtggaggaatcgctgaagagcccagtaccagttcagcaagtgtctctactgtcagaccacacacagaagaagaagttcgtgccccaattcctcaaaagcaggaaatactggtggaaccagaaccattatttggtgctcctaaaagacgacggcctgcacgttcaatttttgatggtttccgggattttcagactgaaactattcggcaagaacaagaattaagaaatggaggagctatcgataagaaattaactacccttgcagatctattccggccacccattgatttgatgcataaaggcagctttgaaacagccaaagagtgtggccagatgcaaaataagtggctgatgataaacattcaaaatgttcaagactttgcatgtcagtgcctcaaccgcgatgtgtggagcaacgaagctgtgaagaatattatccgggaacatttcattttctggcaggtttatcatgacagtgaggaaggtcagagatacatacagttttataagttaggggatttcccctatgtttccatattggacccacggacaggtcagaagctagtagaatggcaccagttagatgtatcttctttcttggaccaagtgacgggatttctgggtgaacatggacaactggatggactttctagcagtccccccaaaaaatgtgcccgttcagagagccttatagatgcaagtgaagacagccagctagaagctgccatcagagcctccttacaagaaacacattttgattcaacacagacaaaacaggatagccgctcagatgaagaatctgaatctgaacttttttctggcagtgaggagttcatatccgtttgtggctctgatgaagaagaagaggtagagaatcttgccaagtccagaaagtctccccacaaagatttggggcatagaaaagaggagaatagaaggccgctgactgagccaccagtcagaactgatcctggaacagccacaaaccaccaaggattgccagctgtggattcagagatactggagatgccacctgaaaaagcagatggagtagtggaggggatagatgtaaatggaccaaaagcacagctgatgttgcggtatccagatggaaaaagggaacagatcactcttccagagcaagctaaactgctagctttggtgaagcacgtgcagtctaaaggatacccaaatgaacgttttgaacttctcaccaactttcctcgaaggaaattatctcatctggactatgatattacattgcaagaggcaggcctttgtcctcaagagactgtctttgtacaggaaagaaattaacaccatggcttgacctctctcagcttaccccttttttcccttttcctgtgagatacatgtcactaagtatgcattttggctcataggaccacagagccaaagttgggcaagcaagtcaccttccttctcttatttcttgatctctcctataatcagtctctttctccccctttgtttctttctcctcttctgttttctcgctccccactccgtacccttctgcctccccctccccccacacttttctttcttacctaatctggtgaccaaactgaagtgtaaggataagacctctcctagtactagcagcaggaattgtgtgttccagtaagtggtctcttgcacggcacttttttgggatcaaatgttaacgttactccccagactcttcgggcaaaggaatggctagattcagagtaagaacaaccctcccttttttgtaagtccccgtgtttagcagggagaagaaattctctaacatgggtttggttttgttgtgttcttcatgtggaaatgtcgcttaacaaaatatccaggcttttgtttacgtggaaaaagcatcccttgtaatgattgctcatcatacttaaaaacctttttcaaaggattttcatgttcccagctataaggactatttccatgacatgtgttattggcagaatgagtgttaaatatggagcatatagcatggggtgactttcattgtcctaacctgagacagttttccttattactctgtattgatcctgctagtccaagaatggacatgaagtgaacctatcgtggtgactgggataggaaggtgcttgctatttttgccagcacagcatattagttcctttggagccctccattgtctgagtctgcagtgatctgtaggaaggcagctggtcaataatcatgtagtacaatggcttggaattgtaaccactatggttattgattgtcctgtgttgtttcaggcatacttaggtatgtccctggggaaaaagaaaaccattcagctgagagttgctaaccatgttcttttggttagaaataatggttcattttttgcccctggttggaatagtctctaaaaggctctggtgactgaattgaacatgagtccgcatgctgttttctttcaaaaggtatcaaaacggaaagcctctctaaggggaagacctttcaactccattcagaagacaacatttagtaaggaggatggcggaggttactagtaattttcagatgtcttgggctttttctgccaacaaaacccaaaatcaaattagagttggtgaaagctttcttcagtgtttttagaagaggccatcttgaatctgtagaataccatttacacatcaacttcaccctatgctcatttcgtattttgagcttaaatggagtcctctgaagggggggtagtcgtgattctggtggcaaaactagaacttttaacttgtaaaatgaaaaatattaaatggacctttttgtcagttgaggatttagattgattcttttatctgaggagcgtatgttcctcagatgttgcgtagagacctttaggttttcatctactttaagattgctctcttggcaattaggggatttgggaaaagaagaaaaaaagatgccatgtgttgctagtacacagttataggatatggtttctaatggttgaattttgaggaactctccctaaagaatgagttttatatctcctcaaggaaatcatggaaaaatctgtttattcttcagtgagtccttttgaattaatgttcttaaatttttttctaagtctgtgtaagtgcttatgtataagtatataattgtataaatatttataaatatatttatataattacggtttcatttctaccttgagtcaaagttctgtctttagattggtgactgagtaatacttacactttggtgttttttcttaggttcttgaggcttacttaactagcagcttctgatttattgagtgaaagatggttttcatgttaattcctcagttgcatctctgaacttggataacatacttgccgtttgaaaaatagagctgtatactgtcaaaggtgcactggagggtaaaacatttgttggtagtagacaagctcagaaatccaaaaattcngggagggcacagggtaagaagagaggtttgctcagctttgtgctctgatggcacccatctgtactccagcaaagtcatagctgaagcccaaatcgctcaaacgtgtgaagtcaatcatttttcctatagggctctgtttccttttctttaccttctagcttctcttgataaaacagttgggagaactgccaacgtgttcatcagtgagagggtgtggttctttccgatatgttcagcacgtgcatattcatttatgagaaaccaaagtaacttcttcaactcgggttactgtgggatgattaagtagatataaagtgatttaaaagacagcatggtactttcactcagcttaacatgcagctgggatgtctacaatacaagatgtggtgggttttattttattttattttgaggcaggagtgtaattatcttagggttgatataaaggcccatgggaagagttacggattgtacatgggaagaatccataaggagtattgccttgctcaagaatttaatccgctgacagtatgcttcttccagtttgccttacttcctctgcaagtttctttgctccttagggcagaggttttattgaatagattaaatgaggtcagtaagattagttaaaaatagtcattccttgtgggtgttggacacagcttgaaaggagtgtttaaaaaaaaaaagctagggaggaaaagaacaagaaagatagacttcgagagtgataagagaaaaatacagggagatggaatggaaactaccaggaaggccgggcgcggtggctcatgcctgtaatcccaacactttgggaggcggaggtgggcagatcacctaaggtcaggagatcgaggccagcctgagcaacatggtgaaaccccgtctctactaaaaatacaaaaattacctgggtgtggtggcgtgcacctgtaatcccagctactcagaggctgaggcaggggaatggcttgaacctgggaggcagaggttgcagtgagccaagatcgcaccattacactccagcctgggcgacaaagcgacactccatctcaaatttaaaaaaaaaaaaaaagaagaagaagaaaactagtgggaaaaaagtgagaggaatacttttttgaaattggtatcggaaggaactggagaagagaaaacaacagtgccaaatgagaaaagaacaggaaacttaatactaattggcatgcaccagatacttttgtgtacatttgcctcttcaatctcccgaagaatcgtacaaaatgtatactttcttcccatgttaagaaaacaggtatagagaacttattcaggactcatagctagtgagtggcaaatcagaattggaatccagagtccatgctgtggtctccttcagcaagagaatcaagctacccagatgattctcttctcattgtttggctttgtaaagtgtcacttagttttgttcccataaatatagaggaagtagttgggttaaagttgtgggatttgcactatgcctatacatttttatttatgccattattttgagaggctgattattgcttttttaaaatgatgcactggtgaagatgtgaaagtaaaattgccacgtggcattatttgccaagaataaatgaaaagggtaaaaaaacaattttttctttttttaaacatttttcagaaaagatacaattaccttttttaataggtgagcgccaccacgcccggctaatttttgcatttttagtagagacagggtttcaccatgttggccaggatggtctcgatctcttgatctcgtgttccgcccacctcggcctcctaaagtgctgggattacaggcatgagccactgcgcccgatctacaattctgttttctgtgtcccatccataccagattattgaaccctctgtgtgtatgtttttaaatcttgtatataattctacttccttgacttacaagtcaacaattagctattgagttctttatagaagttggaagcagggagatggaatggaaattccagcaaggccgggcgcggtggctcatgcctgtaatcccaatattttgggaggccgaggtgggtggatcacctgaggttgggagttcgagatcagcctggccaacatggtgaaaccccatctctactgaaaaatacaaaaattagccaggcatggtggctgtctgtaatcccagctaatggggaggctgaggcacaagaatctcttgaacctgggaggcggaggttgcagtgagccgagatcacaccactgcactccatcctgggcaatggagcgagactctgtctcaaaaaataataaataagatatgattcctgcctgttttatccagttagagagacacactacacatgaaataattggagagcatgtaaatgtttacctattagttcaaacttagaaaaagggaagaatatgttttagttagcaaagtcttaaacaagactgaagtggcaagcactgtagctcacgttttcttttgactcacctttttctttagctccaccttttgtaacttctagatttggggcatgaagttctgccactaaggcataaccagtacccaagtaggaaaggattattgatccctggagtaaagattcctagcttgcggggatctcactattgatcccccggagtaaagattcctagctcgcaggaatcttacttgcacacttagggaaaataccagagggagccactagcaaccgaaaaatgaaggaaagatttaatttctctacccaggtacaaatccaatgcatagtatagtatatgttatatgcagaaagggcactggaggtgtgagagccctttgggtaacagctctgctagttgttaccttcacacttctctttcttcttaatctctggtttctcgtctgaaaaatgagataattggactagattaatagttctcagccttttctagaacaacaaattagattatctctgaagtccttttccaaaatttcatgcttccagtctctccccgtgattgcgtattatccctaggctaattaaaagtgtgctggttaatcagtttctttactttttttttctctcttttttttattctgtgttcaggtatcatttgaccaacaacttgctcttaatcttactgcgatgactgaaatctccaaagaggagagtatagtagttataggtctagt

SEQ ID NO: 75020 - DNA, 6173 bp, Homo sapiens
  misc_feature (3645)..(3645): n is a, c, g, or t
gcagtccgtgtgtgtctgtgttgttgttcggcggcggcggcggcggtaagatggctgcccacgggggctccgcggcgtcctcggcgctgaaggggttaattcaacagttcaccaccattaccggtgcaagtgaaagtgtaggaaaacatatgcttgaagcgtgcaacaataatctggaaatggcagtcactatgtttttggatggtggaggaatcgctgaagagcccagtaccagttcagcaagtgtctctactgtcagaccacacacagaagaagaagttcgtgccccaattcctcaaaagcaggaaatactggtggaaccagaaccattatttggtgctcctaaaagacgacggcctgcacgttcaatttttgatggtttccgggattttcagactgaaactattcggcaagaacaagaattaagaaatggaggagctatcgataagaaattaactacccttgcagatctattccggccacccattgatttgatgcataaaggcagctttgaaacagccaaagagtgtggccagatgcaaaataagtggctgatgataaacattcaaaatgttcaagactttgcatgtcagtgcctcaaccgcgatgtgtggagcaacgaagctgtgaagaatattatccgggaacatttcattttctggcaggtttatcatgacagtgaggaaggtcagagatacatacagttttataagttaggggatttcccctatgtttccatattggacccacggacaggtcagaagctagtagaatggcaccagttagatgtatcttctttcttggaccaagtgacgggatttctgggtgaacatggacaactggatggactttctagcagtccccccaaaaaatgtgcccgttcagagagccttatagatgcaagtgaagacagccagctagaagctgccatcagagcctccttacaagaaacacattttgattcaacacagacaaaacaggatagccgctcagatgaagaatctgaatctgaacttttttctggcagtgaggagttcatatccgtttgtggctctgatgaagaagaagaggtagagaatcttgccaagtccagaaagtctccccacaaagatttggggcatagaaaagaggagaatagaaggccgctgactgagccaccagtcagaactgatcctggaacagccacaaaccaccaaggattgccagctgtggattcagagatactggagatgccacctgaaaaagcagatggagtagtggaggggatagatgtaaatggaccaaaagcacagctgatgttgcggtatccagatggaaaaagggaacagatcactcttccagagcaagctaaactgctagctttggtgaagcacgtgcagtctaaaggatacccaaatgaacgttttgaacttctcaccaactttcctcgaaggaaattatctcatctggactatgatattacattgcaagaggcaggcctttgtcctcaagagactgtctttgtacaggaaagaaattaacaccatggcttgacctctctcagcttaccccttttttcccttttcctgtgagatacatgtcactaagtatgcattttggctcataggaccacagagccaaagttgggcaagcaagtcaccttccttctcttatttcttgatctctcctataatcagtctctttctccccctttgtttctttctcctcttctgttttctcgctccccactccgtacccttctgcctccccctccccccacacttttctttcttacctaatctggtgaccaaactgaagtgtaaggataagacctctcctagtactagcagcaggaattgtgtgttccagtaagtggtctcttgcacggcacttttttgggatcaaatgttaacgttactccccagactcttcgggcaaaggaatggctagattcagagtaagaacaaccctcccttttttgtaagtccccgtgtttagcagggagaagaaattctctaacatgggtttggttttgttgtgttcttcatgtggaaatgtcgcttaacaaaatatccaggcttttgtttacgtggaaaaagcatcccttgtaatgattgctcatcatacttaaaaacctttttcaaaggattttcatgttcccagctataaggactatttccatgacatgtgttattggcagaatgagtgttaaatatggagcatatagcatggggtgactttcattgtcctaacctgagacagttttccttattactctgtattgatcctgctagtccaagaatggacatgaagtgaacctatcgtggtgactgggataggaaggtgcttgctatttttgccagcacagcatattagttcctttggagccctccattgtctgagtctgcagtgatctgtaggaaggcagctggtcaataatcatgtagtacaatggcttggaattgtaaccactatggttattgattgtcctgtgttgtttcaggcatacttaggtatgtccctggggaaaaagaaaaccattcagctgagagttgctaaccatgttcttttggttagaaataatggttcattttttgcccctggttggaatagtctctaaaaggctctggtgactgaattgaacatgagtccgcatgctgttttctttcaaaaggtatcaaaacggaaagcctctctaaggggaagacctttcaactccattcagaagacaacatttagtaaggaggatggcggaggttactagtaattttcagatgtcttgggctttttctgccaacaaaacccaaaatcaaattagagttggtgaaagctttcttcagtgtttttagaagaggccatcttgaatctgtagaataccatttacacatcaacttcaccctatgctcatttcgtattttgagcttaaatggagtcctctgaagggggggtagtcgtgattctggtggcaaaactagaacttttaacttgtaaaatgaaaaatattaaatggacctttttgtcagttgaggatttagattgattcttttatctgaggagcgtatgttcctcagatgttgcgtagagacctttaggttttcatctactttaagattgctctcttggcaattaggggatttgggaaaagaagaaaaaaagatgccatgtgttgctagtacacagttataggatatggtttctaatggttgaattttgaggaactctccctaaagaatgagttttatatctcctcaaggaaatcatggaaaaatctgtttattcttcagtgagtccttttgaattaatgttcttaaatttttttctaagtctgtgtaagtgcttatgtataagtatataattgtataaatatttataaatatatttatataattacggtttcatttctaccttgagtcaaagttctgtctttagattggtgactgagtaatacttacactttggtgttttttcttaggttcttgaggcttacttaactagcagcttctgatttattgagtgaaagatggttttcatgttaattcctcagttgcatctctgaacttggataacatacttgccgtttgaaaaatagagctgtatactgtcaaaggtgcactggagggtaaaacatttgttggtagtagacaagctcagaaatccaaaaattcngggagggcacagggtaagaagagaggtttgctcagctttgtgctctgatggcacccatctgtactccagcaaagtcatagctgaagcccaaatcgctcaaacgtgtgaagtcaatcatttttcctatagggctctgtttccttttctttaccttctagcttctcttgataaaacagttgggagaactgccaacgtgttcatcagtgagagggtgtggttctttccgatatgttcagcacgtgcatattcatttatgagaaaccaaagtaacttcttcaactcgggttactgtgggatgattaagtagatataaagtgatttaaaagacagcatggtactttcactcagcttaacatgcagctgggatgtctacaatacaagatgtggtgggttttattttattttattttgaggcaggagtgtaattatcttagggttgatataaaggcccatgggaagagttacggattgtacatgggaagaatccataaggagtattgccttgctcaagaatttaatccgctgacagtatgcttcttccagtttgccttacttcctctgcaagtttctttgctccttagggcagaggttttattgaatagattaaatgaggtcagtaagattagttaaaaatagtcattccttgtgggtgttggacacagcttgaaaggagtgtttaaaaaaaaaaagctagggaggaaaagaacaagaaagatagacttcgagagtgataagagaaaaatacagggagatggaatggaaactaccaggaaggccgggcgcggtggctcatgcctgtaatcccaacactttgggaggcggaggtgggcagatcacctaaggtcaggagatcgaggccagcctgagcaacatggtgaaaccccgtctctactaaaaatacaaaaattacctgggtgtggtggcgtgcacctgtaatcccagctactcagaggctgaggcaggggaatggcttgaacctgggaggcagaggttgcagtgagccaagatcgcaccattacactccagcctgggcgacaaagcgacactccatctcaaatttaaaaaaaaaaaaaaagaagaagaagaaaactagtgggaaaaaagtgagaggaatacttttttgaaattggtatcggaaggaactggagaagagaaaacaacagtgccaaatgagaaaagaacaggaaacttaatactaattggcatgcaccagatacttttgtgtacatttgcctcttcaatctcccgaagaatcgtacaaaatgtatactttcttcccatgttaagaaaacaggtatagagaacttattcaggactcatagctagtgagtggcaaatcagaattggaatccagagtccatgctgtggtctccttcagcaagagaatcaagctacccagatgattctcttctcattgtttggctttgtaaagtgtcacttagttttgttcccataaatatagaggaagtagttgggttaaagttgtgggatttgcactatgcctatacatttttatttatgccattattttgagaggctgattattgcttttttaaaatgatgcactggtgaagatgtgaaagtaaaattgccacgtggcattatttgccaagaataaatgaaaagggtaaaaaaacaattttttctttttttaaacatttttcagaaaagatacaattaccttttttaataggtgagcgccaccacgcccggctaatttttgcatttttagtgaaaccccatctctactgaaaaatacaaaaattagccaggcatggtggctgtctgtaatcccagctaatggggaggctgaggcacaagaatctcttgaacctgggaggcggaggttgcagtgagccgagatcacaccactgcactccatcctgggcaatggagcgagactctgtctcaaaaaataataaataagatatgattcctgcctgttttatccagttagagagacacactacacatgaaataattggagagcatgtaaatgtttacctattagttcaaacttagaaaaagggaagaatatgttttagttagcaaagtcttaaacaagactgaagtggcaagcactgtagctcacgttttcttttgactcacctttttctttagctccaccttttgtaacttctagatttggggcatgaagttctgccactaaggcataaccagtacccaagtaggaaaggattattgatccctggagtaaagattcctagcttgcggggatctcactattgatcccccggagtaaagattcctagctcgcaggaatcttacttgcacacttagggaaaataccagagggagccactagcaaccgaaaaatgaaggaaagatttaatttctctacccaggtacaaatccaatgcatagtatagtatatgttatatgcagaaagggcactggaggtgtgagagccctttgggtaacagctctgctagttgttaccttcacacttctctttcttcttaatctctggtcgacgcggccgcgaatttagtagtagtaggggccgc

SEQ ID NO: 75021 - DNA, 6225 bp, Homo sapiens
  misc_feature (3435)..(3435): n is a, c, g, or t
ttcttgtgtatccccccgctgtacagttcatgcaagttcctactgtcagaccatacacagaagaagaagttcgtgccccaattcctcaaaagcaggaaatactggtggaaccagaaccattatttggtgctcctaaaagacgacggcctgcacgttcaatttttgatggtttccgggattttcagactgaaactattcggcaagaacaagaattaagaaatggaggagctatcgataagaaattaactacccttgcagatctattccggccacccattgatttgatgcataaaggcagctttgaaacagccaaagagtgtggccagatgcaaaataagtggctgatgataaacattcaaaatgttcaagactttgcatgtcagtgcctcaaccgcgatgtgtggagcaacgaagctgtgaagaatattatccgggaacatttcattttctggcaggtttatcatgacagtgaggaaggtcagagatacatacagttttataagttaggggatttcccctatgtttccatattggacccacggacaggtcagaagctagtagaatggcaccagttagatgtatcttctttcttggaccaagtgacgggatttctgggtgaacatggacaactggatggactttctagcagtccccccaaaaaatgtgcccgttcagagagccttatagatgcaagtgaagacagccagctagaagctgccatcagagcctccttacaagaaacacattttgattcaacacagacaaaacaggatagccgctcagatgaagaatctgaatctgaacttttttctggcagtgaggagttcatatccgtttgtggctctgatgaagaagaagaggtagagaatcttgccaagtccagaaagtctccccacaaagatttggggcatagaaaagaggagaatagaaggccgctgactgagccaccagtcagaactgatcctggaacagccacaaaccaccaaggattgccagctgtggattcagagatactggagatgccacctgaaaaagcagatggagtagtggaggggatagatgtaaatggaccaaaagcacagctgatgttgcggtatccagatggaaaaagggaacagatcactcttccagagcaagctaaactgctagctttggtgaagcacgtgcagtctaaaggatacccaaatgaacgttttgaacttctcaccaactttcctcgaaggaaattatctcatctggactatgatattacattgcaagaggcaggcctttgtcctcaagagactgtctttgtacaggaaagaaattaacaccatggcttgacctctctcagcttaccccttttttcccttttcctgtgagatacatgtcactaagtatgcattttggctcataggaccacagagccaaagttgggcaagcaagtcaccttccttctcttatttcttgatctctcctataatcagtctctttctccccctttgtttctttctcctcttctgttttctcgctccccactccgtacccttctgcctccccctccccccacacttttctttcttacctaatctggtgaccaaactgaagtgtaaggataagacctctcctagtactagcagcaggaattgtgtgttccagtaagtggtctcttgcacggcacttttttgggatcaaatgttaacgttactccccagactcttcgggcaaaggaatggctagattcagagtaagaacaaccctcccttttttgtaagtccccgtgtttagcagggagaagaaattctctaacatgggtttggttttgttgtgttcttcatgtggaaatgtcgcttaacaaaatatccaggcttttgtttacgtggaaaaagcatcccttgtaatgattgctcatcatacttaaaaacctttttcaaaggattttcatgttcccagctataaggactatttccatgacatgtgttattggcagaatgagtgttaaatatggagcatatagcatggggtgactttcattgtcctaacctgagacagttttccttattactctgtattgatcctgctagtccaagaatggacatgaagtgaacctatcgtggtgactgggataggaaggtgcttgctatttttgccagcacagcatattagttcctttggagccctccattgtctgagtctgcagtgatctgtaggaaggcagctggtcaataatcatgtagtacaatggcttggaattgtaaccactatggttattgattgtcctgtgttgtttcaggcatacttaggtatgtccctggggaaaaagaaaaccattcagctgagagttgctaaccatgttcttttggttagaaataatggttcattttttgcccctggttggaatagtctctaaaaggctctggtgactgaattgaacatgagtccgcatgctgttttctttcaaaaggtatcaaaacggaaagcctctctaaggggaagacctttcaactccattcagaagacaacatttagtaaggaggatggcggaggttactagtaattttcagatgtcttgggctttttctgccaacaaaacccaaaatcaaattagagttggtgaaagctttcttcagtgtttttagaagaggccatcttgaatctgtagaataccatttacacatcaacttcaccctatgctcatttcgtattttgagcttaaatggagtcctctgaagggggggtagtcgtgattctggtggcaaaactagaacttttaacttgtaaaatgaaaaatattaaatggacctttttgtcagttgaggatttagattgattcttttatctgaggagcgtatgttcctcagatgttgcgtagagacctttaggttttcatctactttaagattgctctcttggcaattaggggatttgggaaaagaagaaaaaaagatgccatgtgttgctagtacacagttataggatatggtttctaatggttgaattttgaggaactctccctaaagaatgagttttatatctcctcaaggaaatcatggaaaaatctgtttattcttcagtgagtccttttgaattaatgttcttaaatttttttctaagtctgtgtaagtgcttatgtataagtatataattgtataaatatttataaatatatttatataattacggtttcatttctaccttgagtcaaagttctgtctttagattggtgactgagtaatacttacactttggtgttttttcttaggttcttgaggcttacttaactagcagcttctgatttattgagtgaaagatggttttcatgttaattcctcagttgcatctctgaacttggataacatacttgccgtttgaaaaatagagctgtatactgtcaaaggtgcactggagggtaaaacatttgttggtagtagacaagctcagaaatccaaaaattcngggagggcacagggtaagaagagaggtttgctcagctttgtgctctgatggcacccatctgtactccagcaaagtcatagctgaagcccaaatcgctcaaacgtgtgaagtcaatcatttttcctatagggctctgtttccttttctttaccttctagcttctcttgataaaacagttgggagaactgccaacgtgttcatcagtgagagggtgtggttctttccgatatgttcagcacgtgcatattcatttatgagaaaccaaagtaacttcttcaactcgggttactgtgggatgattaagtagatataaagtgatttaaaagacagcatggtactttcactcagcttaacatgcagctgggatgtctacaatacaagatgtggtgggttttattttattttattttgaggcaggagtgtaattatcttagggttgatataaaggcccatgggaagagttacggattgtacatgggaagaatccataaggagtattgccttgctcaagaatttaatccgctgacagtatgcttcttccagtttgccttacttcctctgcaagtttctttgctccttagggcagaggttttattgaatagattaaatgaggtcagtaagattagttaaaaatagtcattccttgtgggtgttggacacagcttgaaaggagtgtttaaaaaaaaaaagctagggaggaaaagaacaagaaagatagacttcgagagtgataagagaaaaatacagggagatggaatggaaactaccaggaaggccgggcgcggtggctcatgcctgtaatcccaacactttgggaggcggaggtgggcagatcacctaaggtcaggagatcgaggccagcctgagcaacatggtgaaaccccgtctctactaaaaatacaaaaattacctgggtgtggtggcgtgcacctgtaatcccagctactcagaggctgaggcaggggaatggcttgaacctgggaggcagaggttgcagtgagccaagatcgcaccattacactccagcctgggcgacaaagcgacactccatctcaaatttaaaaaaaaaaaaaaagaagaagaagaaaactagtgggaaaaaagtgagaggaatacttttttgaaattggtatcggaaggaactggagaagagaaaacaacagtgccaaatgagaaaagaacaggaaacttaatactaattggcatgcaccagatacttttgtgtacatttgcctcttcaatctcccgaagaatcgtacaaaatgtatactttcttcccatgttaagaaaacaggtatagagaacttattcaggactcatagctagtgagtggcaaatcagaattggaatccagagtccatgctgtggtctccttcagcaagagaatcaagctacccagatgattctcttctcattgtttggctttgtaaagtgtcacttagttttgttcccataaatatagaggaagtagttgggttaaagttgtgggatttgcactatgcctatacatttttatttatgccattattttgagaggctgattattgcttttttaaaatgatgcactggtgaagatgtgaaagtaaaattgccacgtggcattatttgccaagaataaatgaaaagggtaaaaaaacaattttttctttttttaaacatttttcagaaaagatacaattaccttttttaataggtgagcgccaccacgcccggctaatttttgcatttttagtgaaaccccatctctactgaaaaatacaaaaattagccaggcatggtggctgtctgtaatcccagctaatggggaggctgaggcacaagaatctcttgaacctgggaggcggaggttgcagtgagccgagatcacaccactgcactccatcctgggcaatggagcgagactctgtctcaaaaaataataaataagatatgattcctgcctgttttatccagttagagagacacactacacatgaaataattggagagcatgtaaatgtttacctattagttcaaacttagaaaaagggaagaatatgttttagttagcaaagtcttaaacaagactgaagtggcaagcactgtagctcacgttttcttttgactcacctttttctttagctccaccttttgtaacttctagatttggggcatgaagttctgccactaaggcataaccagtacccaagtaggaaaggattattgatccctggagtaaagattcctagcttgcggggatctcactattgatcccccggagtaaagattcctagctcgcaggaatcttacttgcacacttagggaaaataccagagggagccactagcaaccgaaaaatgaaggaaagatttaatttctctacccaggtacaaatccaatgcatagtatagtatatgttatatgcagaaagggcactggaggtgtgagagccctttgggtaacagctctgctagttgttaccttcacacttctctttcttcttaatctctggtttctcgtctgaaaaatgagataattggactagattaatagttctcagccttttctagaacaacaaattagattatctctgaagtccttttccaaaatttcatgcttccagtctctccccgtgattgcgtattatccctaggctaattaaaagtgtgctggttaatcagtttctttactttttttttctctcttttttttattctgtgttcaggtatcatttgaccaacaacttgctcttaatcttactgcgatgactgaaatctccaaagaggagagtatagtagttataggtctagt

SEQ ID NO: 75022 - DNA, 3377 bp, Homo sapiens
gcagtccgtgtgtgtctgtgttgttgttcggcggcggcggcggcggtaagatggctgcccacgggggctccgcggcgtcctcggcgctgaaggggttaattcaacagttcaccaccattaccggtgcaagtgaaagtgtaggaaaacatatgcttgaagcgtgcaacaataatctggaaatggcagtcactatgtttttggatggtggaggaatcgctgaagagcccagtaccagttcagcaagtgtctctactgtcagaccacacacagaagaagaagttcgtgccccaattcctcaaaagcaggaaatactggtggaaccagaaccattatttggtgctcctaaaagacgacggcctgcacgttcaatttttgatggtttccgggattttcagactgaaactattcggcaagaacaagaattaagaaatggaggagctatcgataagaaattaactacccttgcagatctattccggccacccattgatttgatgcataaaggcagctttgaaacagccaaagagtgtggccagatgcaaaataagtggctgatgataaacattcaaaatgttcaagactttgcatgtcagtgcctcaaccgcgatgtgtggagcaacgaagctgtgaagaatattatccgggaacatttcattttctggcaggtttatcatgacagtgaggaaggtcagagatacatacagttttataagttaggggatttcccctatgtttccatattggacccacggacaggtcagaagctagtagaatggcaccagttagatgtatcttctttcttggaccaagtgacgggatttctgggtgaacatggacaactggatggactttctagcagtccccccaaaaaatgtgcccgttcagagagccttatagatgcaagtgaagacagccagctagaagctgccatcagagcctccttacaagaaacacattttgattcaacacagacaaaacaggatagccgctcagatgaagaatctgaatctgaacttttttctggcagtgaggagttcatatccgtttgtggctctgatgaagaagaagaggtagagaatcttgccaagtccagaaagtctccccacaaagatttggggcatagaaaagaggagaatagaaggccgctgactgagccaccagtcagaactgatcctggaacagccacaaaccaccaaggattgccagctgtggattcagagatactggagatgccacctgaaaaagcagatggagtagtggaggggatagatgtaaatggaccaaaagcacagctgatgttgcggtatccagatggaaaaagggaacagatcactcttccagagcaagctaaactgctagctttggtgaagcacgtgcagtctaaaggatacccaaatgaacgttttgaacttctcaccaactttcctcgaaggaaattatctcatctggactatgatattacattgcaagaggcaggcctttgtcctcaagagactgtctttgtacaggaaagaaattaacaccatggcttgacctctctcagcttaccccttttttcccttttcctgtgagatacatgtcactaagtatgcattttggctcataggaccacagagccaaagttgggcaagcaagtcaccttccttctcttatttcttgatctctcctataatcagtctctttctccccctttgtttctttctcctcttctgttttctcgctccccactccgtacccttctgcctccccctccccccacacttttctttcttacctaatctggtgaccaaactgaagtgtaaggataagacctctcctagtactagcagcaggaattgtgtgttccagtaagtggtctcttgcacggcacttttttgggatcaaatgttaacgttactccccagactcttcgggcaaaggaatggctagattcagagtaagaacaaccctcccttttttgtaagtccccgtgtttagcagggagaagaaattctctaacatgggtttggttttgttgtgttcttcatgtggaaatgtcgcttaacaaaatatccaggcttttgtttacgtggaaaaagcatcccttgtaatgattgctcatcatacttaaaaacctttttcaaaggattttcatgttcccagctataaggactatttccatgacatgtgttattggcagaatgagtgttaaatatggagcatatagcatggggtgactttcattgtcctaacctgagacagttttccttattactctgtattgatcctgctagtccaagaatggacatgaagtgaacctatcgtggtgactgggataggaaggtgcttgctatttttgccagcacagcatattagttcctttggagccctccattgtctgagtctgcagtgatctgtaggaaggcagctggtcaataatcatgtagtacaatggcttggaattgtaaccactatggttattgattgtcctgtgttgtttcaggcatacttaggtatgtccctggggaaaaagaaaaccattcagctgagagttgctaaccatgttcttttggttagaaataatggttcattttttgcccctggttggaatagtctctaaaaggctctggtgactgaattgaacatgagtccgcatgctgttttctttcaaaaggtatcaaaacggaaagcctctctaaggggaagacctttcaactccattcagaagacaacatttagtaaggaggatggcggaggttactagtaattttcagatgtcttgggctttttctgccaacaaaacccaaaatcaaattagagttggtgaaagctttcttcagtgtttttagaagaggccatcttgaatctgtagaataccatttacacatcaacttcaccctatgctcatttcgtattttgagcttaaatggagtcctctgaagggggggtagtcgtgattctggtggcaaaactagaacttttaacttgtaaaatgaaaaatattaaatggacctttttgtcagttgaggatttagattgattcttttatctgaggagcgtatgttcctcagatgttgcgtagagacctttaggttttcatctactttaagattgctctcttggcaattaggggatttgggaaaagaagaaaaaaagatgccatgtgttgctagtacacagttataggatatggtttctaatggttgaattttgaggaactctccctaaagaatgagttttatatctcctcaaggaaatcatggaaaaatctgtttattcttcagtgagtccttttgaattaatgttcttaaatttttttctaagtctgtgtaagtgcttatgtataagtatataattgtataaatatttataaatatatttatataattacggtttca

SEQ ID NO: 75023 - DNA, 5281 bp, Homo sapiens
  misc_feature (2491)..(2491): n is a, c, g, or t
accacttaatggaacacacaattcctgctgctagtactaggagaggtctgatccttacacttcagtttggtcaccagattaggtaagaaagaaaagtgtggggggagggggatagatgtaaatggaccaaaagcacagctgatgttgcggtatccagatggaaaaagggaacagatcactcttccagagcaagctaaactgctagctttggtgaagcacgtgcagtctaaaggatacccaaatgaacgttttgaacttctcaccaactttcctcgaaggaaattatctcatctggactatgatattacattgcaagaggcaggcctttgtcctcaagagactgtctttgtacaggaaagaaattaacaccatggcttgacctctctcagcttaccccttttttcccttttcctgtgagatacatgtcactaagtatgcattttggctcataggaccacagagccaaagttgggcaagcaagtcaccttccttctcttatttcttgatctctcctataatcagtctctttctccccctttgtttctttctcctcttctgttttctcgctccccactccgtacccttctgcctccccctccccccacacttttctttcttacctaatctggtgaccaaactgaagtgtaaggataagacctctcctagtactagcagcaggaattgtgtgttccagtaagtggtctcttgcacggcacttttttgggatcaaatgttaacgttactccccagactcttcgggcaaaggaatggctagattcagagtaagaacaaccctcccttttttgtaagtccccgtgtttagcagggagaagaaattctctaacatgggtttggttttgttgtgttcttcatgtggaaatgtcgcttaacaaaatatccaggcttttgtttacgtggaaaaagcatcccttgtaatgattgctcatcatacttaaaaacctttttcaaaggattttcatgttcccagctataaggactatttccatgacatgtgttattggcagaatgagtgttaaatatggagcatatagcatggggtgactttcattgtcctaacctgagacagttttccttattactctgtattgatcctgctagtccaagaatggacatgaagtgaacctatcgtggtgactgggataggaaggtgcttgctatttttgccagcacagcatattagttcctttggagccctccattgtctgagtctgcagtgatctgtaggaaggcagctggtcaataatcatgtagtacaatggcttggaattgtaaccactatggttattgattgtcctgtgttgtttcaggcatacttaggtatgtccctggggaaaaagaaaaccattcagctgagagttgctaaccatgttcttttggttagaaataatggttcattttttgcccctggttggaatagtctctaaaaggctctggtgactgaattgaacatgagtccgcatgctgttttctttcaaaaggtatcaaaacggaaagcctctctaaggggaagacctttcaactccattcagaagacaacatttagtaaggaggatggcggaggttactagtaattttcagatgtcttgggctttttctgccaacaaaacccaaaatcaaattagagttggtgaaagctttcttcagtgtttttagaagaggccatcttgaatctgtagaataccatttacacatcaacttcaccctatgctcatttcgtattttgagcttaaatggagtcctctgaagggggggtagtcgtgattctggtggcaaaactagaacttttaacttgtaaaatgaaaaatattaaatggacctttttgtcagttgaggatttagattgattcttttatctgaggagcgtatgttcctcagatgttgcgtagagacctttaggttttcatctactttaagattgctctcttggcaattaggggatttgggaaaagaagaaaaaaagatgccatgtgttgctagtacacagttataggatatggtttctaatggttgaattttgaggaactctccctaaagaatgagttttatatctcctcaaggaaatcatggaaaaatctgtttattcttcagtgagtccttttgaattaatgttcttaaatttttttctaagtctgtgtaagtgcttatgtataagtatataattgtataaatatttataaatatatttatataattacggtttcatttctaccttgagtcaaagttctgtctttagattggtgactgagtaatacttacactttggtgttttttcttaggttcttgaggcttacttaactagcagcttctgatttattgagtgaaagatggttttcatgttaattcctcagttgcatctctgaacttggataacatacttgccgtttgaaaaatagagctgtatactgtcaaaggtgcactggagggtaaaacatttgttggtagtagacaagctcagaaatccaaaaattcngggagggcacagggtaagaagagaggtttgctcagctttgtgctctgatggcacccatctgtactccagcaaagtcatagctgaagcccaaatcgctcaaacgtgtgaagtcaatcatttttcctatagggctctgtttccttttctttaccttctagcttctcttgataaaacagttgggagaactgccaacgtgttcatcagtgagagggtgtggttctttccgatatgttcagcacgtgcatattcatttatgagaaaccaaagtaacttcttcaactcgggttactgtgggatgattaagtagatataaagtgatttaaaagacagcatggtactttcactcagcttaacatgcagctgggatgtctacaatacaagatgtggtgggttttattttattttattttgaggcaggagtgtaattatcttagggttgatataaaggcccatgggaagagttacggattgtacatgggaagaatccataaggagtattgccttgctcaagaatttaatccgctgacagtatgcttcttccagtttgccttacttcctctgcaagtttctttgctccttagggcagaggttttattgaatagattaaatgaggtcagtaagattagttaaaaatagtcattccttgtgggtgttggacacagcttgaaaggagtgtttaaaaaaaaaaagctagggaggaaaagaacaagaaagatagacttcgagagtgataagagaaaaatacagggagatggaatggaaactaccaggaaggccgggcgcggtggctcatgcctgtaatcccaacactttgggaggcggaggtgggcagatcacctaaggtcaggagatcgaggccagcctgagcaacatggtgaaaccccgtctctactaaaaatacaaaaattacctgggtgtggtggcgtgcacctgtaatcccagctactcagaggctgaggcaggggaatggcttgaacctgggaggcagaggttgcagtgagccaagatcgcaccattacactccagcctgggcgacaaagcgacactccatctcaaatttaaaaaaaaaaaaaaagaagaagaagaaaactagtgggaaaaaagtgagaggaatacttttttgaaattggtatcggaaggaactggagaagagaaaacaacagtgccaaatgagaaaagaacaggaaacttaatactaattggcatgcaccagatacttttgtgtacatttgcctcttcaatctcccgaagaatcgtacaaaatgtatactttcttcccatgttaagaaaacaggtatagagaacttattcaggactcatagctagtgagtggcaaatcagaattggaatccagagtccatgctgtggtctccttcagcaagagaatcaagctacccagatgattctcttctcattgtttggctttgtaaagtgtcacttagttttgttcccataaatatagaggaagtagttgggttaaagttgtgggatttgcactatgcctatacatttttatttatgccattattttgagaggctgattattgcttttttaaaatgatgcactggtgaagatgtgaaagtaaaattgccacgtggcattatttgccaagaataaatgaaaagggtaaaaaaacaattttttctttttttaaacatttttcagaaaagatacaattaccttttttaataggtgagcgccaccacgcccggctaatttttgcatttttagtgaaaccccatctctactgaaaaatacaaaaattagccaggcatggtggctgtctgtaatcccagctaatggggaggctgaggcacaagaatctcttgaacctgggaggcggaggttgcagtgagccgagatcacaccactgcactccatcctgggcaatggagcgagactctgtctcaaaaaataataaataagatatgattcctgcctgttttatccagttagagagacacactacacatgaaataattggagagcatgtaaatgtttacctattagttcaaacttagaaaaagggaagaatatgttttagttagcaaagtcttaaacaagactgaagtggcaagcactgtagctcacgttttcttttgactcacctttttctttagctccaccttttgtaacttctagatttggggcatgaagttctgccactaaggcataaccagtacccaagtaggaaaggattattgatccctggagtaaagattcctagcttgcggggatctcactattgatcccccggagtaaagattcctagctcgcaggaatcttacttgcacacttagggaaaataccagagggagccactagcaaccgaaaaatgaaggaaagatttaatttctctacccaggtacaaatccaatgcatagtatagtatatgttatatgcagaaagggcactggaggtgtgagagccctttgggtaacagctctgctagttgttaccttcacacttctctttcttcttaatctctggtttctcgtctgaaaaatgagataattggactagattaatagttctcagccttttctagaacaacaaattagattatctctgaagtccttttccaaaatttcatgcttccagtctctccccgtgattgcgtattatccctaggctaattaaaagtgtgctggttaatcagtttctttactttttttttctctcttttttttattctgtgttcaggtatcatttgaccaacaacttgctcttaatcttactgcgatgactgaaatctccaaagaggagagtatagtagttataggtctagt

SEQ ID NO: 75024 - DNA, 5084 bp, Homo sapiens
  misc_feature (2294)..(2294): n is a, c, g, or t
ccggtccgtacatttgggtatcctttaactgcacgtgcttcacaaagctagcagtttagctgctctggaagagtgatctgttccctttttccatctggactatgatattacattgcaagaggcaggcctttgtcctcaagagactgtctttgtacaggaaagaaattaacaccatggcttgacctctctcagcttaccccttttttcccttttcctgtgagatacatgtcactaagtatgcattttggctcataggaccacagagccaaagttgggcaagcaagtcaccttccttctcttatttcttgatctctcctataatcagtctctttctccccctttgtttctttctcctcttctgttttctcgctccccactccgtacccttctgcctccccctccccccacacttttctttcttacctaatctggtgaccaaactgaagtgtaaggataagacctctcctagtactagcagcaggaattgtgtgttccagtaagtggtctcttgcacggcacttttttgggatcaaatgttaacgttactccccagactcttcgggcaaaggaatggctagattcagagtaagaacaaccctcccttttttgtaagtccccgtgtttagcagggagaagaaattctctaacatgggtttggttttgttgtgttcttcatgtggaaatgtcgcttaacaaaatatccaggcttttgtttacgtggaaaaagcatcccttgtaatgattgctcatcatacttaaaaacctttttcaaaggattttcatgttcccagctataaggactatttccatgacatgtgttattggcagaatgagtgttaaatatggagcatatagcatggggtgactttcattgtcctaacctgagacagttttccttattactctgtattgatcctgctagtccaagaatggacatgaagtgaacctatcgtggtgactgggataggaaggtgcttgctatttttgccagcacagcatattagttcctttggagccctccattgtctgagtctgcagtgatctgtaggaaggcagctggtcaataatcatgtagtacaatggcttggaattgtaaccactatggttattgattgtcctgtgttgtttcaggcatacttaggtatgtccctggggaaaaagaaaaccattcagctgagagttgctaaccatgttcttttggttagaaataatggttcattttttgcccctggttggaatagtctctaaaaggctctggtgactgaattgaacatgagtccgcatgctgttttctttcaaaaggtatcaaaacggaaagcctctctaaggggaagacctttcaactccattcagaagacaacatttagtaaggaggatggcggaggttactagtaattttcagatgtcttgggctttttctgccaacaaaacccaaaatcaaattagagttggtgaaagctttcttcagtgtttttagaagaggccatcttgaatctgtagaataccatttacacatcaacttcaccctatgctcatttcgtattttgagcttaaatggagtcctctgaagggggggtagtcgtgattctggtggcaaaactagaacttttaacttgtaaaatgaaaaatattaaatggacctttttgtcagttgaggatttagattgattcttttatctgaggagcgtatgttcctcagatgttgcgtagagacctttaggttttcatctactttaagattgctctcttggcaattaggggatttgggaaaagaagaaaaaaagatgccatgtgttgctagtacacagttataggatatggtttctaatggttgaattttgaggaactctccctaaagaatgagttttatatctcctcaaggaaatcatggaaaaatctgtttattcttcagtgagtccttttgaattaatgttcttaaatttttttctaagtctgtgtaagtgcttatgtataagtatataattgtataaatatttataaatatatttatataattacggtttcatttctaccttgagtcaaagttctgtctttagattggtgactgagtaatacttacactttggtgttttttcttaggttcttgaggcttacttaactagcagcttctgatttattgagtgaaagatggttttcatgttaattcctcagttgcatctctgaacttggataacatacttgccgtttgaaaaatagagctgtatactgtcaaaggtgcactggagggtaaaacatttgttggtagtagacaagctcagaaatccaaaaattcngggagggcacagggtaagaagagaggtttgctcagctttgtgctctgatggcacccatctgtactccagcaaagtcatagctgaagcccaaatcgctcaaacgtgtgaagtcaatcatttttcctatagggctctgtttccttttctttaccttctagcttctcttgataaaacagttgggagaactgccaacgtgttcatcagtgagagggtgtggttctttccgatatgttcagcacgtgcatattcatttatgagaaaccaaagtaacttcttcaactcgggttactgtgggatgattaagtagatataaagtgatttaaaagacagcatggtactttcactcagcttaacatgcagctgggatgtctacaatacaagatgtggtgggttttattttattttattttgaggcaggagtgtaattatcttagggttgatataaaggcccatgggaagagttacggattgtacatgggaagaatccataaggagtattgccttgctcaagaatttaatccgctgacagtatgcttcttccagtttgccttacttcctctgcaagtttctttgctccttagggcagaggttttattgaatagattaaatgaggtcagtaagattagttaaaaatagtcattccttgtgggtgttggacacagcttgaaaggagtgtttaaaaaaaaaaagctagggaggaaaagaacaagaaagatagacttcgagagtgataagagaaaaatacagggagatggaatggaaactaccaggaaggccgggcgcggtggctcatgcctgtaatcccaacactttgggaggcggaggtgggcagatcacctaaggtcaggagatcgaggccagcctgagcaacatggtgaaaccccgtctctactaaaaatacaaaaattacctgggtgtggtggcgtgcacctgtaatcccagctactcagaggctgaggcaggggaatggcttgaacctgggaggcagaggttgcagtgagccaagatcgcaccattacactccagcctgggcgacaaagcgacactccatctcaaatttaaaaaaaaaaaaaaagaagaagaagaaaactagtgggaaaaaagtgagaggaatacttttttgaaattggtatcggaaggaactggagaagagaaaacaacagtgccaaatgagaaaagaacaggaaacttaatactaattggcatgcaccagatacttttgtgtacatttgcctcttcaatctcccgaagaatcgtacaaaatgtatactttcttcccatgttaagaaaacaggtatagagaacttattcaggactcatagctagtgagtggcaaatcagaattggaatccagagtccatgctgtggtctccttcagcaagagaatcaagctacccagatgattctcttctcattgtttggctttgtaaagtgtcacttagttttgttcccataaatatagaggaagtagttgggttaaagttgtgggatttgcactatgcctatacatttttatttatgccattattttgagaggctgattattgcttttttaaaatgatgcactggtgaagatgtgaaagtaaaattgccacgtggcattatttgccaagaataaatgaaaagggtaaaaaaacaattttttctttttttaaacatttttcagaaaagatacaattaccttttttaataggtgagcgccaccacgcccggctaatttttgcatttttagtgaaaccccatctctactgaaaaatacaaaaattagccaggcatggtggctgtctgtaatcccagctaatggggaggctgaggcacaagaatctcttgaacctgggaggcggaggttgcagtgagccgagatcacaccactgcactccatcctgggcaatggagcgagactctgtctcaaaaaataataaataagatatgattcctgcctgttttatccagttagagagacacactacacatgaaataattggagagcatgtaaatgtttacctattagttcaaacttagaaaaagggaagaatatgttttagttagcaaagtcttaaacaagactgaagtggcaagcactgtagctcacgttttcttttgactcacctttttctttagctccaccttttgtaacttctagatttggggcatgaagttctgccactaaggcataaccagtacccaagtaggaaaggattattgatccctggagtaaagattcctagcttgcggggatctcactattgatcccccggagtaaagattcctagctcgcaggaatcttacttgcacacttagggaaaataccagagggagccactagcaaccgaaaaatgaaggaaagatttaatttctctacccaggtacaaatccaatgcatagtatagtatatgttatatgcagaaagggcactggaggtgtgagagccctttgggtaacagctctgctagttgttaccttcacacttctctttcttcttaatctctggtttctcgtctgaaaaatgagataattggactagattaatagttctcagccttttctagaacaacaaattagattatctctgaagtccttttccaaaatttcatgcttccagtctctccccgtgattgcgtattatccctaggctaattaaaagtgtgctggttaatcagtttctttactttttttttctctcttttttttattctgtgttcaggtatcatttgaccaacaacttgctcttaatcttactgcgatgactgaaatctccaaagaggagagtatagtagttataggtctagt

SEQ ID NO: 75025 - DNA, 4751 bp, Homo sapiens
  misc_feature (1961)..(1961): n is a, c, g, or t
tcgccatagctgactctagaggatacacttcctctcctcccacctccgtacccttctgcctccccctccccccacacttttctttcttacctaatctggtgaccaaactgaagtgtaaggataagacctctcctagtactagcagcaggaattgtgtgttccagtaagtggtctcttgcacggcacttttttgggatcaaatgttaacgttactccccagactcttcgggcaaaggaatggctagattcagagtaagaacaaccctcccttttttgtaagtccccgtgtttagcagggagaagaaattctctaacatgggtttggttttgttgtgttcttcatgtggaaatgtcgcttaacaaaatatccaggcttttgtttacgtggaaaaagcatcccttgtaatgattgctcatcatacttaaaaacctttttcaaaggattttcatgttcccagctataaggactatttccatgacatgtgttattggcagaatgagtgttaaatatggagcatatagcatggggtgactttcattgtcctaacctgagacagttttccttattactctgtattgatcctgctagtccaagaatggacatgaagtgaacctatcgtggtgactgggataggaaggtgcttgctatttttgccagcacagcatattagttcctttggagccctccattgtctgagtctgcagtgatctgtaggaaggcagctggtcaataatcatgtagtacaatggcttggaattgtaaccactatggttattgattgtcctgtgttgtttcaggcatacttaggtatgtccctggggaaaaagaaaaccattcagctgagagttgctaaccatgttcttttggttagaaataatggttcattttttgcccctggttggaatagtctctaaaaggctctggtgactgaattgaacatgagtccgcatgctgttttctttcaaaaggtatcaaaacggaaagcctctctaaggggaagacctttcaactccattcagaagacaacatttagtaaggaggatggcggaggttactagtaattttcagatgtcttgggctttttctgccaacaaaacccaaaatcaaattagagttggtgaaagctttcttcagtgtttttagaagaggccatcttgaatctgtagaataccatttacacatcaacttcaccctatgctcatttcgtattttgagcttaaatggagtcctctgaagggggggtagtcgtgattctggtggcaaaactagaacttttaacttgtaaaatgaaaaatattaaatggacctttttgtcagttgaggatttagattgattcttttatctgaggagcgtatgttcctcagatgttgcgtagagacctttaggttttcatctactttaagattgctctcttggcaattaggggatttgggaaaagaagaaaaaaagatgccatgtgttgctagtacacagttataggatatggtttctaatggttgaattttgaggaactctccctaaagaatgagttttatatctcctcaaggaaatcatggaaaaatctgtttattcttcagtgagtccttttgaattaatgttcttaaatttttttctaagtctgtgtaagtgcttatgtataagtatataattgtataaatatttataaatatatttatataattacggtttcatttctaccttgagtcaaagttctgtctttagattggtgactgagtaatacttacactttggtgttttttcttaggttcttgaggcttacttaactagcagcttctgatttattgagtgaaagatggttttcatgttaattcctcagttgcatctctgaacttggataacatacttgccgtttgaaaaatagagctgtatactgtcaaaggtgcactggagggtaaaacatttgttggtagtagacaagctcagaaatccaaaaattcngggagggcacagggtaagaagagaggtttgctcagctttgtgctctgatggcacccatctgtactccagcaaagtcatagctgaagcccaaatcgctcaaacgtgtgaagtcaatcatttttcctatagggctctgtttccttttctttaccttctagcttctcttgataaaacagttgggagaactgccaacgtgttcatcagtgagagggtgtggttctttccgatatgttcagcacgtgcatattcatttatgagaaaccaaagtaacttcttcaactcgggttactgtgggatgattaagtagatataaagtgatttaaaagacagcatggtactttcactcagcttaacatgcagctgggatgtctacaatacaagatgtggtgggttttattttattttattttgaggcaggagtgtaattatcttagggttgatataaaggcccatgggaagagttacggattgtacatgggaagaatccataaggagtattgccttgctcaagaatttaatccgctgacagtatgcttcttccagtttgccttacttcctctgcaagtttctttgctccttagggcagaggttttattgaatagattaaatgaggtcagtaagattagttaaaaatagtcattccttgtgggtgttggacacagcttgaaaggagtgtttaaaaaaaaaaagctagggaggaaaagaacaagaaagatagacttcgagagtgataagagaaaaatacagggagatggaatggaaactaccaggaaggccgggcgcggtggctcatgcctgtaatcccaacactttgggaggcggaggtgggcagatcacctaaggtcaggagatcgaggccagcctgagcaacatggtgaaaccccgtctctactaaaaatacaaaaattacctgggtgtggtggcgtgcacctgtaatcccagctactcagaggctgaggcaggggaatggcttgaacctgggaggcagaggttgcagtgagccaagatcgcaccattacactccagcctgggcgacaaagcgacactccatctcaaatttaaaaaaaaaaaaaaagaagaagaagaaaactagtgggaaaaaagtgagaggaatacttttttgaaattggtatcggaaggaactggagaagagaaaacaacagtgccaaatgagaaaagaacaggaaacttaatactaattggcatgcaccagatacttttgtgtacatttgcctcttcaatctcccgaagaatcgtacaaaatgtatactttcttcccatgttaagaaaacaggtatagagaacttattcaggactcatagctagtgagtggcaaatcagaattggaatccagagtccatgctgtggtctccttcagcaagagaatcaagctacccagatgattctcttctcattgtttggctttgtaaagtgtcacttagttttgttcccataaatatagaggaagtagttgggttaaagttgtgggatttgcactatgcctatacatttttatttatgccattattttgagaggctgattattgcttttttaaaatgatgcactggtgaagatgtgaaagtaaaattgccacgtggcattatttgccaagaataaatgaaaagggtaaaaaaacaattttttctttttttaaacatttttcagaaaagatacaattaccttttttaataggtgagcgccaccacgcccggctaatttttgcatttttagtgaaaccccatctctactgaaaaatacaaaaattagccaggcatggtggctgtctgtaatcccagctaatggggaggctgaggcacaagaatctcttgaacctgggaggcggaggttgcagtgagccgagatcacaccactgcactccatcctgggcaatggagcgagactctgtctcaaaaaataataaataagatatgattcctgcctgttttatccagttagagagacacactacacatgaaataattggagagcatgtaaatgtttacctattagttcaaacttagaaaaagggaagaatatgttttagttagcaaagtcttaaacaagactgaagtggcaagcactgtagctcacgttttcttttgactcacctttttctttagctccaccttttgtaacttctagatttggggcatgaagttctgccactaaggcataaccagtacccaagtaggaaaggattattgatccctggagtaaagattcctagcttgcggggatctcactattgatcccccggagtaaagattcctagctcgcaggaatcttacttgcacacttagggaaaataccagagggagccactagcaaccgaaaaatgaaggaaagatttaatttctctacccaggtacaaatccaatgcatagtatagtatatgttatatgcagaaagggcactggaggtgtgagagccctttgggtaacagctctgctagttgttaccttcacacttctctttcttcttaatctctggtttctcgtctgaaaaatgagataattggactagattaatagttctcagccttttctagaacaacaaattagattatctctgaagtccttttccaaaatttcatgcttccagtctctccccgtgattgcgtattatccctaggctaattaaaagtgtgctggttaatcagtttctttactttttttttctctcttttttttattctgtgttcaggtatcatttgaccaacaacttgctcttaatcttactgcgatgactgaaatctccaaagaggagagtatagtagttataggtctagt

SEQ ID NO: 75026 - DNA, 5413 bp, Homo sapiens
  misc_feature (2623)..(2623): n is a, c, g, or t
gcagtccgtgtgtgtctgtgttgttgttcggcggcggcggcggcggtaagatggctgcccacgggggctccgcggcgtcctcggcgctgaaggggttaattcaacagttcaccaccattaccggtgcaagtgaaagtgtaggaaaacatatgcttgaagcgtgcaacaataatctggaaatggcagtcactatgtttttggatggtggaggaatcgctgaagagcccagtaccagttcagcaagtgtctctactgtcagaccacacacagaagaagaagttcgtgccccaattcctcaaaagcaggaaatactggtggaaccagaaccattatttggtgctcctaaaagacgacggcctgcacgttcaatttttgatggtttccgggattttcagactgaaactattcggcaagaacaagaattaagaaatggaggagctatcgataagaaattaactacccttgcagatctattccggccacccattgatttgatgcataaaggcagctttgaaacagccaaagagtgtggccagatgcaaaataagtggctgatgataaacattcaaaatgttcaacgaagctgtgaagaatattatccgggaacatttcattttctggcaggtttatcatgacagtgaggaaggtcagagatacatacagttttataagttaggggatttcccctatgtttccatattggacccacggacaggtcagaagctagtagaatggcaccagttagatgtatcttctttcttggaccaagtgacgggatttctgggtgaacatggacaactggatggactttctagcagtccccccaaaaaatgtgcccgttcaggcacttttttgggatcaaatgttaacgttactccccagactcttcgggcaaaggaatggctagattcagagtaagaacaaccctcccttttttgtaagtccccgtgtttagcagggagaagaaattctctaacatgggtttggttttgttgtgttcttcatgtggaaatgtcgcttaacaaaatatccaggcttttgtttacgtggaaaaagcatcccttgtaatgattgctcatcatacttaaaaacctttttcaaaggattttcatgttcccagctataaggactatttccatgacatgtgttattggcagaatgagtgttaaatatggagcatatagcatggggtgactttcattgtcctaacctgagacagttttccttattactctgtattgatcctgctagtccaagaatggacatgaagtgaacctatcgtggtgactgggataggaaggtgcttgctatttttgccagcacagcatattagttcctttggagccctccattgtctgagtctgcagtgatctgtaggaaggcagctggtcaataatcatgtagtacaatggcttggaattgtaaccactatggttattgattgtcctgtgttgtttcaggcatacttaggtatgtccctggggaaaaagaaaaccattcagctgagagttgctaaccatgttcttttggttagaaataatggttcattttttgcccctggttggaatagtctctaaaaggctctggtgactgaattgaacatgagtccgcatgctgttttctttcaaaaggtatcaaaacggaaagcctctctaaggggaagacctttcaactccattcagaagacaacatttagtaaggaggatggcggaggttactagtaattttcagatgtcttgggctttttctgccaacaaaacccaaaatcaaattagagttggtgaaagctttcttcagtgtttttagaagaggccatcttgaatctgtagaataccatttacacatcaacttcaccctatgctcatttcgtattttgagcttaaatggagtcctctgaagggggggtagtcgtgattctggtggcaaaactagaacttttaacttgtaaaatgaaaaatattaaatggacctttttgtcagttgaggatttagattgattcttttatctgaggagcgtatgttcctcagatgttgcgtagagacctttaggttttcatctactttaagattgctctcttggcaattaggggatttgggaaaagaagaaaaaaagatgccatgtgttgctagtacacagttataggatatggtttctaatggttgaattttgaggaactctccctaaagaatgagttttatatctcctcaaggaaatcatggaaaaatctgtttattcttcagtgagtccttttgaattaatgttcttaaatttttttctaagtctgtgtaagtgcttatgtataagtatataattgtataaatatttataaatatatttatataattacggtttcatttctaccttgagtcaaagttctgtctttagattggtgactgagtaatacttacactttggtgttttttcttaggttcttgaggcttacttaactagcagcttctgatttattgagtgaaagatggttttcatgttaattcctcagttgcatctctgaacttggataacatacttgccgtttgaaaaatagagctgtatactgtcaaaggtgcactggagggtaaaacatttgttggtagtagacaagctcagaaatccaaaaattcngggagggcacagggtaagaagagaggtttgctcagctttgtgctctgatggcacccatctgtactccagcaaagtcatagctgaagcccaaatcgctcaaacgtgtgaagtcaatcatttttcctatagggctctgtttccttttctttaccttctagcttctcttgataaaacagttgggagaactgccaacgtgttcatcagtgagagggtgtggttctttccgatatgttcagcacgtgcatattcatttatgagaaaccaaagtaacttcttcaactcgggttactgtgggatgattaagtagatataaagtgatttaaaagacagcatggtactttcactcagcttaacatgcagctgggatgtctacaatacaagatgtggtgggttttattttattttattttgaggcaggagtgtaattatcttagggttgatataaaggcccatgggaagagttacggattgtacatgggaagaatccataaggagtattgccttgctcaagaatttaatccgctgacagtatgcttcttccagtttgccttacttcctctgcaagtttctttgctccttagggcagaggttttattgaatagattaaatgaggtcagtaagattagttaaaaatagtcattccttgtgggtgttggacacagcttgaaaggagtgtttaaaaaaaaaaagctagggaggaaaagaacaagaaagatagacttcgagagtgataagagaaaaatacagggagatggaatggaaactaccaggaaggccgggcgcggtggctcatgcctgtaatcccaacactttgggaggcggaggtgggcagatcacctaaggtcaggagatcgaggccagcctgagcaacatggtgaaaccccgtctctactaaaaatacaaaaattacctgggtgtggtggcgtgcacctgtaatcccagctactcagaggctgaggcaggggaatggcttgaacctgggaggcagaggttgcagtgagccaagatcgcaccattacactccagcctgggcgacaaagcgacactccatctcaaatttaaaaaaaaaaaaaaagaagaagaagaaaactagtgggaaaaaagtgagaggaatacttttttgaaattggtatcggaaggaactggagaagagaaaacaacagtgccaaatgagaaaagaacaggaaacttaatactaattggcatgcaccagatacttttgtgtacatttgcctcttcaatctcccgaagaatcgtacaaaatgtatactttcttcccatgttaagaaaacaggtatagagaacttattcaggactcatagctagtgagtggcaaatcagaattggaatccagagtccatgctgtggtctccttcagcaagagaatcaagctacccagatgattctcttctcattgtttggctttgtaaagtgtcacttagttttgttcccataaatatagaggaagtagttgggttaaagttgtgggatttgcactatgcctatacatttttatttatgccattattttgagaggctgattattgcttttttaaaatgatgcactggtgaagatgtgaaagtaaaattgccacgtggcattatttgccaagaataaatgaaaagggtaaaaaaacaattttttctttttttaaacatttttcagaaaagatacaattaccttttttaataggtgagcgccaccacgcccggctaatttttgcatttttagtgaaaccccatctctactgaaaaatacaaaaattagccaggcatggtggctgtctgtaatcccagctaatggggaggctgaggcacaagaatctcttgaacctgggaggcggaggttgcagtgagccgagatcacaccactgcactccatcctgggcaatggagcgagactctgtctcaaaaaataataaataagatatgattcctgcctgttttatccagttagagagacacactacacatgaaataattggagagcatgtaaatgtttacctattagttcaaacttagaaaaagggaagaatatgttttagttagcaaagtcttaaacaagactgaagtggcaagcactgtagctcacgttttcttttgactcacctttttctttagctccaccttttgtaacttctagatttggggcatgaagttctgccactaaggcataaccagtacccaagtaggaaaggattattgatccctggagtaaagattcctagcttgcggggatctcactattgatcccccggagtaaagattcctagctcgcaggaatcttacttgcacacttagggaaaataccagagggagccactagcaaccgaaaaatgaaggaaagatttaatttctctacccaggtacaaatccaatgcatagtatagtatatgttatatgcagaaagggcactggaggtgtgagagccctttgggtaacagctctgctagttgttaccttcacacttctctttcttcttaatctctggtttctcgtctgaaaaatgagataattggactagattaatagttctcagccttttctagaacaacaaattagattatctctgaagtccttttccaaaatttcatgcttccagtctctccccgtgattgcgtattatccctaggctaattaaaagtgtgctggttaatcagtttctttactttttttttctctcttttttttattctgtgttcaggtatcatttgaccaacaacttgctcttaatcttactgcgatgactgaaatctccaaagaggagagtatagtagttataggtctagt

SEQ ID NO: 75027 - DNA, 4348 bp, Homo sapiens
gcagtccgtgtgtgtctgtgttgttgttcggcggcggcggcggcggtaagatggctgcccacgggggctccgcggcgtcctcggcgctgaaggggttaattcaacagttcaccaccattaccggtgcaagtgaaagtgtaggaaaacatatgcttgaagcgtgcaacaataatctggaaatggcagtcactatgtttttggatggtggaggaatcgctgaagagcccagtaccagttcagcaagtgtctctactgtcagaccacacacagaagaagaagttcgtgccccaattcctcaaaagcaggaaatactggtggaaccagaaccattatttggtgctcctaaaagacgacggcctgcacgttcaatttttgatggtttccgggattttcagactgaaactattcggcaagaacaagaattaagaaatggaggagctatcgataagaaattaactacccttgcagatctattccggccacccattgatttgatgcataaaggcagctttgaaacagccaaagagtgtggccagatgcaaaataagtggctgatgataaacattcaaaatgttcaagactttgcatgtcagtgcctcaaccgcgatgtgtggagcaacgaagctgtgaagaatattatccgggaacatttcattttctggcaggtttatcatgacagtgaggaaggtcagagatacatacagttttataagttaggggatttcccctatgtttccatattggacccacggacaggtcagaagctagtagaatggcaccagttagatgtatcttctttcttggaccaagtgacgggatttctgggtgaacatggacaactggatggactttctagcagtccccccaaaaaatgtgcccgttcagagagccttatagatgcaagtgaagacagccagctagaagctgccatcagagcctccttacaagaaacacattttgattcaacacagacaaaacaggatagccgctcagatgaagaatctgaatctgaacttttttctggcagtgaggagttcatatccgtttgtggctctgatgaagaagaagaggtagagaatcttgccaagtccagaaagtctccccacaaagatttggggcatagaaaagaggagaatagaaggccgctgactgagccaccagtcagaactgatcctggaacagccacaaaccaccaaggattgccagctgtggattcagagatactggagatgccacctgaaaaagcagatggagtagtggaggggatagatgtaaatggaccaaaagcacagctgatgttgcggtatccagatggaaaaagggaacagatcactcttccagagcaagctaaactgctagctttggtgaagcacgtgcagtctaaaggatacccaaatgaacgttttgaacttctcaccaactttcctcgaaggaaattatctcatctggactatgatattacattgcaagaggcaggcctttgtcctcaagagactgtctttgtacaggaaagaaattaacaccatggcttgacctctctcagcttaccccttttttcccttttcctgtgagatacatgtcactaagtatgcattttgtgctctgatggcacccatctgtactccagcaaagtcatagctgaagcccaaatcgctcaaacgtgtgaagtcaatcatttttcctatagggctctgtttccttttctttaccttctagcttctcttgataaaacagttgggagaactgccaacgtgttcatcagtgagagggtgtggttctttccgatatgttcagcacgtgcatattcatttatgagaaaccaaagtaacttcttcaactcgggttactgtgggatgattaagtagatataaagtgatttaaaagacagcatggtactttcactcagcttaacatgcagctgggatgtctacaatacaagatgtggtgggttttattttattttattttgaggcaggagtgtaattatcttagggttgatataaaggcccatgggaagagttacggattgtacatgggaagaatccataaggagtattgccttgctcaagaatttaatccgctgacagtatgcttcttccagtttgccttacttcctctgcaagtttctttgctccttagggcagaggttttattgaatagattaaatgaggtcagtaagattagttaaaaatagtcattccttgtgggtgttggacacagcttgaaaggagtgtttaaaaaaaaaaagctagggaggaaaagaacaagaaagatagacttcgagagtgataagagaaaaatacagggagatggaatggaaactaccaggaaggccgggcgcggtggctcatgcctgtaatcccaacactttgggaggcggaggtgggcagatcacctaaggtcaggagatcgaggccagcctgagcaacatggtgaaaccccgtctctactaaaaatacaaaaattacctgggtgtggtggcgtgcacctgtaatcccagctactcagaggctgaggcaggggaatggcttgaacctgggaggcagaggttgcagtgagccaagatcgcaccattacactccagcctgggcgacaaagcgacactccatctcaaatttaaaaaaaaaaaaaaagaagaagaagaaaactagtgggaaaaaagtgagaggaatacttttttgaaattggtatcggaaggaactggagaagagaaaacaacagtgccaaatgagaaaagaacaggaaacttaatactaattggcatgcaccagatacttttgtgtacatttgcctcttcaatctcccgaagaatcgtacaaaatgtatactttcttcccatgttaagaaaacaggtatagagaacttattcaggactcatagctagtgagtggcaaatcagaattggaatccagagtccatgctgtggtctccttcagcaagagaatcaagctacccagatgattctcttctcattgtttggctttgtaaagtgtcacttagttttgttcccataaatatagaggaagtagttgggttaaagttgtgggatttgcactatgcctatacatttttatttatgccattattttgagaggctgattattgcttttttaaaatgatgcactggtgaagatgtgaaagtaaaattgccacgtggcattatttgccaagaataaatgaaaagggtaaaaaaacaattttttctttttttaaacatttttcagaaaagatacaattaccttttttaataggtgagcgccaccacgcccggctaatttttgcatttttagtgaaaccccatctctactgaaaaatacaaaaattagccaggcatggtggctgtctgtaatcccagctaatggggaggctgaggcacaagaatctcttgaacctgggaggcggaggttgcagtgagccgagatcacaccactgcactccatcctgggcaatggagcgagactctgtctcaaaaaataataaataagatatgattcctgcctgttttatccagttagagagacacactacacatgaaataattggagagcatgtaaatgtttacctattagttcaaacttagaaaaagggaagaatatgttttagttagcaaagtcttaaacaagactgaagtggcaagcactgtagctcacgttttcttttgactcacctttttctttagctccaccttttgtaacttctagatttggggcatgaagttctgccactaaggcataaccagtacccaagtaggaaaggattattgatccctggagtaaagattcctagcttgcggggatctcactattgatcccccggagtaaagattcctagctcgcaggaatcttacttgcacacttagggaaaataccagagggagccactagcaaccgaaaaatgaaggaaagatttaatttctctacccaggtacaaatccaatgcatagtatagtatatgttatatgcagaaagggcactggaggtgtgagagccctttgggtaacagctctgctagttgttaccttcacacttctctttcttcttaatctctggtttctcgtctgaaaaatgagataattggactagattaatagttctcagccttttctagaacaacaaattagattatctctgaagtccttttccaaaatttcatgcttccagtctctccccgtgattgcgtattatccctaggctaattaaaagtgtgctggttaatcagtttctttactttttttttctctcttttttttattctgtgttcaggtatcatttgaccaacaacttgctcttaatcttactgcgatgactgaaatctccaaagaggagagtatagtagttataggtctagt

SEQ ID NO: 75028 - DNA, 2368 bp, Homo sapiens
gcagtccgtgtgtgtctgtgttgttgttcggcggcggcggcggcggtaagatggctgcccacgggggctccgcggcgtcctcggcgctgaaggggttaattcaacagttcaccaccattaccggtgcaagtgaaagtgtaggaaaacatatgcttgaagcgtgcaacaataatctggaaatggcagtcactatgtttttggatggtggaggaatcgctgaagagcccagtaccagttcagcaagtgtctctactgtcagaccacacacagaagaagaagttcgtgccccaattcctcaaaagcaggaaatactggtggaaccagaaccattatttggtgctcctaaaagacgacggcctgcacgttcaatttttgatggtttccgggattttcagactgaaactattcggcaagaacaagaattaagaaatggaggagctatcgataagaaattaactacccttgcagatctattccggccacccattgatttgatgcataaaggcagctttgaaacagccaaagagtgtggccagatgcaaaataagtggctgatgataaacattcaaaatgttcaagactttgcatgtcagtgcctcaaccgcgatgtgtggagcaacgaagctgtgaagaatattatccgggaacatttcattttctggcaggtttatcatgacagtgaggaaggtcagagatacatacagttttataagttaggggatttcccctatgtttccatattggacccacggacaggtcagaagctagtagaatggcaccagttagatgtatcttctttcttggaccaagtgacgggatttctgggtgaacatggacaactggatggactttctagcagtccccccaaaaaatgtgcccgttcagagagccttatagatgcaagtgaagacagccagctagaagctgccatcagagcctccttacaagaaacacattttgattcaacacagacaaaacaggatagccgctcagatgaagaatctgaatctgaacttttttctggcagtgaggagttcatatccgtttgtggctctgatgaagaagaagaggtagagaatcttgccaagtccagaaagtctccccacaaagatttggggcatagaaaagaggagaatagaaggccgctgactgagccaccagtcagaactgatcctggaacagccacaaaccaccaaggattgccagctgtggattcagagatactggagatgccacctgaaaaagcagatggagtagtggaggggatagatgtaaatggaccaaaagcacagctgatgttgcggtatccagatggaaaaagggaacagatcactcttccagagcaagctaaactgctagctttggtgaagcacgtgcagtctaaaggatacccaaatgaacgttttgaacttctcaccaactttcctcgaaggaaattatctcatctggactatgatattacattgcaagaggcaggcctttgtcctcaagagactgtctttgtacaggaaagaaattaacaccatggcttgacctctctcagcttaccccttttttcccttttcctgtgagatacatgtcactaagtatgcattttggctcataggaccacagagccaaagttgggcaagcaagtcaccttccttctcttatttcttgatctctcctataatcagtctctttctccccctttgtttctttctcctcttctgttttctcgctccccactccgtacccttctgcctccccctccccccacacttttctttcttacctaatctggtgaccaaactgaagtgtaaggataagacctctcctagtactagcagcaggaattgtgtgttccagtaagtggtctcttgcacggcacttttttgggatcaaatgttaacgttactccccagactcttcgggcaaaggaatggctagattcagagtaagaacaaccctcccttttttgtaagtccccgtgtttagcagggagaagaaattctctaacatgggtttggttttgttgtgttcttcatgtggaaatgtcgcttaacaaaatatccaggcttttgtttacgtggaaaaagcatcccttgtaatgattgctcatcatacttaaaaacctttttcaaaggattttcatgttcccagctataaggactatttccatgacatgtgttattggcagaatgagtgttaaatatggagcatatagcatggggtgactttcattgtcctaacctgagacagttttccttattactctgtattgatcctgctagtccaagaatggacatgaagtgaacctatcgtggtgactgggataggaaggtgcttgctatatgctccatatttaacactcattctgccgtcgacg

SEQ ID NO: 75029 - DNA, 3570 bp, Homo sapiens
  misc_feature (780)..(780): n is a, c, g, or t
ttctggtggcaaaactagaatcacgactacccccccttcagaggactccatttaagggggggtagtcgtgattctggtggcaaaactagaacttttaacttgtaaaatgaaaaatattaaatggacctttttgtcagttgaggatttagattgattcttttatctgaggagcgtatgttcctcagatgttgcgtagagacctttaggttttcatctactttaagattgctctcttggcaattaggggatttgggaaaagaagaaaaaaagatgccatgtgttgctagtacacagttataggatatggtttctaatggttgaattttgaggaactctccctaaagaatgagttttatatctcctcaaggaaatcatggaaaaatctgtttattcttcagtgagtccttttgaattaatgttcttaaatttttttctaagtctgtgtaagtgcttatgtataagtatataattgtataaatatttataaatatatttatataattacggtttcatttctaccttgagtcaaagttctgtctttagattggtgactgagtaatacttacactttggtgttttttcttaggttcttgaggcttacttaactagcagcttctgatttattgagtgaaagatggttttcatgttaattcctcagttgcatctctgaacttggataacatacttgccgtttgaaaaatagagctgtatactgtcaaaggtgcactggagggtaaaacatttgttggtagtagacaagctcagaaatccaaaaattcngggagggcacagggtaagaagagaggtttgctcagctttgtgctctgatggcacccatctgtactccagcaaagtcatagctgaagcccaaatcgctcaaacgtgtgaagtcaatcatttttcctatagggctctgtttccttttctttaccttctagcttctcttgataaaacagttgggagaactgccaacgtgttcatcagtgagagggtgtggttctttccgatatgttcagcacgtgcatattcatttatgagaaaccaaagtaacttcttcaactcgggttactgtgggatgattaagtagatataaagtgatttaaaagacagcatggtactttcactcagcttaacatgcagctgggatgtctacaatacaagatgtggtgggttttattttattttattttgaggcaggagtgtaattatcttagggttgatataaaggcccatgggaagagttacggattgtacatgggaagaatccataaggagtattgccttgctcaagaatttaatccgctgacagtatgcttcttccagtttgccttacttcctctgcaagtttctttgctccttagggcagaggttttattgaatagattaaatgaggtcagtaagattagttaaaaatagtcattccttgtgggtgttggacacagcttgaaaggagtgtttaaaaaaaaaaagctagggaggaaaagaacaagaaagatagacttcgagagtgataagagaaaaatacagggagatggaatggaaactaccaggaaggccgggcgcggtggctcatgcctgtaatcccaacactttgggaggcggaggtgggcagatcacctaaggtcaggagatcgaggccagcctgagcaacatggtgaaaccccgtctctactaaaaatacaaaaattacctgggtgtggtggcgtgcacctgtaatcccagctactcagaggctgaggcaggggaatggcttgaacctgggaggcagaggttgcagtgagccaagatcgcaccattacactccagcctgggcgacaaagcgacactccatctcaaatttaaaaaaaaaaaaaaagaagaagaagaaaactagtgggaaaaaagtgagaggaatacttttttgaaattggtatcggaaggaactggagaagagaaaacaacagtgccaaatgagaaaagaacaggaaacttaatactaattggcatgcaccagatacttttgtgtacatttgcctcttcaatctcccgaagaatcgtacaaaatgtatactttcttcccatgttaagaaaacaggtatagagaacttattcaggactcatagctagtgagtggcaaatcagaattggaatccagagtccatgctgtggtctccttcagcaagagaatcaagctacccagatgattctcttctcattgtttggctttgtaaagtgtcacttagttttgttcccataaatatagaggaagtagttgggttaaagttgtgggatttgcactatgcctatacatttttatttatgccattattttgagaggctgattattgcttttttaaaatgatgcactggtgaagatgtgaaagtaaaattgccacgtggcattatttgccaagaataaatgaaaagggtaaaaaaacaattttttctttttttaaacatttttcagaaaagatacaattaccttttttaataggtgagcgccaccacgcccggctaatttttgcatttttagtgaaaccccatctctactgaaaaatacaaaaattagccaggcatggtggctgtctgtaatcccagctaatggggaggctgaggcacaagaatctcttgaacctgggaggcggaggttgcagtgagccgagatcacaccactgcactccatcctgggcaatggagcgagactctgtctcaaaaaataataaataagatatgattcctgcctgttttatccagttagagagacacactacacatgaaataattggagagcatgtaaatgtttacctattagttcaaacttagaaaaagggaagaatatgttttagttagcaaagtcttaaacaagactgaagtggcaagcactgtagctcacgttttcttttgactcacctttttctttagctccaccttttgtaacttctagatttggggcatgaagttctgccactaaggcataaccagtacccaagtaggaaaggattattgatccctggagtaaagattcctagcttgcggggatctcactattgatcccccggagtaaagattcctagctcgcaggaatcttacttgcacacttagggaaaataccagagggagccactagcaaccgaaaaatgaaggaaagatttaatttctctacccaggtacaaatccaatgcatagtatagtatatgttatatgcagaaagggcactggaggtgtgagagccctttgggtaacagctctgctagttgttaccttcacacttctctttcttcttaatctctggtttctcgtctgaaaaatgagataattggactagattaatagttctcagccttttctagaacaacaaattagattatctctgaagtccttttccaaaatttcatgcttccagtctctccccgtgattgcgtattatccctaggctaattaaaagtgtgctggttaatcagtttctttactttttttttctctcttttttttattctgtgttcaggtatcatttgaccaacaacttgctcttaatcttactgcgatgactgaaatctccaaagaggagagtatagtagttataggtctagt

SEQ ID NO: 75030 - DNA, 1414 bp, Homo sapiens
gcagtccgtgtgtgtctgtgttgttgttcggcggcggcggcggcggtaagatggctgcccacgggggctccgcggcgtcctcggcgctgaaggggttaattcaacagttcaccaccattaccggtgcaagtgaaagtgtaggaaaacatatgcttgaagcgtgcaacaataatctggaaatggcagtcactatgtttttggatggtggaggaatcgctgaagagcccagtaccagttcagcaagtgtctctactgtcagaccacacacagaagaagaagttcgtgccccaattcctcaaaagcaggaaatactggtggaaccagaaccattatttggtgctcctaaaagacgacggcctgcacgttcaatttttgatggtttccgggattttcagactgaaactattcggcaagaacaagaattaagaaatggaggagctatcgataagaaattaactacccttgcagatctattccggccacccattgatttgatgcataaaggcagctttgaaacagccaaagagtgtggccagatgcaaaataagtggctgatgataaacattcaaaatgttcaagactttgcatgtcagtgcctcaaccgcgatgtgtggagcaacgaagctgtgaagaatattatccgggaacatttcattttctggcaggtttatcatgacagtgaggaaggtcagagatacatacagttttataagttaggggatttcccctatgtttccatattggacccacggacaggtcagaagctagtagaatggcaccagttagatgtatcttctttcttggaccaagtgacgggatttctgggtgaacatggacaactggatggactttctagcagtccccccaaaaaatgtgcccgttcagagagccttatagatgcaagtgaagacagccagctagaagctgccatcagagcctccttacaagaaacacattttgattcaacacagacaaaacaggatagccgctcagatgaagaatctgaatctgaacttttttctggcagtgaggagttcatatccgtttgtggctctgatgaagaagaagaggtagagaatcttgccaagtccagaaagtctccccacaaagatttggggcatagaaaagaggagaatagaaggccgctgactgagccaccagtcagaactgatcctggaacagccacaaaccaccaaggattgccagctgtggattcagagatactggagatgccacctgaaaaagcagatggagtagtggaggggatagatgtaaatggaccaaaagcacagctgatgttgcggtatccagatggaaaaagggaacagatcactcttccagagcaagctaaactgctagctttggtgagcacgtgcagtctaaagacacgatgttacaggtagcacgagctcga

SEQ ID NO: 75031 - DNA, 985 bp, Homo sapiens
gcagtccgtgtgtgtctgtgttgttgttcggcggcggcggcggcggtaagatggctgcccacgggggctccgcggcgtcctcggcgctgaaggggttaattcaacagttcaccaccattaccggtgcaagtgaaagtgtaggaaaacatatgcttgaagcgtgcaacaataatctggaaatggcagtcactatgtttttggatggtggaggaatcgctgaagagcccagtaccagttcagcaagtgtctctactgtcagaccacacacagaagaagaagttcgtgccccaattcctcaaaagcaggaaatactggtggaaccagaaccattatttggtgctcctaaaagacgacggcctgcacgttcaatttttgatggtttccgggattttcagactgaaactattcggcaagaacaagaattaagaaatggaggagctatcgataagaaattaactacccttgcagatctattccggccacccattgatttgatgcataaaggcagctttgaaacagccaaagagtgtggccagatgcaaaataagtggctgatgataaacattcaaaatgttcaagactttgcatgtcagtgcctcaaccgcgatgtgtggagcaacgaagctgtgaagaatattatccgggaacatttcattttctggcaggtttatcatgacagtgaggaaggtcagagatacatacagttttataagttaggggatttcccctatgtttccatattggacccacggacaggtcagaagctagtagaatggcaccagttagatgtatcttctttcttggaccaagtgacgggatttctgggtgaacatggacaactggatggactttctagcagtccccccaaaaaatgtgcccgttcagagagccttatagatgcaagtgaagacagccagctagaagctgccatcagagcctccttacaagaaacacatcaaataaactgactttttccccccaaaaa

SEQ ID NO: 75032 - DNA, 1797 bp, Homo sapiens
ctcaacgctttatacttctccagctattaacaaacttagttctcacaaatctaagcccagatgccctttagtctcccatcccatcaagttgagcctgaacaatctcatgatgctacaaacttaagatcagacaaacttctacactcccttctctcactcgaccctagacaatctattttttatttatttttgagatggagtctcgctctgtcacccaggctggagtgcagtggcatgatctcagcttactgcaaccttcacctctcaggttcaaacgattctcctgcctcagcctcccaagtagctgggactacaggcttcgccaccacgcccggctaatttttgcatttttagtagagacagggtttcaccatgttggccaggatggtctcgatctcttgatctcgtgttccgcccacctcggcctcctaaagtgctgggattacaggcatgagccactgcgcccgatctacaattctgttttctgtgtcccatccataccagattattgaaccctctgtgtgtatgtttttaaatcttgtatataattctacttccttgacttacaagtcaacaattagctattgagttctttatagaagttggaagcagggagatggaatggaaattccagcaaggccgggcgcggtggctcatgcctgtaatcccaatattttgggaggccgaggtgggtggatcacctgaggttgggagttcgagatcagcctggccaacatggtgaaaccccatctctactgaaaaatacaaaaattagccaggcatggtggctgtctgtaatcccagctaatggggaggctgaggcacaagaatctcttgaacctgggaggcggaggttgcagtgagccgagatcacaccactgcactccatcctgggcaatggagcgagactctgtctcaaaaaataataaataagatatgattcctgcctgttttatccagttagagagacacactacacatgaaataattggagagcatgtaaatgtttacctattagttcaaacttagaaaaagggaagaatatgttttagttagcaaagtcttaaacaagactgaagtggcaagcactgtagctcacgttttcttttgactcacctttttctttagctccaccttttgtaacttctagatttggggcatgaagttctgccactaaggcataaccagtacccaagtaggaaaggattattgatccctggagtaaagattcctagcttgcggggatctcactattgatcccccggagtaaagattcctagctcgcaggaatcttacttgcacacttagggaaaataccagagggagccactagcaaccgaaaaatgaaggaaagatttaatttctctacccaggtacaaatccaatgcatagtatagtatatgttatatgcagaaagggcactggaggtgtgagagccctttgggtaacagctctgctagttgttaccttcacacttctctttcttcttaatctctggtttctcgtctgaaaaatgagataattggactagattaatagttctcagccttttctagaacaacaaattagattatctctgaagtccttttccaaaatttcatgcttccagtctctccccgtgattgcgtattatccctaggctaattaaaagtgtgctggttaatcagtttctttactttttttttctctcttttttttattctgtgttcaggtatcatttgaccaacaacttgctcttaatcttactgcgatgactgaaatctccaaagaggagagtatagtagttataggtctagt

SEQ ID NO: 75033 - DNA, 273 bp, Homo sapiens
actacatggaagttaaaaatattcttctaaataattactagatcaataaagaaattaaagtaaaattacatactatttaaggtatttggaaaatagtggaaaaaaaacattttgtacaaaaacctgtgggatgtaattacagctatattatgcaaaaatatatctttattgcttttgtaatttaaaaataactataagtaggtgaacttcaaattaagaaatcagaaaaacaatgggaaccaatataaatgagaaaagatgtaaattatcaaa

SEQ ID NO: 75034 - DNA, 862 bp, Homo sapiens
gttgattcctagaggtggaatccattaaactgacaaagccccagtcccggggtcctaatagtcgggactattaggtcatcctgggtactcaggcctctagactctagactgagctgccttggtcactcggggacagttggcagagtattcgtggtcagggaggtgacccgtggtcagcaggatcaggccacccagggacaaagggtgcttctgcgccaggccctggagaaggacagagcggtggggactcggggtcggccgcagataggggagtcaccacctgccggcaatcagccatgactgcctttgcactgtccatgctctcagcccaccacctcctccccctgccattgcagtggctaacactggagacgaagaccaagacaccaccgcctttctccagtacctctcaaatcagcacaggcaaggacaaaggcctcaatccacaactgctgaagatggaccctggccacatgggatggtcagacacgcctgcccagctatctgcaggcgaagaggctcagaagaggtttaggggcctgaaggacatcttgcttccatgtccatatgagcaggctatttctgctccatgagtcaattttgccatataaaatacttaatttcagccattccagggtgctgtaggatgcacagcttcccatcagcccacctgaactccagccatgccattttaataccaggaataaggtcacctgctttcctgccccttaggaggccagagccgtggaagcaaaatggcacttctgtttacctgttatattatttttttgtcatccttatatgcttggaaaatgcaattatatgaaaaaagtttagtaattacagacataacagcagaaag

SEQ ID NO: 75035 - DNA, 798 bp, Homo sapiens
cagcaaacttcaaactttttaatggaacaaggacacacagacattaatccccagtgtccatcaaagttgcaatgcagccctaacgcctggcatccttgaaagggacgggcatttagtaatgagatatgcacagcagcatagtcagctgtgtggtgcattctcagctgtgcctcagcagccctgatgcagacatccagaaggagcacagccactttatccagagcaatcagccatgactgcctttgcactgtccatgctctcagcccaccacctcctccccctgccattgcagtggctaacactggagacgaagaccaagacaccaccgcctttctccagtacctctcaaatcagcacaggcaaggacaaaggcctcaatccacaactgctgaagatggaccctggccacatgggatggtcagacacgcctgcccagctatctgcaggcgaagaggctcagaagaggtttaggggcctgaaggacatcttgcttccatgtccatatgagcaggctatttctgctccatgagtcaattttgccatataaaatacttaatttcagccattccagggtgctgtaggatgcacagcttcccatcagcccacctgaactccagccatgccattttaataccaggaataaggtcacctgctttcctgccccttaggaggccagagccgtggaagcaaaatggcacttctgtttacctgttatattatttttttgtcatccttatatgcttggaaaatgcaattatatgaaaaaagtttagtaattacagacataacagcagaaag

SEQ ID NO: 75036 - DNA, 456 bp, Homo sapiens
ggaggttgtgagcagaagcttaatgaagaaaccacattggcttacagttactgtctgcaatccacccccattcctcacaatttaagctcctaagtttgagatggggctaaggttcttaaaggtagtatcaccatatattcaagtcctttctctttatttctgaggtttttgggatccaagcagccctggtatgtttttagaacacagtacacattgtgtaacagtcactgagcccaactcttacatagggcctggcagtgttgcccttgtgtatcccttccccttgagtatggggtcggacctagtgactggcttctagtgaacagaatacagtaaatataatgggatgtgtcttccaagattagggtataaagcactgaattctaccttgcatgagcattacattttataatatatataaagaagcaactagtatagttatttaaacaaatattt

SEQ ID NO: 75037 - DNA, 661 bp, Homo sapiens
taggaaaacaggttttagctttacctgttgaggcaaatatttgagctgtacattgtagattaatgaatgctactggagaagtaaagaagtctggagggagggaaccaccacccattgtcctaacaatgcacatttctattgctttcttgtcttgaaggcatatatatcacccaaatggactaggttcccacaaaatttctactttaggctaggcactgcactagctcccacttctctaagctgttatatctgtggaatttgatgggacacccagtacacaaagtaataaaaatcataatgtataacaagtctctttacaattaccttactgcgtcttgtttcagtttcatatatataataaacaggcagctctgcttcagagatgttacgtatcagcaactaacctactaataaatgcaatttggcaatatgtaaatagccttaaaatgtgtgaagaaaaccagaacgtatcactccaaaatatgcctttttgacatagaaattattttggagaagccaggcacggtggctcatgcctgtaatcccagctacttgggaggttgaggcactagaattgcctgaacctgggtggcggaggttgcagtgagttgagactgagccactgcactccagcctgggcgacaaagcgagactctgtctc

SEQ ID NO: 75038 - DNA, 452 bp, Homo sapiens
caaaagcgctctggctctcaatggagacatcaagccctccctgccccttctccctcccctttcagagaatctccaggaatttctgccattgtgcagggagcaattgaaaaatcagttagttcagctgggtgcagtggctcatgtctgtaatcccagcactttgggaggctgaggcgggcagatcacctgaggccaggagttggagaccggcctggccagcacagtgaagccccgtctctactaaaaatacaaaaaattagccgggcgtggtgatgggcacctgtaatcccagctactctggaggctgaggcaggggaatggcgtgaacctgggaggtggagcttgcagtgagccgagactgcagcattgcactccagcctgcgcaacaagagtgaaactgtctcaaaaaaacaaaacaaaacaaaacacaaaaagaaagaaaaaaggaaaaa

SEQ ID NO: 75039 - DNA, 318 bp, Homo sapiens
aaactcccatttttaaaaccaccagatctcgtgagacttattcactatcacaagaacagcatgggaaagactcgcccccatgattcagttatctcccactgggtccttcccacaacacgtaagaattatgggagctacacaatgagatttgggtagggacacagagccaaaccatatcaactttccctgcacaagctctctgtctgctgccatccatgtaagacgtgacttgctcttccttgccttccatcctgattgtgaggtctcttcagctacctggaactgtaaatccattaaacctctttcttttgtaaattg

SEQ ID NO: 75040 - DNA, 2097 bp, Homo sapiens
aaagaataattctgtatataaacagtggaggtagataaatctatcttcttttatagtcctatctctcctatttataaaaatctacaaaaaccaggtattttctcattattttaatggaattatttcctaacaaacttgatggtattggataaaattaaagtttattctaaactgttaagttgtaggtccttggaaaatttgctttgttaactcttttgtcatgtggagagagagagagatggaggggagagaattagttagctagggttcttaagaatacctttaatcattacataccctgtatttttaaatagctatgttttgcccctcaaaaagtattcaaaataaatactaacagaaattcaatattgtaatatattttagtaatttttttgtatcttaatgttaggtcttcaaacatgaactagcttacttattggctggaattcttggagcagcaatagattattggattttccttggtcttaagatgggtagaaatgtgatgcgacacatgtctgatgacttaggaagttatgtttctctttcgtgtgatgacttttcttcacaggaattagagattttcatttgctccttttcctcctcctggcttcaaatgtttgttgcagaggcagtctttaaaaagttgtgtctacagagctctggcagtgtttcttctgagccactctctcttcagaaaatggtatattcctatttaccagccttggggaaaactggtgtgcttgggtctggaaagattcaggtgtcaaagaaaataggacagcggccttgttttgactctcagagaaccttactaatgctgaatggtactaaacaaaaacaagtcgaagggctgccagagttactagacctgaaccttgctaaatgttcctcatcattaaaaaaattgaaaaagaagtcagaaggagaattgtcatgttccaaggagaattgcccctctgtagttaaaaagatgaattttcacaagactaatctaaaaggagaaacagccctgcatagagcttgcataaataaccaagtggagaaattgattcttcttctctctttgccaggaatagacatcaatgttaaagacaatgctggctggacgcctttgcatgaagcctgtaactatggcaacacagtgtgtgtccaggaaattttgcaacgttgtccagaggtagatctgctcactcaagtggacggggtgactcctttgcatgatgcactgtcaaacggacatgtagaaattggcaagctgctactacagcatgggggcccagtgcttttacaacagaggaatgctaagggagaattgcccttggattatgtggtttcacctcaaatcaaagaagaactgtttgctattacaaaaatagaagatacagtggagaactttcatgcacaagcagagaaacattttcattaccagcaacttgaatttggctcctttttacttagtaggatgttgctaaatttttgttcaatttttgatttatcttcagagttcattttagcttccaaagggttaactcatctaaatgaactgcttatggcttgtaaaagtcataaagaaaccaccagtgttcatactgactggttactggatctttatgctggaaatataaagacattgcagaaactcccacacattcttaaggaactgcctgagaatttgaaagtgtgtcctggggtacacactgaggccttgatgataacattggaaatgatgtgtcggtcagtcatggagttttcatgatgatgctagaaagtatggattgactttctaaatctgttcagtttgcattggtacttactgtggacttcatagcttactgacagatagtaatttgatttatttattgacagactttgcagccttgctaaattttaaaagcatttttaaaaaaacttctacaaaactctagtatgggcttctgactttttccagggtgtagaatttgactcaaaagtaaaaataattttgttttagtatattctactttcattaatgtttttttgttctgaaagtgatattatattgtacatgtaaaattaatttaaatattttttcaaataaaaatgtaatgtcctgta

SEQ ID NO: 75041 - DNA, 4067 bp, Homo sapiens
aaagaataattctgtatataaacagtggaggtagataaatctatcttcttttatagtcctatctctcctatttataaaaatctacaaaaaccaggtattttctcattattttaatggaattatttcctaacaaacttgatggtattggataaaattaaagtttattctaaactgttaagttgtaggtccttggaaaatttgctttgttaactcttttgtcatgtggagagagagagagatggaggggagagaattagttagctagggttcttaagaatacctttaatcattacataccctgtatttttaaatagctatgttttgcccctcaaaaagtattcaaaataaatactaacagaaattcaatattgtaatatattttagtaatttttttgtatcttaatgttaggtcttcaaacatgaactagcttacttattggctggaattcttggagcagcaatagattattggattttccttggtcttaagatgggtagaaatgtgatgcgacacatgtctgatgacttaggaagttatgtttctctttcgtgtgatgacttttcttcacaggaattagagattttcatttgctccttttcctcctcctggcttcaaatgtttgttgcagaggcagtctttaaaaagttgtgtctacagagctctggcagtgtttcttctgagccactctctcttcagaaaatggtatattcctatttaccagccttggggaaaactggtgtgcttgggtctggaaagattcaggtgtcaaagaaaataggacagcggccttgttttgactctcagagaaccttactaatgctgaatggtactaaacaaaaacaagtcgaagggctgccagagttactagacctgaaccttgctaaatgttcctcatcattaaaaaaattgaaaaagaagtcagaaggagaattgtcatgttccaaggagaattgcccctctgtagttaaaaagatgaattttcacaagactaatctaaaaggagaaacagccctgcatagagcttgcataaataaccaagtggagaaattgattcttcttctctctttgccaggaatagacatcaatgttaaagacaatgctggctggacgcctttgcatgaagcctgtaactatggcaacacagtgtgtgtccaggaaattttgcaacgttgtccagaggtagatctgctcactcaagtggacggggtgactcctttgcatgatgcactgtcaaacggacatgtagaaattggcaagctgctactacagcatgggggcccagtgcttttacaacagaggaatgctaagggagaattgcccttggattatgtggtttcacctcaaatcaaagaagaactgtttgctattacaaaaatagaagatacagtggagaactttcatgcacaagcagagaaacattttcattaccagcaacttgaatttggctcctttttacttagtaggatgttgctaaatttttgttcaatttttgatttatcttcagagttcattttagcttccaaagggttaactcatctaaatgaactgcttatggcttgtaaaagtcataaagaaaccaccagtgttcatactgactggttactggatctttatgctggaaatataaagacattgcagaaactcccacacattcttaaggaactgcctgagaatttgaaagtgtgtcctggggtacacactgaggccttgatgataacattggaaatgatgtgtcggtcagtcatggagttttcatgatgatgctagaaagtatggattgactttctaaatctgttcagtttgcattggtacttactgtggacttcatagcttactgacagatagtaatttgatttatttattgacagactttgcagccttgctaaattttaaaagcatttttaaaaaaacttctacaaaactctagtatgggcttctgactttttccagggtgtagaatttgactcaaaagtaaaaataattttgttttagtatattctactttcattaatgtttttttgttctgaaagtgatattatattgtacatgtaaaattaatttaaatattttttcaaataaaaatgtaatgtcctgtattctagatgttctaggtcttagaatcatggcaagcatattcatacaaatgcgtacctataaacttgtagctcctgactcttagggatggattttgaggaaaaaacaagactaaacaaaaacatgtagctccctatttcttctctctaggttgttggactgaaatatgcattttagctttgtgtgtttctaaaataaacatttctaaaattacagtaataattaatattcttttggtttttaaatgcagcaaatatgcagagtctgacagttcaattccttgatctgttttattttagcaattcatatacaaaatgtatctgtcgctgccctatgtaacccagtattctgtacctgaaaacattctgctgcataggtttatgagtttaatattaagatattgagtggcatctaagtaatagatttgagattatttaagatcttaatatatagtatgaatttactgagtagtaatgttttaatttgcagtttttccttatagcagtttgtagtaaaactaaaagaaagggtgtggataataaccacttttgagattggagtttcttcactactgggagtaagttacattatgatacaggtggaaaataaacacttccatttagcttttatgtaattcaagtgatgaccttagcagttaatctgctaaagcaatacacttcagttttattttggaaatagatattttaacaagatacaaatgctcagtatcatattactgggtttgtaatctaaattgaaaactgctacatcagtatgaaaaaatattttaaataagtactttttccacacatactcaggaaatactagtttctatttagccttcaaatttggcatcatacaaatctctttattattaatctgccaaagtatcagacaaaaaatgatatagtgaagactatctaagaagagtttaaatgcttatagagagtaaagtgcttctccagatgatgaataagaacgttttttattccaatgagtacctctttacttcacttgtaaaggtgtctgggatagtgtttgcttggtaaactaatataaacttgtaaacataggctttgacatcatacacattttcaaatccttgtctagtttcttaataactaaattgcaaggcaaattcttttctgagctttggctttcctacatgtcaaatagaaatcacaccaggtatctttgtcatgatagaattgttagcatatcacatcatatgacacttaataaatattatttcctttctaattcttacctcctcttttgattataatgaatcatttagacaaaaggcaatatagtaattgtttaagttggtagtaattctaaggtaattaaggaatcaacatcatgagttagggttttatactgttagtacaaagtagttttccaaattagatgttcataacgtatatttgtttaattgcaattagcattaatatttcataattgactgctctgtctgccaacttctacaagcagtgatgacatgaagtgtgaaacagatgtcactgaggtctctgcctttaagaagttttacacttcttcgaaagtccaacgtggcaaacataggttactgtgttctgtgccctggctaacaataccagtatatgagtatgaatttaaattttcaggaaaaggcttcattcccaaaattacttcttatactttattttagaaaacataataataattgccttgaataattgcccaaatctatcttggaggtataggaagaagaaattctcaataagtaaagtataattcatagtcttagtcctagattttcaatggcagacttttcaaagttgcatctgaagacaaggttgagaaatgctattcttcactgtattttgccagatgtgatatcatagttctatggaatcatattttttaaatttctgtaagagaccttattacaatgtaaataaagctggagaggagatttctgagcagttaa

SEQ ID NO: 75042 - DNA, 2058 bp, Homo sapiens
aaagaataattctgtatataaacagtggaggtagataaatctatcttcttttatagtcctatctctcctatttataaaaatctacaaaaaccaggtattttctcattattttaatggaattatttcctaacaaacttgatggtattggataaaattaaagtttattctaaactgttaagttgtaggtccttggaaaatttgctttgttaactcttttgtcatgtggagagagagagagatggaggggagagaattagttagctagggttcttaagaatacctttaatcattacataccctgtatttttaaatagctatgttttgcccctcaaaaagtattcaaaataaatactaacagaaattcaatattgtaatatattttagtaatttttttgtatcttaatgttaggtcttcaaacatgaactagcttacttattggctggaattcttggagcagcaatagattattggattttccttggtcttaagatgggtagaaatgtgatgcgacacatgtctgatgacttaggaagttatgtttctctttcgtgtgatgacttttcttcacaggaattagagattttcatttgctccttttcctcctcctggcttcaaatgtttgttgcagaggcagtctttaaaaagttgtgtctacagagctctggcagtgtttcttctgagccactctctcttcagaaaatggtatattcctatttaccagccttggggaaaactggtgtgcttgggtctggaaagattcaggtgtcaaagaaaataggacagcggccttgttttgactctcagagaaccttactaatgctgaatggtactaaacaaaaacaagtcgaagggctgccagagttactagacctgaaccttgctaaatgttcctcatcattaaaaaaattgaaaaagaagtcagaaggagaattgtcatgttccaaggagaattgcccctctgtagttaaaaagatgaattttcacaagactaatctaaaaggagaaacagccctgcatagagcttgcataaataaccaagtggagaaattgattcttcttctctctttgccaggaatagacatcaatgttaaagacaatgctggctggacgcctttgcatgaagcctgtaactatggcaacacagtgtgtgtccaggaaattttgcaacgttgtccagaggtagatctgctcactcaagtggacggggtgactcctttgcatgatgcactgtcaaacggacatgtagaaattggcaagctgctactacagcatgggggcccagtgcttttacaacagaggaatgctaagggagaattgcccttggattatgtggtttcacctcaaatcaaagaagaactgtttgctattacaaaaatagaagatacagtggagaactttcatgcacaagcagagaaacattttcattaccagcaacttgaatttggctcctttttacttagtaggatgttgctaaatttttgttcaatttttgatttatcttcagagttcattttagcttccaaagggttaactcatctaaatgaactgcttatggcttgtaaaagtcataaagaaaccaccagtgttcatactgactggttactggatctttatgctggaaatataaagacattgcagaaactcccacacattcttaaggaactgcctgagaatttgaaagtgtgtcctggggtacacactgaggccttgatgataacattggaaatgatgtgtcggtcagtcatggagttttcatgatgatgctagaaagtatggattgactttctaaatctgttcagtttgcattggtacttactgtggacttcatagcttactgacagatagtaatttgatttatttattgacagacttgagctgtaatttaaagcatttaaaatttacaatcagtttggttggtttcaggaaatggccaagtaatattgggtattattataggttgcaaggtttggcagagcaatttaaagttgttggaaaaaaaaaggtgggcgataatggggggagaatggagtaagggagaggattgataataaatataa

SEQ ID NO: 75043 - DNA, 664 bp, Homo sapiens
attggataaatattaccattccaaacaagagaaattagccaaaagaggctgcaggccccatccaagtctgaaatacagcagtgcagtctttttttaaatatcccaaataaccttctttgactccatgtcttaccttgtgcctcacaagagcacattggtataaggagtgggctcccaaagccttgggaagctctgcctctgtgactttgcagggtaaagggttggagtttagtgcttgcagcttttccaggcacagaggcaagctattggaggatcaaccattttggggtctggaagacagtggcccccttcccccagctctctgaggagcaccccagtgggaactctgttgggcctccaaccccacatttcccccccatactggcttagtagaggttctctgtgagggctccatctctgcagcaggcttctgcctggttactcaggctttctcatacatcctctgaaatctaggtggaggttgccaaacctccttcacccttgcactctccacacctgcaggcttaacaacacgtgttagccaccaaggcttatggcttgtgccctgcacaagtggcaccccatgccttacttgggccctttagagctgagcagtgtcccaaggctgggcagccccttctctatggctgcttttacatttttt

SEQ ID NO: 75044 - DNA, 625 bp, Homo sapiens
accccagaaagagctgccagtaggaggagggccagcctcactggtgattggagtccagcagtcccactgattgggagtgctgagccaagcccatgtcgtgcttcgctgatgcatggctgggctgaagaaagagctctttgaatttttcatagaaaagactggtgcccaaaaggccagggctcgagaatgaggctgcctcaagcacagtgcttggcaggacaccagggctgaaaggtacagcaaagtcctcccagaatcgcttgtcagagcagggatttgcatcacagactggccactgcaaagacagatgggaactcacaggttttgtgtgtgtgtttgtggttcactgctgatggacgcatgtcagaagccacctgagccttggcccagccttcatgtggagtgaaaacccagacctgtgtgagcagcaggtacttgaagcaagagaagcaaggccgagcctccagggctttgtcagaggctccttccttcctggaatccaattgtacaaccaggagccagaggtcttggtggccggatgtgggtctaatcctggttccatggcctcccaactgagtgaatgagattataatgataaaatataatttactgtgtacccggcact

SEQ ID NO: 75045 - DNA, 500 bp, Homo sapiens
tggctaattttttttgtagaaatgaggttttgccatgttggccaggctggtcttgaactcctggcctcaagtgatcctcccaccagggcctcccaaagtgtgagattacagatctgagccaccaccttcagcctagagctgtttttaatgttttagttgttgttttctctttggtattaaatatagtaaattgaacagtatgcactcaataagcaaagcctgaatgaatgatacagtggagatgaatattacaagctattgtaggaaaactgctttatgaggcttgaactattgcttgatgaatgtcaatataaatgaataagtggtaatgacaccaaatctcagatcttcgtatcataaaaatgcttgcaggttactgcctaatcacacaccattaacatttcctttccttacctttgcctgtgttgtattacatatagtaactggaattaatttttatagtgtattttttcaagataccgaaataagtcctctaccaa

SEQ ID NO: 75046 - DNA, 426 bp, Homo sapiens
tgtagactaggttaatgcaaccaggttaaagaaactagagggttgaagtacaataaagggtgtccagaattcttaaatgcagtaaaacaaacaaacatgtagcagaggggccttgtctagggtatggatgtttttcgatttaaacaaaaaggaggaaaaataaccaaatgatctagcaattccttagaacgtctgtatactatctatccaatgtaataattaatccaaatcatctgtcactatgcactgccactccattctgataacaaccctctaaccatgtctcaccaggaaataacatttttattcatacaagttgcaggttattttcaagacagacttcctctgtgctgttcatcatgcataccttagctaaagtattgtagctagaatatagcagcaattttccaaccgatcttcgagtct

SEQ ID NO: 75047 - DNA, 800 bp, Homo sapiens
tacacacacacacacacacacacacacacacacacaagatgactaaaagtgttgggatggtaggcctcttgagtatgttgtgcatgggaatttgctgtcatcactcatagcaacgtgtataaactcaaggatcccatccatggaggtatgctgccactgcctctatacaacctacaaaatatttccttacaaataggacaaagaaagtaagaagataaatgatgacttttatttgccaacatttggttcagcacaactttcctaccctgtctctccccacctttgcccttaggctaaggagcagaaaagtgatttgtcaagatggagcaaggtatttaccagtctaaaacctaatgctgtaaaactaaatgagacaacttggggcttgaatgggtgctgggctgtaggtactgctgggtcactgttgctataaatggtcactggagcagattaataaatcaaggatcagtttcacccacatttaaaggactacttgactcatttctgtctcgagtaaatggactttggtagtagcaacgccataccgtgatgatatcatttgtgttgggaatcaaactgggcaatgcaagagtgtttttgaagcctaaatctatgtaagacttatcagtttgggagaggataataataaaagtaacaatcaatgcttccaaactccaattgactgtcttttttagcttttatatttacctagttgttatgctaaccaattcagctttttactgttgctgttgttgttgttttaagaaataaaatttctgattgctgttttcataaagttc

SEQ ID NO: 75048 - DNA, 1301 bp, Homo sapiens
aacaggagggactcttaaataacaagcccttgattgcctaattagcctgaatgccctcactttcattggaattcactgctttgatggtgtggaggtgcaaagaggccagctatcaaagagagacgccacttatctaaacaaaatccaggaacagaattcgagacccttgtctctcagacgaagattgtttgcccagtataagagatttcatcctcgcttttgatagaattatgattcttgggaaatctttacgtggaaaaaactgcctcagaataaacaccaagtgtttcaaaataactacaggaagtccaagccacagcaaaatttaaatctctatttacaaaatgaaggtattcattcccttattcattcagtcaccaaacacttctttttaaaacatttttctttatgtctcatggattagaccctaggcattagtgaattaatgcaagagcatttatctctttgtaagtttccatttagctgtaatggaaaagaagtgtctaaactagatgcagctaatttgaaattcctgtctcctttttttcttctgattaaaaaaaaaatgcatttaccagtactgtcagaaaaaaaaaaaggaaaaaggaaaaaaacacctatttaaagagacgctgaaccttctccactaatcctccttatccctcaggattgccatcactgattggggttggctttgggtatggaaagaacatagaacttggagtcggaggacctgattgtatctcagcttaggcacctagcagatgtatgacctaggataagtcattaacctctctggtttttttagatgtgatcggggttggaaggcaggtagcaatatctaccttactgtatcattttgaagactaactaggataacaatgtgaagccttgtcagttggcaagtatcaatggaaacttagccaacataagctcactccttttggatatcccaatgtgtgaaaaggccctttagcacctgagaaatcagaatgcctgggacatacatgtttggtgaacgaatgaaggagagatggtgacagaatttactaagacccagatgtgttcttgttttctaactttatccaggaaaataaacagcaaaagatttagcaaatcttatcatttcttagtgggttataaccatgagctattaattttgacacaaaaaaaaacttacctcctccctttatttcagcttgtgaggatatgtcactaattgacttcattaatttgattcaaactgtgcactagaagtgggatagaaacacatgaagtataccggaaagaaattatactcg

SEQ ID NO: 75049 - DNA, 282 bp, Homo sapiens
ccctgacaagcaatctcatttcattctcacccagccttgtgagataagtgccattacccattttacagatgaggaaaacaaggctcagaaaaacattaagtgacttgcccaggggctgtgtagttgctgcactgggattcattcattcatgtgtttacttgttcagcaagaaattttgtgtggatgcaatgtgccaggcctcaggcaggggctgcctgatgctgttggttttttgtgttgtgttatattgtgctgtgtttttgagagacagagtctcactgt

SEQ ID NO: 75050 - DNA, 338 bp, Homo sapiens
cagagagctggtctcaaccccctctccagccacttgagatggtgggaactcagtggtggctgagtctaatacggaagaattgcagaatccactggtgaattgctcctttgttctcctaatcttctaatccaggggaacagagaaaggagttttcctgggacttggggcccagccttccaaatccttctgtctttgaccccaccctgggttgggatgagggagggcaggtgagaagacaccagggagagtgtggtgtcaaaattgtgaaaacctttagccatggccacccatcacctttctcaaggagctggatttacattgatctcctgttaggaccc

SEQ ID NO: 75051 - DNA, 541 bp, Homo sapiens
actgaggcatgaagggaaccatggccgggaggcagagctactccagagagaaggcagcggcggcctgagcccctgtaaatgttatatatgtactttttttactatgtggcatcgaagcctgtggacattttcccagtccagagcctctgtttcggacaggtgggagcgtgcacatggctagggcacagtcaggtgtctgtggtcctgatctaggaagcagagactccggctttatcaccacctcggtgtctgtgctttccccttaaactgcctccctcctcacctggactccctcaccatgcctcctttcctctcactcctctgccaccccggtacccacccctctctgtagactgcaagactcaacaagtgacgtgctgagcaaaccctgagagaagaggtctgtttagggacacaggaagccaagtacagaaaaagcaaaagaattagcatggctttttcaatggatgtctattttacaggactggctgtagattattgttatagctttaaataaaaggatagttttcgtctcggccca

SEQ ID NO: 75052 - DNA, 430 bp, Homo sapiens
tctcaaaaaaaaaaaaaaagaaagaaagaaaagaaaagattgtatctttaatagtaattagagtggtttgtgttattttgattgtgagtattttaatgacagggcatacagtcagccctccatatccacgggttctacatccacagatccatccaactgtggatcaaaaatatttgaaaaaatttacaataataaaaaacaaaataatacagtataacagctatttgcatagtattataagtaatctagagatgatttaaagtatacaagaggatacgtgtagcttatatgcaaatattatactgttttatataaggaacttgagcatctgcaaattttggtatccttgggatggggtggatcctggaaccaatcctctacaaatactgaggtttgttgactgagaaagtgatggcacaacagcatttca

SEQ ID NO: 75053 - DNA, 196 bp, Homo sapiens
tacacacatacgaacttcttaacagttttctaaatcaatcttgagacagtcacttgtgaaaattccctcttggattaattacacttttcattaggcctgagattataagggcacatatatgacagagcttgtcatggttttagttggtcaaagaatagaataatcaatcatctccattcttagagaatggcataat

SEQ ID NO: 75054 - DNA, 111 bp, Homo sapiens
ctaattgtgtgtgtgtgaacaaatgtatacttttggctgagaagtataagagggttatttatctataattttgtatttaaaatgtatgtactaaatatattacatataata

SEQ ID NO: 75055 - DNA, 648 bp, Homo sapiens
catgcattgacagattactccttaggcaaaagtatttaagaagggataagtagaaattctgattggaatattaaaacattttttaaaaattaattatgtttagactgttgaaccgtgtttatataattttaggataatggatttatttgcttttttttttttttaagagaaactacttgaagtaaattcctacccatacttcttacttgtctcctttcctttgattaatctaaggaatgttgatgatgagaagaaagatggaaatgttgaggtggttgcatatttggtttgttagaatatctgtcatcacctgggctatttgaagctgctgttgctgatgttgttttattgactcatgaagacaactgaaaagattgctttgtaaccttatttttttctgatgtgtgtttacatccatgtctatatatacatattgcatatgtatatatctgtatgtgcatgtatatgttaaaaatctgatataagtgaaaacatgctctgtgctttgagcaagtagagtcttttccccttctttgtctttctctgagttgggctctaattttgggggaactcttgggggaaaatgaatgaaaaacttgctaaggtcctttttgctttatatacaaatatgtacattttagaattcat

SEQ ID NO: 75056 - DNA, 455 bp, Homo sapiens
agtaaatgcccgaaatgattaatagtataaaacccaagtagactatgtttttccacctgataacttggaatactactaagtgactaacaggctggtgcatacactagacgaagggaggattcatgctctgggcgggatggagctgaatggcataggatttcatcaaagactactaagtgactaacaggcaggtagtataaactgtggatgcactagacaagaaagtattcaggctctggggagaatggggctgaatggcataggatttcatcacactacccagaacacctttttttattgctaagtattattccattatatcatgtatcacggtctgttaatccattcatgtgttgaagggcatttgcattgtttttggcatttgtgaatcatgctgttaagaaaaatattcatctgcagtttttatataaacacaaatttattcctcatggata

SEQ ID NO: 75057 - DNA, 448 bp, Homo sapiens
ttttttttttgagacggaatctctctgtcgcccaggctggagtgcagtggcacaatcttggctcactgcaacctccacctcccgggttcaagtgattctcctgcctcagcctccagagtagctgggattacaggcgcccaccaccacgcccagctaatttttgtgtttttaataaagatggggtttcaccatgttggccaggctggtctcaaactcctgacctcaggtgatctgcccacctcggcctcccaaagtgctggattacaggcaggagccaccgtgtccggccaaaacttcctaatttctaatatagtaaacattaatggataaatctgtataaacaatagcttcttgaggtcttacatctttaagagtgtaaacggggccaggtacagtggctcacgcctgtaatacccatgctttggcaggcagaggcaggaggactgct

SEQ ID NO: 75058 - DNA, 649 bp, Homo sapiens
tctttctttttttttaaatcttttgctgtctttgaccaagccaaaagagttacaaccaaattcaaaaagccacccaacccaagatcaaaactggatgagtcaaaaatgtgtgctgttcctccaagaactcattgacatgccagtctctgaccttcctaggatgaggccacagctcccagtagctcatgaacctagactggcattcagtattttaggagtttcattgcatcatctgtccatccatccatccctccattccttcaaccatgaaacaattcacagcagtcttaatggctctttttttaaaagatttgttatagaattatctccttctacttccactctcagttaatccccactcagtgagtcagtgaataagatagtaagccagcatggctggtgagaaaccacaggacagaacaaagcggaccagttggcaggagactctgtagcctgttttgttagcattcaactctgcaccagctgccccccacatgaccctgcacacacttcaggggtgcacatgatgactgctccatgacaggaagaaaatatgagaaattctacttatagttaactttttagcctctaaagttttctactttgtttatattttataaaatataaaataataaaatactgtgaatat

SEQ ID NO: 75059 - DNA, 498 bp, Homo sapiens
gagaaatcaagaccaacaaccaaaggaggaggatgaggacagggacatgaggaggaggatctgcatgagaagccagaatggcagctatgtatacgtagctatgtaatggaagattagcagccaaatgcaatggcctttagaaaagaaggaaaggtgataataaaaccaagatctcaaaactgaacttgagaagggaaataaattaaattattaactttctgagtttttaaaaatcaaaataagctaggtgccacggtgtgcacctgtagtcccagctgttcaggaagctgagttaggaggatcacttgaacccaggagttcaagaccaacctgagtaacatagcgagaccctgactcaaaaaaagataatcaaaataatctcttggcatattgtgtggtatgtacacaaatggattacttctgtctctaccaattgcacatttcattgtccatttagcacctctttcaggagttagacagaaaacaattgcattaagt

SEQ ID NO: 75060 - DNA, 1176 bp, Homo sapiens
tcacaaaaaaggttaagaaatgacttaatggaagagattcagaagacccagaccgaccttacagggatgagaaactacaatattgacagtggaaactatcctggatggggtaacagattggatttcacagaagagaccatgaggcaccttgaagacacatcagtggaaactatttgcatttgttgggcctccagagagacagaaccaataggagatagctagatatatatacagacagatagatagatagatagatcgatagatagatagatagatagatagatagatagatagatagatagatagactgacagacagatgagaggggccttaggggcattggctgacacaattttggcaggtcaagagccccacaataggccatccacaagctggagacccaaggaagctgctagtgtgcccagtccgagtcctaaagcctcagagccagggaagccagtggtgtaattctcagaggccaaagcctgagaacctggaggccactggtataagtctgagtccatagacccagtgaactccaaacacaagagatacgagtgcacatcataatcaaattgcatataaccagtgataaacagaaaatcctaaaaccagtcagaggacaagggcatgttctgttgggaggcacaaagctgatgaggatggctgactcctcaggagcagcatgggtgagaggcagtggaatgtactaaggagaaaactgccaaattcacattctgtacctgacaaaatctttccgaagcgatggtgacataaagacattttcatacacacagaaactaagagtttcatccccagcagacctgcactacaagaaatgttaaatgatgtgcttcagggaagagaaaaatgaagagcatgtgcaccatccaggattttcctcgttatttgaatccctttggcccatctcccatttgccccaaggaatgagtgctggcagtgagctgcactttttttttctctaaacgggaaatgggttaaaagatgagtggcttggccgggtgcggtggctcatgtctctaatcccagcactttgggaggctgaggccagaggatcacttgagcccaggaactggggggtcatgctgggaaacatggcaagaccgcatctctattaaaaataaataaaagttaactgactgtttaaacaaaagt

SEQ ID NO: 75061 - DNA, 1122 bp, Homo sapiens
gccaatatgaatttttctagtcaacatattattgtaatttaggtatgttttgttttgttttgcacaactgtaaccctgttgttactttatatttcataatcaggcaaaaatacttacagttaataatatagatataatgttaaaaacaatttgcaaaccagcagaattttaagcttttaaaataattcaatggatatacatttttttctgaagattaagattttaattattcaacttaaaaagtagaaatgcattattatacatttttttaagaaaggacacgttatgttagcatctaggtaaggctgcatgatagcattcctatatttctctcataaaataggatttgaaggatgaaattaattgtatgaagcaatgtgattatatgaagagacacaaattaaaaagacaaattaaacctgaaattatatttaaaatatatttgagacatgaaatacatactgataatacatacctcatgaaagattttattctttattgtgttacagagcagtttcattttcatattaatatactgatcaggaagaggattcagtaacatttggcttccaaaactgctatctctaatacggtaccaatcctaggaactgtatactagttcctacttagaacaaaagtatcaagtttgcacacaagtaatctgccagctgacctttgtcgcaccttaaccagtcaccacttgctatggtataggattatactgatgttctttgagggattctgatgtgctaggcatggttctaagtactttacttgtattatcccatttaatacttagaacaaccccgtgagataagtagttattatcctcattttacacatgagggaccgaaggatagaaaagttatttttcaaaggtcttgcagttaataaatggcagagtgagcattcaagtccaggtagtcatattccagaggccacggttttaaccactaggctctagagctcccgccgcgcccctatgcattatgttcacaatgccaatctagatgcttcctcttttgtataaagtcactgacattctttagagtgggttgggtgcatccaaaaatgtataaaaatattattataataaacttattactgcttgtagggtaaaca

SEQ ID NO: 75062 - DNA, 515 bp, Homo sapiens
gccaatatgaatttttctagtcaacatattattgtaatttaggtatgttttgttttgttttgcacaactgtaaccctgttgttactttatatttcataatcaggcaaaaatacttacagttaataatatagatataatgttaaaaacaatttgcaaaccagcagaattttaagcttttaaaataattcaatggatatacatttttttctgaagattaagattttaattattcaacttaaaaagtagaaatgcattattatacatttttttaagaaaggacacgttatgttagcatctaggtaaggctgcatgatagcattcctatatttctctcataaaataggatttgaaggatgaaattaattgtatgaagcaatgtgattatatgaagagacacaaattaaaaagacaaattaaacctgaaattatatttaaaatatatttgagacatgaaatacatactgataatacatacctcaaaaaaaaaagtcgacgcggccgcgaatttagtagta

SEQ ID NO: 75063 - DNA, 543 bp, Homo sapiens
gatatttaatttgccacggcaaagccattgctgtgaagaatggataatatatgtcaatggtaatatatgaagaaataacacaggtgaatagcagaggcaataaatctgtttttaccacaggacttgtcttacacttttctcttagtaataaataaaataattttcgaccagatggagctggcttgaaatcctcttgtttatggcagtacatatcggttatgattcaaaaaatatagcccatttccaaaaacctgcaacaaagagatactttctcaggtgtcagtttcttggtcgggaatgaaaatagtgccaacctgtgataccttcactctaattttactttctgaggaagttttctgtaatagttatttggtgataattattaatactggtgagaaaatcaatgtaaaagaggagaaataacccacacaaccacatacaactaggaaatgatagatggatctgaaaaaaaggatatgcactcttaacaagttcaacacccaagtactattgcaagtaccagctgtatttcatggaaaaaaa

SEQ ID NO: 75064 - DNA, 1208 bp, Homo sapiens
gatatttaatttgccacggcaaagccattgctgtgaagaatggataatatatgtcaatggtaatatatgaagaaataacacaggtgaatagcagaggcaataaatctgtttttaccacaggacttgtcttacacttttctcttagtaataaataaaataattttcgaccagatggagctggcttgaaatcctcttgtttatggcagtacatatcggttatgattcaaaaaatatagcccatttccaaaaacctgcaacaaagagatactttctcagtcctgcaggctgtacaggaagcacagtggcatcttcttctggagaggcctcagggagcttttactcatgacagaaggcaaagcaggagcaggcacttcacatggtgaaagcaggaacaagagagagagagtgtgttggggtaggtgcactaccatggagacagcaccaagtcacgaaggattcgacctcatgatccaaacacttcccaccaagctccaccttcagcactggggatctggtttcaacatgagatttgggcgggacatccaaactatatcatctgtctccctcatccaagaccatgtgatccgtagctcacttttgtctagcaacagattaaatacagcattttctgtgtgatatctttgttgaggtctttgcagatggctgtttctttgtcctgaaactttcttcatctgctctttcaaaatgagtgactcttcatcctcgaagtctatgcttatatattgcttttcagaggaatcttttctgaactgggcattctgccttcaaccaactattttctattatagtttcctgtttgtgagttaatagtccttttgaaaatttgactactcatttaccttcttgggttatttgaaattatctcctcttcactagattctatagaagcatagccatgcctgccctctttactgtttctctactgacttgttgcaatgaatattgtcagtaaacatggaaataaatcagttattcagatatcctaccttggtgcttgcttagataactccacactgtgatgcctaatgacctacacagggctttctagcaaggagtgactttctttctgctacgtgtaataatgatccgtcaacttaaacatatagttatatttccagcagacggtttcttgaaactaatgtccagggtgtagttattcaaaaaagcaaactcttctcttgatttct

SEQ ID NO: 75065 - DNA, 506 bp, Homo sapiens
gtgccatatgtgcctgggcctttttctgacacccctgagttcacctatcagccccagcagcctgggcaggattttccggtttcaccatggctcaccctctgtcctgtgggctgcccagagtgtccaccccatctttgggacactgaggaacatttgaagttaagcagtgcttccttgaaagtttactctaagctggctctggggccacttcaacttcagaggagtgtggcagggtccttcctggaagctgtcatcatgcactgcaggacagcacagccaagatgcacctcctgcttgtcacgtggtccaaacctggcacccacgacaggcagagcacggggccactagggtgctaacctgggcccattccctgcaaaaactgttctctgtcctcagtaactattcccaaaatgtaagccttttgccctcaagtgtgaaagagtatattaagctcattgcaagtttactccagcccgcaaaaaagcaagagacaatcttgtcccact

SEQ ID NO: 75066 - DNA, 505 bp, Homo sapiens
tcactgagaaggcccctggaaacaggacttcagcacacaaaccctgcatcagagctgcttccggtctgagtgaaggtggagacctagggaagagcagtgactttcgtagatgtgagggaggaaaagggagcaggtgtgacggatccttccagtcagctggcatggggcccctccctcgtctgttggaactaagggcgcctctgcgtcccgcccctccgcacccccagcagtatgcctctctagcatgcttccggattcacctggagtttggtttatagttactgtgccaatggtagtctcttagttctatagatgtgccacggctatgtgagatgttatcagtatacaggagctatttgtactatctttgtagtttttagattcttccaaaataaaaagtttattataaaaaccccacaaccaacagcagattccagctgttggttgggggcagggaagggggctaatgaggggagaggccaggccccagaggggaactggggtg

SEQ ID NO: 75067 - DNA, 280 bp, Homo sapiens
attagaaatacaagaactcagtaacctatgggtccgggtaacagggctcgacatagtgagtttcagtgtgcttgagcctgcgttgggatgtgctgtggccatgagatgtaacaggtgtgtcgggcacgtgtagcttcctggccagctctggaagtgcaaagccagccttggcctcctcacctgtaaggtgagactggtgattgatgagttactgatctgtggcaaggatcagtgaggtggtgatggaagaaaggactttggtgacaagcttttgacagag

SEQ ID NO: 75068 - DNA, 639 bp, Homo sapiens
gttgtataactatttcattatatattacgatgtaataataataagagtaaagtgcacaataaacgtgatgtgcttgaatcatccccaaaccatcccccacccttatcctgtccatggaaaaattgtcttccacgaaaccaacgtagagaaaaacagagctaagacaaaccaaggctaactgctgatttaagtccctagatccagctattcttgaagccttctcagttacacaaaccaataatacttactttttttacttaaactattttctgtttccattacttacaaccaaaatagtcctgattaatacatagaataatgtgaatttttatttttattctgatttttattctgactttataaaaaagaacttttacaattatccattatgcttggataaatgcgtgtgtaaatatttgtttggggtggaggatgtacactgaaatgttaacattagatttctgcggaggatgagttggaaggaatgaaggagacattaatatctttttctggcagggcacggtggctcacacctgtaatcccagcattttggaaggtggaggtgggcggatcacctgagatggactcaacgactctcttaccgtccagctctcaagtcccttctcttgtgaaaatgga

SEQ ID NO: 75069 - DNA, 1021 bp, Homo sapiens
ggagaccattcagtgcacaatggatgtctgcatacacacatttaagatttgacaggatacagtgcaccagggggactattacgatgactaccagaaaataataccaagagaccaaagtgtactccttcacaggaggccctatgaacaaaaccagtcaaaaccaaacaagtcaaagtccaggcatataagcagctcaatagtatttgagtccaattggtcataatctttgtttggggtgtgatggtgattaagtattcaccatcacaccccgaatatattcaataataagtcaggttgctgggctagggcattaatagtacctataaagaaggaaaaattgagaaggggagacctcaaattagtttccttaggagatataaccaagtggtgataacttcactttcccaacctttttaaagttgtatgagctctaagtccctgcatttataatttcacatctgggaaaaaaataataataaagaggtatcagtttatgtcattagcctggtactgtaagtcatagtaacctggagacccaccagaaaaaaacataaagattccaaaaccctggaaaagctaagcttgccattcatgaaaagttttggacatcgatagtggtgatggtggcacaacatcgtgaatgtacttaatgccactgaactatacacttaacatagttaaaatgattaacttcatgctatgtatattttaccagagttaaaaaaaattttttttcttcatctattgaaattttcttcatgtatttgataaaagtatctaaagaaatagccaccttttaaattaagctttccatagtagcaaaatcaggggaagtgtagatacagcactcagtttgattcagcacaagtccccaacatgatcaaaatgatgtaaagctgcatgaggctgggtgcaggggctcacacctgtaatcccagtactttgggaggccaagatgagaggatcacttgagcccaggagtttgagaccagcctgggcaacatagggagaccctgtctct

SEQ ID NO: 75070 - DNA, 428 bp, Homo sapiens
gaaaaagagggtttattagaggtaggagaacaagacaattcaggtataacatagatgtagcatatgttatgtaaaaaggtttttttattttgaagaaatagacaacaaaaaataggagttttctagttaaaggcctcttttgcacgtacacgtgaatacacatattgaaatatttttcctggcagtttttcagggatctcatatttttagaccatgtgacagaggcttggaaagtttttatttgaaatttaaccaatcatatggtttataatgaaatgggaaaagttcccttgtcctgacagggtgcgtgatgcggggtgtggctcacttcttaagtgccccgctgctcagacctctaggggaccatacagacaggtaggctgtggggctccgactcacaacagtgtctaggagtgaatgtttacagc

SEQ ID NO: 75071 - DNA, 426 bp, Homo sapiens
tggtgttggtgtaatctatggagcttattcagatttcactagatagacacgcacttgtttgtgtatgtgtaactctgtgcgtttttatgtcatgtgtacagccttgcataaccaacaccatgatcaaaatacttatctgggctggatgccgtggctcacgcctgtaatcccagcactttgggaggccgaggcgggcagatcacttgaggtcaggagtttgagaccagcctggccaacatggtgaaacctcatgtctactaaaaatacaaaaatttgctgggcatggtggtgcatgcctgtagtcccagctacttgggaggctaaggcaggagaatcacttgaaccctggtggtggaggctgcagtaagccaagactgtgccactgcaatccagcctgggcgaaagagcaagactccgtctcaaaca

SEQ ID NO: 75072 - DNA, 456 bp, Homo sapiens
aggaggatcttccctcaaagatggattttcttcaggcaaggtcagcctgttatatgaatacttatgaatataatgcatattttatgatttgatttctctgttctctttgtttacttaattcaaagttaactgcggcctttctttatgctagtcttggcatacccaggagtaaaaagaaaattggagaatcatgaccttatttatgtatatctgcagcaaccgaatagtaaacataagcattgtaaaagataaaacttgagaaaacagtacattggagttatgactttgttgtgtcatatatacttctcactagagtatggtagtcaaatacaccttttttgcttttatccctgtctctccaaatatttagttaaagagtaaatgtttaagctggcttggctagaagtagttatttacctaccatattaagggataagatagaggaaatggaaggga

SEQ ID NO: 75073 - DNA, 368 bp, Homo sapiens
ttgcaccccactttcccagcttctgcaaactgtcttgaaatagactttatagaaagataggaaccatttccactaaaatgagtttaatgtagggaaaaaactcaaagtatacactgaaagtagacttctttgagtcatttacagttaaaaattattttaatctaaaggtgtatttgagtgtgtgcacaggtatacacatagaccgccccccaccccatactcattcctgtggcacacttcttgctagttgttggcactgttaaataaaaattacagggggccatcgttttggactaagcttctgcacttggccccaacaaaccagattgaaaatcaaaatggagtcactcatgctaaagttccatgtc

SEQ ID NO: 75074 - DNA, 750 bp, Homo sapiens
gaaaataatccaaggttcattaaaacccactcaaagtatataagtgaatgattaggtatagtagataatgttctgaattgccctagtttcatcccctctcatctgagcttgtgagtgttacatggggtcttccacctcccacacagcacagttctggtgtcttcagtgggtgctaccggccctctctagcattcattattgccacattgtattggccaccttctcctaactttttgtgcctagggactatcagggcccagcattgtggtggtgggactagatgactttcaaaccccttcctactttagtgttttctgatttttgtaatgagacaatagccatgtaagcttccatgttgatctatggggcttaactgattgagcagcctcatttaggagagctcacaattcttagagcaataagtctcaatgtcaataacttgtttgccagttgctcagcacagtgtatatacgtgcctgtgttcctgactgcttaaaagctggctgtgtgtggtggctcatgccgataatcccaccactttgggaggctgaagcaggtgggttgcttgagcttaggagtttgagaccaccctggccaacatggcgaaatcctgtctctaccaaagatacaaaaattaggtgggcatggtggtgcatgcctgtggccctagctactcgggaggctgaggtgggaggatcacttgagcccaggaagtcaaggctagagtgagctgtgatcacaccactacac

SEQ ID NO: 75075 - DNA, 388 bp, Homo sapiens
aattcagcctgcaactggaaccctgaattcactcaggaaatgtggcagtaatatgtgagacatatttctggttctgagccagcctcgtaggcacagtaacaccagggacttaaggttgaaaatgtggtttcaataagaatgttctcaaggaaatgtgtgtattggagataatttagatctacgtggagacttgcacagacctctacaaagccctaggaagaatatccgagatctgtataacataaaaactgtgagtctagtaaaaagctcagattccttattagagcctttccttctttgctcagtattacaggctgccagatagtgtagtttctctggaaaatcttgatttttattaagggcttatctagaacaaattatatgacag

SEQ ID NO: 75076 - DNA, 417 bp, Homo sapiens
ttttgaggaatgttgagaatatagcagtccttgcagccgatgtgtcatccccgaatcgctatcgtgtatatatcgctggcacttgcccccgacatatgttggtgttaatgtaaggtaattgtacacccctggctacacatactaaagcttgaagttgtagctgctaggaacgaaccatctggcacccttcctagcctccttactgatgcttgcaagaacggtttagctgatcctggtgagagatatttgaactactattgtcttgcacctaattccagctttcaaaagtctgccttggacgggcgcagtggctcacgcctataatcccaacactttgggaaactgaggcgggaggatcgcttgagcccaggtgtttgagaccagccaaggcaacttagcgagacccttgtctctaca

SEQ ID NO: 75077 - DNA, 625 bp, Homo sapiens
  misc_feature (80)..(80): n is a, c, g, or t
  misc_feature (86)..(86): n is a, c, g, or t
  misc_feature (94)..(94): n is a, c, g, or t
  misc_feature (111)..(111): n is a, c, g, or t
  misc_feature (149)..(149): n is a, c, g, or t
  misc_feature (160)..(160): n is a, c, g, or t
  misc_feature (165)..(165): n is a, c, g, or t
cctctctgagactcagttttgcaatctataaagctagtatcataatacccatcataaggttgttgttaggtctaaataantttatntagctaanggtgtttatatattttnaaattgtgtaaagtattaattagtaattatccttagtnatacataaatntatantaataagcagtcctatttggcactacttttggattaattttatctttaaataaaatatatttttcttgtgattcagctttttcattaattcagattacatctctataattaatgtgaactaacatggttttaatgtgacagattaggattcagccttttaatcttaaagaaaatattgagcagtaagaagataaagtatgtaatcttagactaaaaagacatagacccatgttacttggaacatattttaacatattaatgaactgaaagaagaaaaaaaatttttttttaaattttgtttctgttatttactttttagactaagaaatcaacaaatatttcttgagcactgttttggtgtcactcttattttcctttttccaaccatataactgaatattttcacaaataaactcctactaagggaaaatgctatttaagtagttaaatctaattagaa

SEQ ID NO: 75078 - DNA, 617 bp, Homo sapiens
attgcagcacttattaatggcaaaaccgcaatacttttgcaccaaaatatttaatggaatgaagtgttgttctattctaaaattgcaaataaagctacttgagctcctgaaagtaaatttgttgtaattttgtcctttgacagatccttttcctcctctttgagtctccttccggttcagcagatgaccttggttatgagtttcatgagaatcccagggtgatctaatagaagctctctcatttatcttctttccatctaattttttacaatttttattgttttttcttgtgtcagagaatcatctacctttgtttcaaagggttctagtcctgctttcaatcccatacacttgggcctgatggatctttcgaaagtgaaattgtggccccatgatggcatcatttgaaagccctccgatgactgtttcccgaggagggtgaactttctctccttacctgctcttgctttcctgcctccattttgctcatggcattcccttgaattaggttctatgagtggaatacagctttgaaggcaattccagagatccaacaaaaacccaggagattggaaggaattcatatttgtcaaaaaatgtgtagctcaaaaatataa

SEQ ID NO: 75079 - DNA, 648 bp, Homo sapiens
tactcaagacaaacatccacgagtcacaacttcagttattcccagtcttcaaaataacagaagggcaaagcaaagtaaacatgcaaaagcaaactaaaatctgattcttcttattagaaagaagagtgaatttctgcaattattttacatttgagaatttaatgtgatcaggtcataggtattctcacaacaaaatttgaagcatttgcttgactttatttcacctgttgaaacaaaagcagttctcagtatccaagtttattgctttactaaccaatgtctctgttttttgctttacaaacatggtattggttctcacaaattagttcaacttcccggtgcattcataaacatatacccacgtttagttttccttccagtgcacaaagtttccccagtaacctaaaagtactaaatgttctacattttgtgacttgtgttctttactttttggaatataaaaataatccttaaagtttaatttaaactgggagcagtgaattaaaaaaaaaatgtaagcttgaaactattgaaaagatcatgaaaatgcagagtattttttaggatgaagctcttcaaaaagaagaaaatttggtgaatctctgtactatagaaatggctgtatcaattggaggtaaaaaaaaaaaa

SEQ ID NO: 75080 - DNA, 1638 bp, Homo sapiens
  misc_feature (813)..(813): n is a, c, g, or t
  misc_feature (910)..(910): n is a, c, g, or t
  misc_feature (952)..(952): n is a, c, g, or t
  misc_feature (956)..(956): n is a, c, g, or t
  misc_feature (1149)..(1149): n is a, c, g, or t
  misc_feature (1175)..(1175): n is a, c, g, or t
  misc_feature (1177)..(1177): n is a, c, g, or t
aatatatgagaccttaaaagctttttattcttaaaacacatgcctgttcgccagttttgttgtaaggtaaaggtgcatgtctttgagcataggtccagaatggagttatcctgccccttcttgcataagctgcactcagatgaatttcctacagtttctatttttgggttcttttttaagtggcacatgaaactagatatgcatgaagcaatttttaaaaaaactttttattttgaaataataatagactctcaggaagttgtaaagaaactagagaggtcattgtatatttgcgcatactgccccagtggttacattttatgtaaccataatagagtataaaaacccagaaattgaagttggtacaatgtgtgtgcgtagttctgtgccattctatcaagtgtctgtaaatataactactactacaatttcctatgcagaactgtttcatcaccagaaagatctctctcctgcctctcttctgccaccatctctaactcctgccaaccactgatctgttctccatctctataattttgttactgtgagattaccaagtgatatgtgaccttcggaaatgattttctttactcagcataatgccctcaggtccgtcaaggtttgttgagtatatcagtagctaaactgggaccatttatttgtctcttcatctaatcatcaattaaaaatgaccacgcataaatgtaagcttttacagttaaacttattgtatataaatattgtcacttcggctgggcgcggtggctcacgcctgtaatcacagcactttgggaggccgaggagggcggatcncttgaggtcaggagttcaaaaccaacctggcccccatggtgaaaccctgtctctactaaaaatacaaatgagccaggtgtggtggtgtgcgcttgtnatcccagctacttgggaggttgaggcaggagaactgcttgancccngaaggtggaggttgcagtgagccgagatcatgccattgcactccagcctggccaacacagcaagactccttctcaaaaaaaaaaaatgtcacttcatgcttagaaatatcagtagatggccgggtgtggtggcttagcctgtaatcctaacagtttgggaggctgaggtcaggagatcgaggtcatcctggcnaacatggtgaaaccccatctctactnanaatacaaaaattagctgggtgtggtggcacgtgcctgtagtcccagctacttaggaggctgaggcaggagaatcgcttgaacccaggtggcggaggttgtagtgagctgagatcgcgccactgcactacagcctggtgagagagcgagaatctgtctcaaaaaaaataaaaaagggcagtagataaaaaaagtacaaacatgagtatcttgataaattctattctcaggctttcaggttcataatcctgttgatagatgacatgtagaaatagaagaatttgtaaatataggaatattcattgatgtttttaggactggattctaagggtggtttttacctctaatatccaaatactgctgcctcaagagaacaatttttgttttcaaaattccatgataaaaaagatgcagtaaccctgtatgtggcattttgtcaggttaattaagagcattttgcagc

SEQ ID NO: 75081 - DNA, 519 bp, Homo sapiens
cctcttttctgccataaacaaaacagaagcagtgaggtgtgagtatgaggacacacacaaagcctttgcaaaagcattttggagaatggataggcttttaggtcttggaagaaaagaagtgtccagggttcaatggagtggctgctctgcagttacttgtatattggaaggcaaacctaaaagtccttatgctcataagaattggaaaagaaaaaatacccatgatgggttggcagagagctccccttcccaggagatgccaaaaataatttctggaatattacatgttgcaaacactgatgtgattctgggtgtcatctgtcacatttgtaaaatgagtatattatcacacaatccttcgcaactgtgccagcacttccctagcaaactgcaaacttgagtttttcaggaaaacagtttacatgagaaaaggcaagttctttcccatttcgaatgaagtaccattaaactctgtcacctagtgaaaaataataaaaatacttgcaacttttaaagggt

SEQ ID NO: 75082 - DNA, 395 bp, Homo sapiens
ttttacccttgttctgtatcttaagcccttttgttagatttgatagtcattgttgcattgagctcttttctgaaaggtaagaacgtatttttgtcaaacacattgctataatgagtatgatgtgtggctgccattcttcagtctttcttcatttacatgtatcatcaatataatgcaaatactgtcaagggcagcattatctccttgaatctattttttgttttgttttttagtataggtttgtatttgtgctggtgcaggaggaagggggaaagtgttgggaagaaacatagaaagagagaaagaacatttactttctaacaaattttgacaatttgtttttctctttttttggtaatgatcaaaattatatattaaagaacttcccaaagcaa

SEQ ID NO: 75083 - DNA, 206 bp, Homo sapiens
tcttcccaagaacatcattgttttcatttacattttcaaatttattggttcaaaattctacataaagtgagaaaataaccaagtcttctttgcagtatatccctatacttatacctttatctaggcaataaatgctagagctgtcctttcacagatctggaaattaggttagctattttcagcgcttatggctctgttcttggagt

SEQ ID NO: 75084 - DNA, 2918 bp, Homo sapiens
tcttttccttttcctctttgactgagcaccgaggggcagttggcagcttcacctcagagctgcaggaaggaacggggcagtgaaaatcgaatcgggtgtgatcctaggccaagctcatggcccagcagggccagcaggggcagatggcaagtggagacagcaatctcaacttcaggatggtcgcagagatccagaacgtagagggtcagaacctgcaggagcaggtttgccctgagcccattttcaggttcttcagagaaaacaaggtggagattgcaagtgcaataacaaggccatttcctttccttatgggcctccgagaccgctccttcatctccgagcagatgtatgaacattttcaagaagcttttagaaacctggtcccagtgacaagagtgatgtattgtgtactcagtgaactggagaagacatttggctggtcacatctggaagcattgttcagcaggattaacctgatggcctatcctgatttaaacgagatttacagaagcttccagaatgtatgctatgaacactcacctctccaaatgaataatgtaaacgatttagaagatagacccagattactaccatatggtaaacaagagaacagcaatgcctgtcatgaaatggatgatatagcagtgcctcaggaagccttgagctcctcggcaaggtgtgagccaggtttctcttcagagtcttgtgagcagttagctctcccaaaggctggtggaggagatgctgaagatgcacccagcctactaccaggtgggggagtgtcctgtaaacttgctatacaaatagatgaaggagaatcagaagaaatgcccaagttactgccttatgatacagaagagacctttgatctaaaaactccccaagtcactaatgaaggagaaccagagaaggggctctgtctactaccaggtgaaggagaagagggcagtgatgactgttcggaaatgtgtgatggagaagagcgccaggaagcctctagctccctagcaagacgtgggtcagtgtctagtgaactagaaaatcacccaatgaatgaagaaggagaatcagaagagcttgcttctagcctgctatatgataatgtaccaggagcggagcaatcagcatatgaaaatgagaagtgttcctgtgtcatgtgtttctcagaagaggtgccaggaagcccagaagcaaggacggaaagtgatcaagcgtgtggcacaatggatactgtggatattgcaaacaactccactttgggaaaacccaagaggaaaagaagaaaaaagagggggcatggctggagcagaatgagaatgagaaggcagaaaaacagccaacaaaatgataatagcaaagccgacggccaggtggtctccagtgaaaagaaggcgaacgtgaatctgaaagacctttccaagattagggggagaaagagaggcaaacctggaacccgcttcactcagagtgacagagctgcacagaaaagagtccgatcaagagcttcaagaaagcacaaagatgaaactgtggattttaaggctcctttgcttccagtgacctgtggtggggtgaagggaattttacataagaagaaattgcagcaaggaatcttggtgaagtgtatacagactgaggatggaaaatggttcacccccacggaatttgaaatcaaaggaggccatgcaagatcaaagaactggaggctgagtgtgcgctgtggcgggtggcccctacgatggctgatggagaatggatttctgcctgatcctccaagaatacgttacaggaaaaaaaagagaatactgaagtctcaaaacaatagctcagttgacccttgtatgagaaacctggatgagtgtgaggtgtgccgggacggaggggagctgttctgttgcgacacttgttcaagagtcttccatgaggactgtcacatcccgcctgtggaagctgagaggaccccgtggaattgcatcttctgcaggatgaaggagtctccgggaagccaacagtgttgtcaggaatctgaggtcctggagaggcagatgtgtcctgaggaacagttgaaatgtgagttcctcctcttgaaagtctattgctgttctgagagctccttttttgccaagattccatactattattatattagagaggcgtgtcaaggcctgaaggagcccatgtggttggataaaatcaagaaaaggctgaatgagcacggttacccccaagtggaggggtttgtacaagacatgcgcctcatcttccagaaccacagggcctcttacaagtacaaggattttggccaaatgggatttagactggaggctgagtttgagaagaatttcaaggaagtgtttgctattcaggaaacaaatgggaacaattgactggattagtggatgctgaaagcattcagcaaatggcaccctaaaatatgccgctggtttgccactgacttcaaaatgaggtcacttgggcacagcacatgcagggaggggcttttctctgagcctccttcatctgcccaaagacaaatcctcaaaaggaaattcaatcatcatgaatcacaaccccaagtatctcatcagccagggaagagtaagtgggatcacagggaaggatgttggcagcgacaccatcccatacaggctcttacctcttctcctgagggctgctccagacaacatttattacccagaagaccttttgtctgaaaaccagccaagctttattcaggacacacttcttgccttcactttcccacttccgtggccacctccatgcagaagccctaagcccacattctttcgatagctcacggtggtgcatgagtgtccatcatctgactcttctcggagtctcatattttgtgggactcctgtgcaaacatatgttattaaaatttttttcctcctgtt

SEQ ID NO: 75085 - DNA, 2959 bp, Homo sapiens
tcttttccttttcctctttgactgagcaccgaggggcagttggcagcttcacctcagagctgcaggaaggaacggggcagtgaaaatcgaatcgggtgtgatcctaggccaagctcatggcccagcagggccagcaggggcagatggcaagtggagacagcaatctcaacttcaggatggtcgcagagatccagaacgtagagggtcagaacctgcaggagcaggtttgccctgagcccattttcaggttcttcagagaaaacaaggtggagattgcaagtgcaataacaaggccatttcctttccttatgggcctccgagaccgctccttcatctccgagcagatgtatgaacattttcaagaagcttttagaaacctggtcccagtgacaagagtgatgtattgtgtactcagtgaactggagaagacatttggctggtcacatctggaagcattgttcagcaggattaacctgatggcctatcctgatttaaacgagatttacagaagcttccagaatgtatgctatgaacactcacctctccaaatgaataatgtaaacgatttagaagatagacccagattactaccatatggtaaacaagagaacagcaatgcctgtcatgaaatggatgatatagcagtgcctcaggaagccttgagctcctcggcaaggtgtgagccaggtttctcttcagagtcttgtgagcagttagctctcccaaaggctggtggaggagatgctgaagatgcacccagcctactaccaggtgggggagtgtcctgtaaacttgctatacaaatagatgaaggagaatcagaagaaatgcccaagttactgccttatgatacagaagttctagaaagcaacgggatgatagatgcggcaaggacatacagcacagcaccaggggagaaacagggagaggaggaaggcaggaacagtcccagaaaaagaaaccaagacaaggagaagtaccaagagagtccagagggaagagacaaagagacctttgatctaaaaactccccaagtcactaatgaaggagaaccagagaaggggctctgtctactaccaggtgaaggagaagagggcagtgatgactgttcagaaatgtgtgatggagaagagccccaggaagcctctagctccctagcaagatgtgggtcagagggcagtgatgactgttcggaaatgtgtgatggagaagagcgccaggaagcccagaagcaaggacggaaagtgatcaagcgtgtggcacaatggatactgtggatattgcaaacaactccactttgggaaaacccaagaggaaaagaagaaaaaagagggggcatggctggagcagaatgagaatgagaaggcagaaaaacagccaacaaaatgataatagcaaagccgacggccaggtggtctccagtgaaaagaaggcgaacgtgaatctgaaagacctttccaagattagggggagaaagagaggcaaacctggaacccgcttcactcagagtgacagagctgcacagaaaagagtccgatcaagagcttcaagaaagcacaaagatgaaactgtggattttaaggctcctttgcttccagtgacctgtggtggggtgaagggaattttacataagaagaaattgcagcaaggaatcttggtgaagtgtatacagactgaggatggaaaatggttcacccccacggaatttgaaatcaaaggaggccatgcaagatcaaagaactggaggctgagtgtgcgctgtggcgggtggcccctacgatggctgatggagaatggatttctgcctgatcctccaagaatacgttacaggaaaaaaaagagaatactgaagtctcaaaacaatagctcagttgacccttgtatgagaaacctggatgagtgtgaggtgtgccgggacggaggggagctgttctgttgcgacacttgttcaagagtcttccatgaggactgtcacatcccgcctgtggaagctgagaggaccccgtggaattgcatcttctgcaggatgaaggagtctccgggaagccaacagtgttgtcaggaatctgaggtcctggagaggcagatgtgtcctgaggaacagttgaaatgtgagttcctcctcttgaaagtctattgctgttctgagagctccttttttgccaagattccatactattattatattagagaggcgtgtcaaggcctgaaggagcccatgtggttggataaaatcaagaaaaggctgaatgagcacggttacccccaagtggaggggtttgtacaagacatgcgcctcatcttccagaaccacagggcctcttacaagtacaaggattttggccaaatgggatttagactggaggctgagtttgagaagaatttcaaggaagtgtttgctattcaggaaacaaatgggaacaattgactggattagtggatgctgaaagcattcagcaaatggcaccctaaaatatgccgctggtttgccactgacttcaaaatgaggtcacttgggcacagcacatgcagggaggggcttttctctgagcctccttcatctgcccaaagacaaatcctcaaaaggaaattcaatcatcatgaatcacaaccccaagtatctcatcagccagggaagagtaagtgggatcacagggaaggatgttggcagcgacaccatcccatacaggctcttacctcttctcctgagggctgctccagacaacatttattacccagaagaccttttgtctgaaaaccagccaagctttattcaggacacacttcttgccttcactttcccacttccgtggccacctccatgcagaagccctaagcccacattctttcgatagctcacggtggtgcatgagtgtccatcatctgactcttctcggagtctcatattttgtgggactcctgtgcaaacatatgttattaaaatttttttcctcctgtt

SEQ ID NO: 75086 - DNA, 764 bp, Homo sapiens
tcttttccttttcctctttgactgagcaccgaggggcagttggcagcttcacctcagagctgcaggaaggaacggggcagtgaaaatcgaatcgggtgtgatcctaggccaagctcatggcccagcagggccagcaggggcagatggcaagtggagacagcaatctcaacttcaggatggtcgcagagatccagaacgtagagggtcagaacctgcaggagcaggtttgccctgagcccattttcaggttcttcagagaaaacaaggtggagattgcaagtgcaataacaaggccatttcctttccttatgggcctccgagaccgctccttcatctccgagcagatgtatgaacattttcaagaagcttttagaaacctggtcccagtgacaagagtgatgtattgtgtactcagtgaactggagaagacatttggctggtcacatctggaagcattgttcagcaggattaacctgatggcctatcctgatttaaacgagatttacagaagcttccagaatggtaactatagctctcaacagctttgggggattcaagcccatttcattcattgattcattcattcactcttcattcatatttgacaaatatttgactgagtgactattacatgccaagcccagggggaatataatgatgaaaaaacacacatgtcccatgtccttatggagtttacatacagtgggagtgacagacgttaaccaagtaatcctgcaaatggttgctcagccaggacttgattt

SEQ ID NO: 75087 - DNA, 3658 bp, Homo sapiens
  misc_feature (1322)..(1322): n is a, c, g, or t
  misc_feature (1326)..(1326): n is a, c, g, or t
tcttttccttttcctctttgactgagcaccgaggggcagttggcagcttcacctcagagctgcaggaaggaacggggcagtgaaaatcgaatcgggtgtgatcctaggccaagctcatggcccagcagggccagcaggggcagatggcaagtggagacagcaatctcaacttcaggtttccacaaatgctgtggtctgttgtagtctgttcatgcttaccagcaagatgctgaaaagtaaacttgaaactccatttaatgagatgggcttgcaaacttgtgggcttcactgagcaaataccaaatccctgaaggatggtcgcagagatccagaacgtagagggtcagaacctgcaggagcaggtttgccctgagcccattttcaggttcttcagagaaaacaaggtggagattgcaagtgcaataacaaggccatttcctttccttatgggcctccgagaccgctccttcatctccgagcagatgtatgaacattttcaagaagcttttagaaacctggtcccagtgacaagagtgatgtattgtgtactcagtgaactggagaagacatttggctggtcacatctggaagcattgttcagcaggattaacctgatggcctatcctgatttaaacgagatttacagaagcttccagaatgtatgctatgaacactcacctctccaaatgaataatgtaaacgatttagaagatagacccagattactaccatatggtaaacaagagaacagcaatgcctgtcatgaaatggatgatatagcagtgcctcaggaagccttgagctcctcggcaaggtgtgagccaggtttctcttcagagtcttgtgagcagttagctctcccaaaggctggtggaggagatgctgaagatgcacccagcctactaccaggtgggggagtgtcctgtaaacttgctatacaaatagatgaaggagaatcagaagaaatgcccaagttactgccttatgatacagaagttctagaaagcaacgggatgatagatgcggcaaggacatacagcacagcaccaggggagaaacagggagaggaggaaggcaggaacagtcccagaaaaagaaaccaagacaaggagaagtaccaagagagtccagagggaagagacaaagagacctttgatctaaaaactccccaagtcactaatgaaggagaaccagagaaggggctctgtctactaccaggtgaaggagaagagggcagtgatgactgttcagaaatgtgtgatggagaagagccccaggaagcctctagctccctagcaagatgtgggtcagtttcttgtttntctncagagacctttgatctaaagactccccaagtcactaatgaaggagaaccagagaaggagctcagtctactaccaggtgaaggagaagagggcagtgatgactgttcggaaatgtgtgatggagaagagcgccaggaagcctctagctccctagcaagacgtgggtcagtgtctagtgaactagaaaatcacccaatgaatgaagaaggagaatcagaagagcttgcttctagcctgctatatgataatgtaccaggagcggagcaatcagcatatgaaaatgagaagtgttcctgtgtcatgtgtttctcagaagaggtgccaggaagcccagaagcaaggacggaaagtgatcaagcgtgtggcacaatggatactgtggatattgcaaacaactccactttgggaaaacccaagaggaaaagaagaaaaaagagggggcatggctggagcagaatgagaatgagaaggcagaaaaacagccaacaaaatgataatagcaaagccgacggccaggtggtctccagtgaaaagaaggcgaacgtgaatctgaaagacctttccaagattagggggagaaagagaggcaaacctggaacccgcttcactcagagtgacagagctgcacagaaaagagtccgatcaagagcttcaagaaagcacaaagatgaaactgtggattttaaggctcctttgcttccagtgacctgtggtggggtgaagggaattttacataagaagaaattgcagcaaggaatcttggtgaagtgtatacagactgaggatggaaaatggttcacccccacggaatttgaaatcaaaggaggccatgcaagatcaaagaactggaggctgagtgtgcgctgtggcgggtggcccctacgatggctgatggagaatggatttctgcctgatcctccaagaatacgttacaggaaaaaaaagagaatactgaagtctcaaaacaatagctcagttgacccttgtatgagaaacctggatgagtgtgaggtgtgccgggacggaggggagctgttctgttgcgacacttgttcaagagtcttccatgaggactgtcacatcccgcctgtggaagctgagaggaccccgtggaattgcatcttctgcaggatgaaggagtctccgggaagccaacagtgttgtcaggaatctgaggtcctggagaggcagatgtgtcctgaggaacagttgaaatgtgagttcctcctcttgaaagtctattgctgttctgagagctccttttttgccaagattccatactattattatattagagaggcgtgtcaaggcctgaaggagcccatgtggttggataaaatcaagaaaaggctgaatgagcacggttacccccaagtggaggggtttgtacaagacatgcgcctcatcttccagaaccacagggcctcttacaagtacaaggattttggccaaatgggatttagactggaggctgagtttgagaagaatttcaaggaagtgtttgctattcaggaaacaaatgggaacaattgactggattagtggatgctgaaagcattcagcaaatggcaccctaaaatatgccgctggtttgccactgacttcaaaatgaggtcacttgggcacagcacatgcagggaggggcttttctctgagcctccttcatctgcccaaagacaaatcctcaaaaggaaattcaatcatcatgaatcacaaccccaagtatctcatcagccagggaagagtaagtgggatcacagggaaggatgttggcagcgacaccatcccatacaggctcttacctcttctcctgagggctgctccagacaacatttattacccagaagaccttttgtctgaaaaccagccaagctttattcaggacacacttcttgccttcactttcccacttccgtggccacctccatgcagaagccctaagcccacattctttcgatagctcacggtggtgcatgagtgtccatcatctgactcttctcggagtctcatattttgtgggactcctgtgcaaacatatgttattaaaatttttttcctcctgttaaaaaaaaaaaaaaaaaacaactccgaaaggaacccaagcgccgggtgcgcggacaacgaggtacaggacagggcccagagccaaagctggtaccctgacccaagattcccggcccacaacggggataaaccggcacggaccccataaaagaggaaccagataacatcaccagaaaagccagggtaaaccgtgactacagaaacgccgaagaacaaacagcacgcacaagcgcggcaacacccagcacaccagcacacaagcacgcaca

SEQ ID NO: 75088 - DNA, 839 bp, Homo sapiens
tcttttccttttcctctttgactgagcaccgaggggcagttggcagcttcacctcagagctgcaggaaggaacggggcagtgaaaatcgaatcgggtgtgatcctaggccaagctcatggcccagcagggccagcaggggcagatggcaagtggagacagcaatctcaacttcaggatggtcgcagagatccagaacgtagagggtcagaacctgcaggagcaggtttgccctgagcccattttcaggttcttcagagaaaacaaggtggagattgcaagtgcaataacaaggccatttcctttccttatgggcctccgagaccgctccttcatctccgagcagatgtatgaacattttcaagaagcttttagaaacctggtcccagtgacaagagtgatgtattgtgtactcagtgaactggagaagacatttggctggtcacatctggaagcattgttcagcaggattaacctgatggcctatcctgatttaaacgagatttacagaagcttccagaatgaaaatttatcatccagtgcagtcctgtgtcaacttgtttctccaaacaaagactggagaagtcacgaagagagcctagcacatactggtacactgaggaggagctgcatgtgaaagctatgaagacagaaaagggggttggtgggggcctttccgaaccatgtggttgaattgcagactgtgggaggcagggtgtgagagctgactctggagaaagaagttgaagtggattctggaaggcttgacaccctgtgctaaggaatctggagtttaatttttggaaaataaagaaggaataaagggcatttaaacgggaaa

SEQ ID NO: 75089 - DNA, 671 bp, Homo sapiens
gggaggtgttcccctccctcccatgactgagcccatcagccattcctgaaggaagacagtggtagccacaggaacggtggccatttccaagctccctgccctctgctcacccatgtccaatctctcaggaccccgtggaattgcatcttctgcaggatgaaggagtctccgggaagccaacagtgttgtcaggaatctgaggtcctggagaggcagatgtgtcctgaggaacagttggtaaatcagatgcaaaccccaagccttctcctttcccctcacacgtgagaaccatgaacaagcgcaagggcaggggaatgtactgaaaggagcctgctcttccgcgccacacttcaatggcactgatagaacaccacaccttgtttgcacaaaaaataactcagccatgacatgtctgtttccaagagccacacatgttagagaaacttgaggaagaagggtgtgagttctgtgctgtgtctcatgcatgtgggctcattctctccaagctgcttttcatttacggcctctttcttttgcagaaatgtgagttcctcctcttgaaagtctattgctgttctgagagctccttttttgccaagattccatactattattatgtaagtaacaacagcaacccatgattacaggctgccatgacattacctgaccct

SEQ ID NO: 75090 - DNA, 977 bp, Homo sapiens
tcttttccttttcctctttgactgagcaccgaggggcagttggcagcttcacctcagagctgcaggaaggaacggggcagtgaaaatcgaatcgggtgtgatcctaggccaagctcatggcccagcagggccagcaggggcagatggcaagtggagacagcaatctcaacttcaggtttccacaaatgctgtggtctgttgtagtctgttcatgcttaccagcaagatgctgaaaagtaaacttgaaactccatttaatgagatgggcttgcaaacttgtgggcttcactgagcaaataccaaatccctgaaggatggtcgcagagatccagaacgtagagggtcagaacctgcaggagcaggtttgccctgagcccattttcaggttcttcagagaaaacaaggtggagattgcaagtgcaataacaaggccatttcctttccttatgggcctccgagaccgctccttcatctccgagcagatgtatgaacattttcaagaagcttttagaaacctggtcccagtgacaagagtgatgtattgtgtactcagtgaactggagaagacatttggctggtcacatctggaagcattgttcagcaggattaacctgatggcctatcctgatttaaacgagatttacagaagcttccagaatgaaaatttatcatccagtgcagtcctgtgtcaacttgtttctccaaacaaagactggagaagtcacgaagagagcctagcacatactggtacactgaggaggagctgcatgtgaaagctatgaagacagaaaagggggttggtgggggcctttccgaaccatgtggttgaattgcagactgtgggaggcagggtgtgagagctgactctggagaaagaagttgaagtggattctggaaggcttgacaccctgtgctaaggaatctggagtttaatttttggaaaataaagaaggaataaagggcatttaaacgggaaa

SEQ ID NO: 75091 - DNA, 3251 bp, Homo sapiens
  misc_feature (1184)..(1184): n is a, c, g, or t
  misc_feature (1188)..(1188): n is a, c, g, or t
tcttttccttttcctctttgactgagcaccgaggggcagttggcagcttcacctcagagctgcaggaaggaacggggcagtgaaaatcgaatcgggtgtgatcctaggccaagctcatggcccagcagggccagcaggggcagatggcaagtggagacagcaatctcaacttcaggatggtcgcagagatccagaacgtagagggtcagaacctgcaggagcaggtttgccctgagcccattttcaggttcttcagagaaaacaaggtggagattgcaagtgcaataacaaggccatttcctttccttatgggcctccgagaccgctccttcatctccgagcagatgtatgaacattttcaagaagcttttagaaacctggtcccagtgacaagagtgatgtattgtgtactcagtgaactggagaagacatttggctggtcacatctggaagcattgttcagcaggattaacctgatggcctatcctgatttaaacgagatttacagaagcttccagaatgtatgctatgaacactcacctctccaaatgaataatgtaaacgatttagaagatagacccagattactaccatatggtaaacaagagaacagcaatgcctgtcatgaaatggatgatatagcagtgcctcaggaagccttgagctcctcggcaaggtgtgagccaggtttctcttcagagtcttgtgagcagttagctctcccaaaggctggtggaggagatgctgaagatgcacccagcctactaccaggtgggggagtgtcctgtaaacttgctatacaaatagatgaaggagaatcagaagaaatgcccaagttactgccttatgatacagaagttctagaaagcaacgggatgatagatgcggcaaggacatacagcacagcaccaggggagaaacagggagaggaggaaggcaggaacagtcccagaaaaagaaaccaagacaaggagaagtaccaagagagtccagagggaagagacaaagagacctttgatctaaaaactccccaagtcactaatgaaggagaaccagagaaggggctctgtctactaccaggtgaaggagaagagggcagtgatgactgttcagaaatgtgtgatggagaagagccccaggaagcctctagctccctagcaagatgtgggtcagtttcttgtttntctncagagacctttgatctaaagactccccaagtcactaatgaaggagaaccagagaaggagctcagtctactaccaggtgaaggagaagagggcagtgatgactgttcggaaatgtgtgatggagaagagcgccaggaagcctctagctccctagcaagacgtgggtcagtgtctagtgaactagaaaatcacccaatgaatgaagaaggagaatcagaagagcttgcttctagcctgctatatgataatgtaccaggagcggagcaatcagcatatgaaaatgagaagtgttcctgtgtcatgtgtttctcagaagaggtgccaggaagcccagaagcaaggacggaaagtgatcaagcgtgtggcacaatggatactgtggatattgcaaacaactccactttgggaaaacccaagaggaaaagaagaaaaaagagggggcatggctggagcagaatgagaatgagaaggcagaaaaacagccaacaaaatgataatagcaaagccgacggccaggtggtctccagtgaaaagaaggcgaacgtgaatctgaaagacctttccaagattagggggagaaagagaggcaaacctggaacccgcttcactcagagtgacagagctgcacagaaaagagtccgatcaagagcttcaagaaagcacaaagatgaaactgtggattttaaggctcctttgcttccagtgacctgtggtggggtgaagggaattttacataagaagaaattgcagcaaggaatcttggtgaagtgtatacagactgaggatggaaaatggttcacccccacggaatttgaaatcaaaggaggccatgcaagatcaaagaactggaggctgagtgtgcgctgtggcgggtggcccctacgatggctgatggagaatggatttctgcctgatcctccaagaatacgttacaggaaaaaaaagagaatactgaagtctcaaaacaatagctcagttgacccttgtatgagaaacctggatgagtgtgaggtgtgccgggacggaggggagctgttctgttgcgacacttgttcaagagtcttccatgaggactgtcacatcccgcctgtggaagctgagaggaccccgtggaattgcatcttctgcaggatgaaggagtctccgggaagccaacagtgttgtcaggaatctgaggtcctggagaggcagatgtgtcctgaggaacagttgaaatgtgagttcctcctcttgaaagtctattgctgttctgagagctccttttttgccaagattccatactattattatattagagaggcgtgtcaaggcctgaaggagcccatgtggttggataaaatcaagaaaaggctgaatgagcacggttacccccaagtggaggggtttgtacaagacatgcgcctcatcttccagaaccacagggcctcttacaagtacaaggattttggccaaatgggatttagactggaggctgagtttgagaagaatttcaaggaagtgtttgctattcaggaaacaaatgggaacaattgactggattagtggatgctgaaagcattcagcaaatggcaccctaaaatatgccgctggtttgccactgacttcaaaatgaggtcacttgggcacagcacatgcagggaggggcttttctctgagcctccttcatctgcccaaagacaaatcctcaaaaggaaattcaatcatcatgaatcacaaccccaagtatctcatcagccagggaagagtaagtgggatcacagggaaggatgttggcagcgacaccatcccatacaggctcttacctcttctcctgagggctgctccagacaacatttattacccagaagaccttttgtctgaaaaccagccaagctttattcaggacacacttcttgccttcactttcccacttccgtggccacctccatgcagaagccctaagcccacattctttcgatagctcacggtggtgcatgagtgtccatcatctgactcttctcggagtctcatattttgtgggactcctgtgcaaacatatgttattaaaatttttttcctcctgtt

SEQ ID NO: 75092 - DNA, 3440 bp, Homo sapiens
  misc_feature (1104)..(1104): n is a, c, g, or t
  misc_feature (1108)..(1108): n is a, c, g, or t
cagcaataaaaagaatgaactgttatcacatagagcaacatggataaatctcaaaaacattatgttgagcaaaataagcaagttgtaagagtacatactgcatgatcctatttatataagtacaagtacagacaatacagacaagtacagtgccagaaaggaaggcgccattgctggtgataggaaccagaacagtggtgtcttaagcacaaagcaattttctgggatggtggaaatgttctgaatcttgactgggatgttggtttcacaatgatttacacttaagatatgtgcctctcaatgaaaaaaaggggaacaaggctctgttggacctcgggggtgggagatcctggggcttggacatcaagttcatcttgagcacactgaggtctctcctctggtcactgtctgagtttggtaattttcacattgttttcctcagtatgctatgaacactcacctctccaaatgaataatgtaaacgatttagaagatagacccagattactaccatatggtaaacaagagaacagcaatgcctgtcatgaaatggatgatatagcagtgcctcaggaagccttgagctcctcggcaaggtgtgagccaggtttctcttcagagtcttgtgagcagttagctctcccaaaggctggtggaggagatgctgaagatgcacccagcctactaccaggtgggggagtgtcctgtaaacttgctatacaaatagatgaaggagaatcagaagaaatgcccaagttactgccttatgatacagaagttctagaaagcaacgggatgatagatgcggcaaggacatacagcacagcaccaggggagaaacagggagaggaggaaggcaggaacagtcccagaaaaagaaaccaagacaaggagaagtaccaagagagtccagagggaagagacaaagagacctttgatctaaaaactccccaagtcactaatgaaggagaaccagagaaggggctctgtctactaccaggtgaaggagaagagggcagtgatgactgttcagaaatgtgtgatggagaagagccccaggaagcctctagctccctagcaagatgtgggtcagtttcttgtttntctncagagacctttgatctaaagactccccaagtcactaatgaaggagaaccagagaaggagctcagtctactaccaggtgaaggagaagagggcagtgatgactgttcggaaatgtgtgatggagaagagcgccaggaagcctctagctccctagcaagacgtgggtcagtgtctagtgaactagaaaatcacccaatgaatgaagaaggagaatcagaagagcttgcttctagcctgctatatgataatgtaccaggagcggagcaatcagcatatgaaaatgagaagtgttcctgtgtcatgtgtttctcagaagaggtgccaggaagcccagaagcaaggacggaaagtgatcaagcgtgtggcacaatggatactgtggatattgcaaacaactccactttgggaaaacccaagaggaaaagaagaaaaaagagggggcatggctggagcagaatgagaatgagaaggcagaaaaacagccaacaaaatgataatagcaaagccgacggccaggtggtctccagtgaaaagaaggcgaacgtgaatctgaaagacctttccaagattagggggagaaagagaggcaaacctggaacccgcttcactcagagtgacagagctgcacagaaaagagtccgatcaagagcttcaagaaagcacaaagatgaaactgtggattttaaggctcctttgcttccagtgacctgtggtggggtgaagggaattttacataagaagaaattgcagcaaggaatcttggtgaagtgtatacagactgaggatggaaaatggttcacccccacggaatttgaaatcaaaggaggccatgcaagatcaaagaactggaggctgagtgtgcgctgtggcgggtggcccctacgatggctgatggagaatggatttctgcctgatcctccaagaatacgttacaggaaaaaaaagagaatactgaagtctcaaaacaatagctcagttgacccttgtatgagaaacctggatgagtgtgaggtgtgccgggacggaggggagctgttctgttgcgacacttgttcaagagtcttccatgaggactgtcacatcccgcctgtggaagctgagaggaccccgtggaattgcatcttctgcaggatgaaggagtctccgggaagccaacagtgttgtcaggaatctgaggtcctggagaggcagatgtgtcctgaggaacagttgaaatgtgagttcctcctcttgaaagtctattgctgttctgagagctccttttttgccaagattccatactattattatattagagaggcgtgtcaaggcctgaaggagcccatgtggttggataaaatcaagaaaaggctgaatgagcacggttacccccaagtggaggggtttgtacaagacatgcgcctcatcttccagaaccacagggcctcttacaagtacaaggattttggccaaatgggatttagactggaggctgagtttgagaagaatttcaaggaagtgtttgctattcaggaaacaaatgggaacaattgactggattagtggatgctgaaagcattcagcaaatggcaccctaaaatatgccgctggtttgccactgacttcaaaatgaggtcacttgggcacagcacatgcagggaggggcttttctctgagcctccttcatctgcccaaagacaaatcctcaaaaggaaattcaatcatcatgaatcacaaccccaagtatctcatcagccagggaagagtaagtgggatcacagggaaggatgttggcagcgacaccatcccatacaggctcttacctcttctcctgagggctgctccagacaacatttattacccagaagaccttttgtctgaaaaccagccaagctttattcaggacacacttcttgccttcactttcccacttccgtggccacctccatgcagaagccctaagcccacattctttcgatagctcacggtggtgcatgagtgtccatcatctgactcttctcggagtctcatattttgtgggactcctgtgcaaacatatgttattaaaatttttttcctcctgttaaaaaaaaaaaaaaaaaacaactccgaaaggaacccaagcgccgggtgcgcggacaacgaggtacaggacagggcccagagccaaagctggtaccctgacccaagattcccggcccacaacggggataaaccggcacggaccccataaaagaggaaccagataacatcaccagaaaagccagggtaaaccgtgactacagaaacgccgaagaacaaacagcacgcacaagcgcggcaacacccagcacaccagcacacaagcacgcaca

SEQ ID NO: 75093 - DNA, 1261 bp, Homo sapiens
aagtaacaacagcaacccatgattacaggctgccatgacattacctgaccctgaaatgggccctcgtgagatttgtgatcttaatcccacggggcaagagcacacgctgtcgttagttgccttcaccttgttgtatttctgctggattttatgggaatccacagaaggtagacactgaactatgctggtagcttttccattggtatatttgtcaccagattagagaggcgtgtcaaggcctgaaggagcccatgtggttggataaaatcaagaaaaggctgaatgagcacggttacccccaagtggaggggtttgtacaagacatgcgcctcatcttccagaaccacagggcctcttacaagtacaaggattttggccaaatgggatttagactggaggctgagtttgagaagaatttcaaggaagtgtttgctattcaggaaacaaatgggaacaattgactggattagtggatgctgaaagcattcagcaaatggcaccctaaaatatgccgctggtttgccactgacttcaaaatgaggtcacttgggcacagcacatgcagggaggggcttttctctgagcctccttcatctgcccaaagacaaatcctcaaaaggaaattcaatcatcatgaatcacaaccccaagtatctcatcagccagggaagagtaagtgggatcacagggaaggatgttggcagcgacaccatcccatacaggctcttacctcttctcctgagggctgctccagacaacatttattacccagaagaccttttgtctgaaaaccagccaagctttattcaggacacacttcttgccttcactttcccacttccgtggccacctccatgcagaagccctaagcccacattctttcgatagctcacggtggtgcatgagtgtccatcatctgactcttctcggagtctcatattttgtgggactcctgtgcaaacatatgttattaaaatttttttcctcctgttaaaaaaaaaaaaaaaaaacaactccgaaaggaacccaagcgccgggtgcgcggacaacgaggtacaggacagggcccagagccaaagctggtaccctgacccaagattcccggcccacaacggggataaaccggcacggaccccataaaagaggaaccagataacatcaccagaaaagccagggtaaaccgtgactacagaaacgccgaagaacaaacagcacgcacaagcgcggcaacacccagcacaccagcacacaagcacgcaca

SEQ ID NO: 75094 - DNA, 2709 bp, Homo sapiens
  misc_feature (1104)..(1104): n is a, c, g, or t
  misc_feature (1108)..(1108): n is a, c, g, or t
cagcaataaaaagaatgaactgttatcacatagagcaacatggataaatctcaaaaacattatgttgagcaaaataagcaagttgtaagagtacatactgcatgatcctatttatataagtacaagtacagacaatacagacaagtacagtgccagaaaggaaggcgccattgctggtgataggaaccagaacagtggtgtcttaagcacaaagcaattttctgggatggtggaaatgttctgaatcttgactgggatgttggtttcacaatgatttacacttaagatatgtgcctctcaatgaaaaaaaggggaacaaggctctgttggacctcgggggtgggagatcctggggcttggacatcaagttcatcttgagcacactgaggtctctcctctggtcactgtctgagtttggtaattttcacattgttttcctcagtatgctatgaacactcacctctccaaatgaataatgtaaacgatttagaagatagacccagattactaccatatggtaaacaagagaacagcaatgcctgtcatgaaatggatgatatagcagtgcctcaggaagccttgagctcctcggcaaggtgtgagccaggtttctcttcagagtcttgtgagcagttagctctcccaaaggctggtggaggagatgctgaagatgcacccagcctactaccaggtgggggagtgtcctgtaaacttgctatacaaatagatgaaggagaatcagaagaaatgcccaagttactgccttatgatacagaagttctagaaagcaacgggatgatagatgcggcaaggacatacagcacagcaccaggggagaaacagggagaggaggaaggcaggaacagtcccagaaaaagaaaccaagacaaggagaagtaccaagagagtccagagggaagagacaaagagacctttgatctaaaaactccccaagtcactaatgaaggagaaccagagaaggggctctgtctactaccaggtgaaggagaagagggcagtgatgactgttcagaaatgtgtgatggagaagagccccaggaagcctctagctccctagcaagatgtgggtcagtttcttgtttntctncagagacctttgatctaaagactccccaagtcactaatgaaggagaaccagagaaggagctcagtctactaccaggtgaaggagaagagggcagtgatgactgttcggaaatgtgtgatggagaagagcgccaggaagcctctagctccctagcaagacgtgggtcagtgtctagtgaactagaaaatcacccaatgaatgaagaaggagaatcagaagagcttgcttctagcctgctatatgataatgtaccaggagcggagcaatcagcatatgaaaatgagaagtgttcctgtgtcatgtgtttctcagaagaggtgccaggaagcccagaagcaaggacggaaagtgatcaagcgtgtggcacaatggatactgtggatattgcaaacaactccactttgggaaaacccaagaggaaaagaagaaaaaagagggggcatggctggagcagaatgagaatgagaaggcagaaaaacagccaacaaaatgataatagcaaagccgacggccaggtggtctccagtgaaaagaaggcgaacgtgaatctgaaagacctttccaagattagggggagaaagagaggcaaacctggaacccgcttcactcagagtgacagagctgcacagaaaagagtccgatcaagagcttcaagaaagcacaaagatgaaactgtggattttaaggctcctttgcttccagtgacctgtggtggggtgaagggaattttacataagaagaaattgcagcaaggaatcttggtgaagtgtatacagactgaggatggaaaatggttcacccccacggaatttgaaatcaaaggaggccatgcaagatcaaagaactggaggctgagtgtgcgctgtggcgggtggcccctacgatggctgatggagaatggatttctgcctgatcctccaagaatacgttacaggaaaaaaaagagaatactgaagtctcaaaacaatagctcagttgacccttgtatgagaaacctggatgagtgtgaggtgtgccgggacggaggggagctgttctgttgcgacacttgttcaagagtcttccatgaggactgtcacatcccgcctgtggaagctgagaggtaagtgacatgcaggcgtctctctttttgtcctttaagggatcttccacctgccatgcgcactctccagcagagtgccggcttgtgtctagatggggaaagagcaggttcatcgggtactgggacccagcagtgtgatccagagagcagtgggagacgctggcagcaggaggttaatgtcctctgtgctctcagggacacctcctctgatatgctgagggcagtgttggggacctttgcctacataccggcattgtcctttccttgaagttttgcagctgggtgggttggagacaagaaacaccagttgtttatattttgtgcttattcatacaagacaggaagcacgatctcattgggctgttggaggcccgaggtccctggggctgaaaacccagtttctgaaactcaggcctgacagacagggttccctgtgctcccagcagctcagacagagaaaggagagtccacactcacggtgacaccaccttcctcagac

SEQ ID NO: 75095 - DNA, 572 bp, Homo sapiens
acgcgtccggatgaggtatcctcaagggcactacgactgtgcccttggggatgaggtatcctcaagggcactacgactgtgcccttggggatgaggtatcctctgaaaatggtgtctgttttgtatgacaaccaagaatttcctgatccagaaaagtttaagccagaacacttcctgaatgaaaatggaaagttcaagtacagtgactatttcaagccattttccacaggaaaacgagtgtgtgctggagaaggcctggctcgcatggagttgtttcttttgttgtgtgccattttgcagcattttaatttgaagcctctcgttgacccaaaggatatcgacctcagccctatacatattgggtttggctgtatcccaccacgttacaaactctgtgtcattccccgctcatgagtgtgtggaggacaccctgaaccccccgctttcaaacaagatttcgaattgtttgaggtcaggatttctcaaactgattcctttctttgcatatgagtatttgaaaataaatattttcccagaatataaataaatcatcacatgattattttaactat

SEQ ID NO: 75096 - DNA, 1675 bp, Homo sapiens
gtctcccgggctggcagcagggccccagcggcaccatgtctgccctcggagtcaccgtggccctgctggtgtgggcggccttcctcctgctggtgtccatgtggaggcaggtgcacagcagctggaatctgcccccaggccctttcccgcttcccatcatcgggaacctcttccagttggaattgaagaatattcccaagtccttcacccggttggcccagcgcttcgggccggtgttcacgctgtacgtgggctcgcagcgcatggtggtgatgcacggctacaaggcggtgaaggaagcgctgctggactacaaggacgagttctcgggcagaggcgacctccccgcgttccatgcgcacagggacaggggaatcatttttaataatggacctacctggaaggacatccggcggttttccctgaccaccctccggaactatgggatggggaaacagggcaatgagagccggatccagagggaggcccacttcctgctggaagcactcaggaagacccaaggccagcctttcgaccccaccttcctcatcggctgcgcgccctgcaacgtcatagccgacatcctcttccgcaagcattttgactacaatgatgagaagtttctaaggctgatgtatttgtttaatgagaacttccacctactcagcactccctggctccagctttacaataattttcccagctttctacactacttgcctggaagccacagaaaagtcataaaaaatgtggctgaagtaaaagagtatgtgtctgaaagggtgaaggagcaccatcaatctctggaccccaactgtccccgggacctcaccgactgcctgctcgtggaaatggagaaggaaaagcacagtgcagagcgcttgtacacaatggacggtatcaccgtgactgtggccgacctgttctttgcggggacagagaccaccagcacaactctgagatatgggctcctgattctcatgaaataccctgagatcgaagagaagctccatgaagaaattgacagggtgattgggccaagccgaatccctgccatcaaggataggcaagagatgccctacatggatgctgtggtgcatgagattcagcggttcatcaccctcgtgccctccaacctgccccatgaagcaacccgagacaccattttcagaggatacctcatccccaagggcacagtcgtagtgccaactctggactctgttttgtatgacaaccaagaatttcctgatccagaaaagtttaagccagaacacttcctgaatgaaaatggaaagttcaagtacagtgactatttcaagccattttccacaggaaaacgagtgtgtgctggagaaggcctggctcgcatggagttgtttcttttgttgtgtgccattttgcagcattttaatttgaagcctctcgttgacccaaaggatatcgacctcagccctatacatattgggtttggctgtatcccaccacgttacaaactctgtgtcattccccgctcatgagtgtgtggaggacaccctgaaccccccgctttcaaacaagatttcgaattgtttgaggtcaggatttctcaaactgattcctttctttgcatatgagtatttgaaaataaatattttcccagaatataaataaatcatcacatgattattttaactat

SEQ ID NO: 75097 - DNA, 811 bp, Homo sapiens
gtctcccgggctggcagcagggccccagcggcaccatgtctgccctcggagtcaccgtggccctgctggtgtgggcggccttcctcctgctggtgtccatgtggaggcaggtgcacagcagctggaatctgcccccaggccctttcccgcttcccatcatcgggaacctcttccagttggaattgaagaatattcccaagtccttcacccggttggcccagcgcttcgggccggtgttcacgctgtacgtgggctcgcagcgcatggtggtgatgcacggctacaaggcggtgaaggaagcgctgctggactacaaggacgagttctcgggcagaggcgacctccccgcgttccatgcgcacagggacaggggaatcatttttaataatggacctacctggaaggacatccggcggttttccctgaccaccctccggaactatgggatggggaaacagggcaatgagagccggatccagagggaggcccacttcctgctggaagcactcaggaagacccaaggccagcctttcgaccccaccttcctcatcggctgcgcgccctgcaacgtcatagccgacatcctcttccgcaagcattttgactacaatgatgagaagtttctaaggctgatgtatttgtttaatgagaacttccacctactcagcactccctggctccagctttacaataattttcccagctttctacactacttgcctggaagccacagaaaagtcataaaaaatgtggctgaagtcccggacttaccgatggctgttctgaaatggagaggaaagcccgtgccaaa

SEQ ID NO: 75098 - DNA, 1769 bp, Homo sapiens
  misc_feature (1769)..(1769): n is a, c, g, or t
gtctcccgggctggcagcagggccccagcggcaccatgtctgccctcggagtcaccgtggccctgctggtgtgggcggccttcctcctgctggtgtccatgtggaggcaggtgcacagcagctggaatctgcccccaggccctttcccgcttcccatcatcgggaacctcttccagttggaattgaagaatattcccaagtccttcacccggttggcccagcgcttcgggccggtgttcacgctgtacgtgggctcgcagcgcatggtggtgatgcacggctacaaggcggtgaaggaagcgctgctggactacaaggacgagttctcgggcagaggcgacctccccgcgttccatgcgcacagggacaggggaatcatttttaataatggacctacctggaaggacatccggcggttttccctgaccaccctccggaactatgggatggggaaacagggcaatgagagccggatccagagggaggcccacttcctgctggaagcactcaggaagacccaaggccagcctttcgaccccaccttcctcatcggctgcgcgccctgcaacgtcatagccgacatcctcttccgcaagcattttgactacaatgatgagaagtttctaaggctgatgtatttgtttaatgagaacttccacctactcagcactccctggctccagctttacaataattttcccagctttctacactacttgcctggaagccacagaaaagtcataaaaaatgtggctgaagtaaaagagtatgtgtctgaaagggtgaaggagcaccatcaatctctggaccccaactgtccccgggacctcaccgactgcctgctcgtggaaatggagaaggaaaagcacagtgcagagcgcttgtacacaatggacggtatcaccgtgactgtggccgacctgttctttgcggggacagagaccaccagcacaactctgagatatgggctcctgattctcatgaaataccctgagatcgaagagaagctccatgaagaaattgacagggtgattgggccaagccgaatccctgccatcaaggataggcaagagatgccctacatggatgctgtggtgcatgagattcagcggttcatcaccctcgtgccctccaacctgccccatgaagcaacccgagacaccattttcagaggatacctcatccccaagggcacagtcgtagtgccaactctggactctgttttgtatgacaaccaagaatttcctgatccagaaaagtttaagccagaacacttcctgaatgaaaatggaaagttcaagtacagtgactatttcaagccattttccacaggaaaacgagtgtgtgctggagaaggcctggctcgcatggagttgtttcttttgttgtgtgccattttgcagcattttaatttgaagcctctcgttgacccaaaggatatcgacctcagccctatacatattgggtttggctgtatcccaccacgttacaaactctgtgtcattccccgctcatgagtgtgtggaggacaccctgaaccccccgctttcaaacaagatttcgaattgtttgaggtcaggatttctcaaactgattcctttctttgcatatgagtatttgaaaataaatattttcccagaatataaaaaactaaaacaacaaaaaaatataaaaaagattaatgaaccaagaaaatcacaaaaacagaaaactcttaatagcaagaaacatacatgaaaaaaaaattgcgcccgcaattggggctaacn

SEQ ID NO: 75099 - DNA, 1621 bp, Homo sapiens
gtctcccgggctggcagcagggccccagcggcaccatgtctgccctcggagtcaccgtggccctgctggtgtgggcggccttcctcctgctggtgtccatgtggaggcaggtgcacagcagctggaatctgcccccaggccctttcccgcttcccatcatcgggaacctcttccagttggaattgaagaatattcccaagtccttcacccggttggcccagcgcttcgggccggtgttcacgctgtacgtgggctcgcagcgcatggtggtgatgcacggctacaaggcggtgaaggaagcgctgctggactacaaggacgagttctcgggcagaggcgacctccccgcgttccatgcgcacagggacaggggaatcatttttaataatggacctacctggaaggacatccggcggttttccctgaccaccctccggaactatgggatggggaaacagggcaatgagagccggatccagagggaggcccacttcctgctggaagcactcaggaagacccaaggccagcctttcgaccccaccttcctcatcggctgcgcgccctgcaacgtcatagccgacatcctcttccgcaagcattttgactacaatgatgagaagtttctaaggctgatgtatttgtttaatgagaacttccacctactcagcactccctggctccagctttacaataattttcccagctttctacactacttgcctggaagccacagaaaagtcataaaaaatgtggctgaagtaaaagagtatgtgtctgaaagggtgaaggagcaccatcaatctctggaccccaactgtccccgggacctcaccgactgcctgctcgtggaaatggagaaggccgacctgttctttgcggggacagagaccaccagcacaactctgagatatgggctcctgattctcatgaaataccctgagatcgaagagaagctccatgaagaaattgacagggtgattgggccaagccgaatccctgccatcaaggataggcaagagatgccctacatggatgctgtggtgcatgagattcagcggttcatcaccctcgtgccctccaacctgccccatgaagcaacccgagacaccattttcagaggatacctcatccccaagggcacagtcgtagtgccaactctggactctgttttgtatgacaaccaagaatttcctgatccagaaaagtttaagccagaacacttcctgaatgaaaatggaaagttcaagtacagtgactatttcaagccattttccacaggaaaacgagtgtgtgctggagaaggcctggctcgcatggagttgtttcttttgttgtgtgccattttgcagcattttaatttgaagcctctcgttgacccaaaggatatcgacctcagccctatacatattgggtttggctgtatcccaccacgttacaaactctgtgtcattccccgctcatgagtgtgtggaggacaccctgaaccccccgctttcaaacaagatttcgaattgtttgaggtcaggatttctcaaactgattcctttctttgcatatgagtatttgaaaataaatattttcccagaatataaataaatcatcacatgattattttaactat

SEQ ID NO: 75100 - DNA, 1620 bp, Homo sapiens
gtctcccgggctggcagcagggccccagcggcaccatgtctgccctcggagtcaccgtggccctgctggtgtgggcggccttcctcctgctggtgtccatgtggaggcaggtgcacagcagctggaatctgcccccaggccctttcccgcttcccatcatcgggaacctcttccagttggaattgaagaatattcccaagtccttcacccggttggcccagcgcttcgggccggtgttcacgctgtacgtgggctcgcagcgcatggtggtgatgcacggctacaaggcggtgaaggaagcgctgctggactacaaggacgagttctcgggcagaggcgacctccccgcgttccatgcgcacagggacaggggaatcatttttaataatggacctacctggaaggacatccggcggttttccctgaccaccctccggaactatgggatggggaaacagggcaatgagagccggatccagagggaggcccacttcctgctggaagcactcaggaagacccaaggccagcctttcgaccccaccttcctcatcggctgcgcgccctgcaacgtcatagccgacatcctcttccgcaagcattttgactacaatgatgagaagtttctaaggctgatgtatttgtttaatgagaacttccacctactcagcactccctggctccagctttacaataattttcccagctttctacactacttgcctggaagccacagaaaagtcataaaaaatgtggctgaagttgtccccgggacctcaccgactgcctgctcgtggaaatggagaaggaaaagcacagtgcagagcgcttgtacacaatggacggtatcaccgtgactgtggccgacctgttctttgcggggacagagaccaccagcacaactctgagatatgggctcctgattctcatgaaataccctgagatcgaagagaagctccatgaagaaattgacagggtgattgggccaagccgaatccctgccatcaaggataggcaagagatgccctacatggatgctgtggtgcatgagattcagcggttcatcaccctcgtgccctccaacctgccccatgaagcaacccgagacaccattttcagaggatacctcatccccaagggcacagtcgtagtgccaactctggactctgttttgtatgacaaccaagaatttcctgatccagaaaagtttaagccagaacacttcctgaatgaaaatggaaagttcaagtacagtgactatttcaagccattttccacaggaaaacgagtgtgtgctggagaaggcctggctcgcatggagttgtttcttttgttgtgtgccattttgcagcattttaatttgaagcctctcgttgacccaaaggatatcgacctcagccctatacatattgggtttggctgtatcccaccacgttacaaactctgtgtcattccccgctcatgagtgtgtggaggacaccctgaaccccccgctttcaaacaagatttcgaattgtttgaggtcaggatttctcaaactgattcctttctttgcatatgagtatttgaaaataaatattttcccagaatataaataaatcatcacatgattattttaactat

SEQ ID NO: 75101 - DNA, 1865 bp, Homo sapiens
gcgcaggctgacggcgggcgggggtcgcctgctccagctcgggctcccgcgccagaaccgggtccagaaccttgattccggaagcgggcaacggggtggttggtgggcgcgcctgagggaagggacgtgaggagccggagtccgcggagttgccgcggagttgtccgcggagtccaggcgggtggggagcagagcagctggaaccccccgagcgccctgcagacgcagcagcctcttgaggggagggtctcccccacctcgggctggacaaagacagcttttccccacgtccctctgggttctctagagcaacagcaatacccgcccggcaggggtgtggcttagagccccgcacctcctcgccgcgcggcgggcctgacttctagccacgggtctccgcagttggcccagcgcttcgggccggtgttcacgctgtacgtgggctcgcagcgcatggtggtgatgcacggctacaaggcggtgaaggaagcgctgctggactacaaggacgagttctcgggcagaggcgacctccccgcgttccatgcgcacagggacaggggaatcatttttaataatggacctacctggaaggacatccggcggttttccctgaccaccctccggaactatgggatggggaaacagggcaatgagagccggatccagagggaggcccacttcctgctggaagcactcaggaagacccaaggccagcctttcgaccccaccttcctcatcggctgcgcgccctgcaacgtcatagccgacatcctcttccgcaagcattttgactacaatgatgagaagtttctaaggctgatgtatttgtttaatgagaacttccacctactcagcactccctggctccagctttacaataattttcccagctttctacactacttgcctggaagccacagaaaagtcataaaaaatgtggctgaagtaaaagagtatgtgtctgaaagggtgaaggagcaccatcaatctctggaccccaactgtccccgggacctcaccgactgcctgctcgtggaaatggagaaggaaaagcacagtgcagagcgcttgtacacaatggacggtatcaccgtgactgtggccgacctgttctttgcggggacagagaccaccagcacaactctgagatatgggctcctgattctcatgaaataccctgagatcgaagagaagctccatgaagaaattgacagggtgattgggccaagccgaatccctgccatcaaggataggcaagagatgccctacatggatgctgtggtgcatgagattcagcggttcatcaccctcgtgccctccaacctgccccatgaagcaacccgagacaccattttcagaggatacctcatccccaagggcacagtcgtagtgccaactctggactctgttttgtatgacaaccaagaatttcctgatccagaaaagtttaagccagaacacttcctgaatgaaaatggaaagttcaagtacagtgactatttcaagccattttccacaggaaaacgagtgtgtgctggagaaggcctggctcgcatggagttgtttcttttgttgtgtgccattttgcagcattttaatttgaagcctctcgttgacccaaaggatatcgacctcagccctatacatattgggtttggctgtatcccaccacgttacaaactctgtgtcattccccgctcatgagtgtgtggaggacaccctgaaccccccgctttcaaacaagatttcgaattgtttgaggtcaggatttctcaaactgattcctttctttgcatatgagtatttgaaaataaatattttcccagaatataaataaatcatcacatgattattttaactat

SEQ ID NO: 75102 - DNA, 2064 bp, Homo sapiens
gtctcccgggctggcagcagggccccagcggcaccatgtctgccctcggagtcaccgtggccctgctggtgtgggcggccttcctcctgctggtgtccatgtggaggcaggtgcacagcagctggaatctgcccccaggccctttcccgcttcccatcatcgggaacctcttccagttggaattgaagaatattcccaagtccttcacccggttggcccagcgcttcgggccggtgttcacgctgtacgtgggctcgcagcgcatggtggtgatgcacggctacaaggcggtgaaggaagcgctgctggactacaaggacgagttctcgggcagaggcgacctccccgcgttccatgcgcacagggacaggggaatcatttttaataatggacctacctggaaggacatccggcggttttccctgaccaccctccggaactatgggatggggaaacagggcaatgagagccggatccagagggaggcccacttcctgctggaagcactcaggaagacccaaggtgcgtatctgctgcctagcagggcccagtcctcttgcagaccagcggtgtggggagccctggctgggactcctagactgcatctgaaccacagggacctacggacaaggagagggtctcgtgagtccccagatactgcattttacaactctaggttccagctacacagttcagggagcaagggtggccattaaacacgtgacttgtatcctaaatactgttgaaaagcaaaggaaactcaaacaggttcagacattcactatctttcgtaaactggcagttttcagggcaccttctcacaggccttggtgaacctcagtgggtgactgagcaggtggaggagtctcctcacccccatcttctggttgccctgactgcctgttttgtaggccagcctttcgaccccaccttcctcatcggctgcgcgccctgcaacgtcatagccgacatcctcttccgcaagcattttgactacaatgatgagaagtttctaaggctgatgtatttgtttaatgagaacttccacctactcagcactccctggctccagctttacaataattttcccagctttctacactacttgcctggaagccacagaaaagtcataaaaaatgtggctgaagtaaaagagtatgtgtctgaaagggtgaaggagcaccatcaatctctggaccccaactgtccccgggacctcaccgactgcctgctcgtggaaatggagaaggaaaagcacagtgcagagcgcttgtacacaatggacggtatcaccgtgactgtggccgacctgttctttgcggggacagagaccaccagcacaactctgagatatgggctcctgattctcatgaaataccctgagatcgaagagaagctccatgaagaaattgacagggtgattgggccaagccgaatccctgccatcaaggataggcaagagatgccctacatggatgctgtggtgcatgagattcagcggttcatcaccctcgtgccctccaacctgccccatgaagcaacccgagacaccattttcagaggatacctcatccccaagggcacagtcgtagtgccaactctggactctgttttgtatgacaaccaagaatttcctgatccagaaaagtttaagccagaacacttcctgaatgaaaatggaaagttcaagtacagtgactatttcaagccattttccacaggaaaacgagtgtgtgctggagaaggcctggctcgcatggagttgtttcttttgttgtgtgccattttgcagcattttaatttgaagcctctcgttgacccaaaggatatcgacctcagccctatacatattgggtttggctgtatcccaccacgttacaaactctgtgtcattccccgctcatgagtgtgtggaggacaccctgaaccccccgctttcaaacaagatttcgaattgtttgaggtcaggatttctcaaactgattcctttctttgcatatgagtatttgaaaataaatattttcccagaatataaataaatcatcacatgattattttaactat

SEQ ID NO: 75103 - DNA, 1715 bp, Homo sapiens
  misc_feature (1715)..(1715): n is a, c, g, or t
gtctcccgggctggcagcagggccccagcggcaccatgtctgccctcggagtcaccgtggccctgctggtgtgggcggccttcctcctgctggtgtccatgtggaggcaggtgcacagcagctggaatctgcccccaggccctttcccgcttcccatcatcgggaacctcttccagttggaattgaagaatattcccaagtccttcacccggttggcccagcgcttcgggccggtgttcacgctgtacgtgggctcgcagcgcatggtggtgatgcacggctacaaggcggtgaaggaagcgctgctggactacaaggacgagttctcgggcagaggcgacctccccgcgttccatgcgcacagggacaggggaatcatttttaataatggacctacctggaaggacatccggcggttttccctgaccaccctccggaactatgggatggggaaacagggcaatgagagccggatccagagggaggcccacttcctgctggaagcactcaggaagacccaaggccagcctttcgaccccaccttcctcatcggctgcgcgccctgcaacgtcatagccgacatcctcttccgcaagcattttgactacaatgatgagaagtttctaaggctgatgtatttgtttaatgagaacttccacctactcagcactccctggctccagctttacaataattttcccagctttctacactacttgcctggaagccacagaaaagtcataaaaaatgtggctgaagtaaaagagtatgtgtctgaaagggtgaaggagcaccatcaatctctggaccccaactgtccccgggacctcaccgactgcctgctcgtggaaatggagaaggaaaagcacagtgcagagcgcttgtacacaatggacggtatcaccgtgactgtggccgacctgttctttgcggggacagagaccaccagcacaactctgagatatgggctcctgattctcatgaaataccctgagatcgaagagaagctccatgaagaaattgacagggtgattgggccaagccgaatccctgccatcaaggataggcaagagatgccctacatggatgctgtggtgcatgagattcagcggttcatcaccctcgtgccctccaacctgccccatgaagcaacccgagacaccattttcagaggatacctcatccccaagggcacagtcgtagtgccaactctggactctgttttgtatgacaaccaagaatttcctgatccagaaaagtttaagccagaacacttcctgaatgaaaatggaaagttcaagtacagtgactatttcaagccattttccacagtgtgtgccattttgcagcattttaatttgaagcctctcgttgacccaaaggatatcgacctcagccctatacatattgggtttggctgtatcccaccacgttacaaactctgtgtcattccccgctcatgagtgtgtggaggacaccctgaaccccccgctttcaaacaagatttcgaattgtttgaggtcaggatttctcaaactgattcctttctttgcatatgagtatttgaaaataaatattttcccagaatataaaaaactaaaacaacaaaaaaatataaaaaagattaatgaaccaagaaaatcacaaaaacagaaaactcttaatagcaagaaacatacatgaaaaaaaaattgcgcccgcaattggggctaacn

SEQ ID NO: 75104 - DNA, 1611 bp, Homo sapiens
gtctcccgggctggcagcagggccccagcggcaccatgtctgccctcggagtcaccgtggccctgctggtgtgggcggccttcctcctgctggtgtccatgtggaggcaggtgcacagcagctggaatctgcccccaggccctttcccgcttcccatcatcgggaacctcttccagttggaattgaagaatattcccaagtccttcacccggttggcccagcgcttcgggccggtgttcacgctgtacgtgggctcgcagcgcatggtggtgatgcacggctacaaggcggtgaaggaagcgctgctggactacaaggacgagttctcgggcagaggcgacctccccgcgttccatgcgcacagggacaggggaatcatttttaataatggacctacctggaaggacatccggcggttttccctgaccaccctccggaactatgggatggggaaacagggcaatgagagccggatccagagggaggcccacttcctgctggaagcactcaggaagacccaaggccagcctttcgaccccaccttcctcatcggctgcgcgccctgcaacgtcatagccgacatcctcttccgcaagcattttgactacaatgatgagaagtttctaaggctgatgtatttgtttaatgagaacttccacctactcagcactccctggctccagctttacaataattttcccagctttctacactacttgcctggaagccacagaaaagtcataaaaaatgtggctgaagtaaaagagtatgtgtctgaaagggtgaaggagcaccatcaatctctggaccccaactgtccccgggacctcaccgactgcctgctcgtggaaatggagaaggaaaagcacagtgcagagcgcttgtacacaatggacggtatcaccgtgactgtggccgacctgttctttgcggggacagagaccaccagcacaactctgagatatgggctcctgattctcatgaaataccctgagatcgaagagaagctccatgaagaaattgacagggtgattgggccaagccgaatccctgccatcaaggataggcaagagatgccctacatggatgctgtggtgcatgagattcagcggttcatcaccctcgtggcacagtcgtagtgccaactctggactctgttttgtatgacaaccaagaatttcctgatccagaaaagtttaagccagaacacttcctgaatgaaaatggaaagttcaagtacagtgactatttcaagccattttccacaggaaaacgagtgtgtgctggagaaggcctggctcgcatggagttgtttcttttgttgtgtgccattttgcagcattttaatttgaagcctctcgttgacccaaaggatatcgacctcagccctatacatattgggtttggctgtatcccaccacgttacaaactctgtgtcattccccgctcatgagtgtgtggaggacaccctgaaccccccgctttcaaacaagatttcgaattgtttgaggtcaggatttctcaaactgattcctttctttgcatatgagtatttgaaaataaatattttcccagaatataaataaatcatcacatgattattttaactat

SEQ ID NO: 75105 - DNA, 1596 bp, Homo sapiens
gaaagaaggtaaattgacagcatgaagtagagcacccaggagaggctacatgtgatgaagaaaccacagtgcagactgtgaggaccccagaaaggctcctccccaaaacctgaccagtggccggtgctggcagctcccaggctgggacacccctctgtctctctgtccctctgccccctctgtcacttctttatacacctgtaaatcctgccctgctctccaaggccctctgtagcccatttctccccaaaatgggtatttagaataaccttctgctggcccctctgccttaggaatcatttttaataatggacctacctggaaggacatccggcggttttccctgaccaccctccggaactatgggatggggaaacagggcaatgagagccggatccagagggaggcccacttcctgctggaagcactcaggaagacccaaggccagcctttcgaccccaccttcctcatcggctgcgcgccctgcaacgtcatagccgacatcctcttccgcaagcattttgactacaatgatgagaagtttctaaggctgatgtatttgtttaatgagaacttccacctactcagcactccctggctccagctttacaataattttcccagctttctacactacttgcctggaagccacagaaaagtcataaaaaatgtggctgaagtaaaagagtatgtgtctgaaagggtgaaggagcaccatcaatctctggaccccaactgtccccgggacctcaccgactgcctgctcgtggaaatggagaaggaaaagcacagtgcagagcgcttgtacacaatggacggtatcaccgtgactgtggccgacctgttctttgcggggacagagaccaccagcacaactctgagatatgggctcctgattctcatgaaataccctgagatcgaagagaagctccatgaagaaattgacagggtgattgggccaagccgaatccctgccatcaaggataggcaagagatgccctacatggatgctgtggtgcatgagattcagcggttcatcaccctcgtgccctccaacctgccccatgaagcaacccgagacaccattttcagaggatacctcatccccaagggcacagtcgtagtgccaactctggactctgttttgtatgacaaccaagaatttcctgatccagaaaagtttaagccagaacacttcctgaatgaaaatggaaagttcaagtacagtgactatttcaagccattttccacaggaaaacgagtgtgtgctggagaaggcctggctcgcatggagttgtttcttttgttgtgtgccattttgcagcattttaatttgaagcctctcgttgacccaaaggatatcgacctcagccctatacatattgggtttggctgtatcccaccacgttacaaactctgtgtcattccccgctcatgagtgtgtggaggacaccctgaaccccccgctttcaaacaagatttcgaattgtttgaggtcaggatttctcaaactgattcctttctttgcatatgagtatttgaaaataaatattttcccagaatataaataaatcatcacatgattattttaactat

SEQ ID NO: 75106 - DNA, 1514 bp, Homo sapiens
gtctcccgggctggcagcagggccccagcggcaccatgtctgccctcggagtcaccgtggccctgctggtgtgggcggccttcctcctgctggtgtccatgtggaggcaggtgcacagcagctggaatctgcccccaggccctttcccgcttcccatcatcgggaacctcttccagttggaattgaagaatattcccaagtccttcacccggttggcccagcgcttcgggccggtgttcacgctgtacgtgggctcgcagcgcatggtggtgatgcacggctacaaggcggtgaaggaagcgctgctggactacaaggacgagttctcgggcagaggcgacctccccgcgttccatgcgcacagggacaggggaatcatttttaataatggacctacctggaaggacatccggcggttttccctgaccaccctccggaactatgggatggggaaacagggcaatgagagccggatccagagggaggcccacttcctgctggaagcactcaggaagacccaagctttacaataattttcccagctttctacactacttgcctggaagccacagaaaagtcataaaaaatgtggctgaagtaaaagagtatgtgtctgaaagggtgaaggagcaccatcaatctctggaccccaactgtccccgggacctcaccgactgcctgctcgtggaaatggagaaggaaaagcacagtgcagagcgcttgtacacaatggacggtatcaccgtgactgtggccgacctgttctttgcggggacagagaccaccagcacaactctgagatatgggctcctgattctcatgaaataccctgagatcgaagagaagctccatgaagaaattgacagggtgattgggccaagccgaatccctgccatcaaggataggcaagagatgccctacatggatgctgtggtgcatgagattcagcggttcatcaccctcgtgccctccaacctgccccatgaagcaacccgagacaccattttcagaggatacctcatccccaagggcacagtcgtagtgccaactctggactctgttttgtatgacaaccaagaatttcctgatccagaaaagtttaagccagaacacttcctgaatgaaaatggaaagttcaagtacagtgactatttcaagccattttccacaggaaaacgagtgtgtgctggagaaggcctggctcgcatggagttgtttcttttgttgtgtgccattttgcagcattttaatttgaagcctctcgttgacccaaaggatatcgacctcagccctatacatattgggtttggctgtatcccaccacgttacaaactctgtgtcattccccgctcatgagtgtgtggaggacaccctgaaccccccgctttcaaacaagatttcgaattgtttgaggtcaggatttctcaaactgattcctttctttgcatatgagtatttgaaaataaatattttcccagaatataaataaatcatcacatgattattttaactat

SEQ ID NO: 75107 - DNA, 1551 bp, Homo sapiens
gtctcccgggctggcagcagggccccagcggcaccatgtctgccctcggagtcaccgtggccctgctggtgtgggcggccttcctcctgctggtgtccatgtggaggcaggtgcacagcagctggaatctgcccccaggccctttcccgcttcccatcatcgggaacctcttccagttggaattgaagaatattcccaagtccttcacccggttggcccagcgcttcgggccggtgttcacgctgtacgtgggctcgcagcgcatggtggtgatgcacggctacaaggcggtgaaggaagcgctgctggactacaaggacgagttctcgggcagaggcgacctccccgcgttccatgcgcacagggacaggggaatcatttttaataatggacctacctggaaggacatccggcggttttccctgaccaccctccggaactatgggatggggaaacagggcaatgagagccggatccagagggaggcccacttcctgctggaagcactcaggaagacccaaggccagcctttcgaccccaccttcctcatcggctgcgcgccctgcaacgtcatagccgacatcctcttccgcaagcattttgactacaatgatgagaagtttctaaggctgatgtatttgtttaatgagaacttccacctactcagcactccctggctccagctttacaataattttcccagctttctacactacttgcctggaagccacagaaaagtcataaaaaatgtggctgaagtaaaagagtatgtgtctgaaagggtgaaggagcaccatcaatctctggaccccaactgtccccgggacctcaccgactgcctgctcgtggaaatggagaaggaaaagcacagtgcagagcgcttgtacacaatggacggtatcaccgtgactgtggccgacctgttctttgcggggacagagaccaccagcacaactctgagatatgggctcctgattctcatgaaataccctgagatcgaaggccctccaacctgccccatgaagcaacccgagacaccattttcagaggatacctcatccccaagggcacagtcgtagtgccaactctggactctgttttgtatgacaaccaagaatttcctgatccagaaaagtttaagccagaacacttcctgaatgaaaatggaaagttcaagtacagtgactatttcaagccattttccacaggaaaacgagtgtgtgctggagaaggcctggctcgcatggagttgtttcttttgttgtgtgccattttgcagcattttaatttgaagcctctcgttgacccaaaggatatcgacctcagccctatacatattgggtttggctgtatcccaccacgttacaaactctgtgtcattccccgctcatgagtgtgtggaggacaccctgaaccccccgctttcaaacaagatttcgaattgtttgaggtcaggatttctcaaactgattcctttctttgcatatgagtatttgaaaataaatattttcccagaatataaataaatcatcacatgattattttaactat

SEQ ID NO: 75108 - DNA, 1626 bp, Homo sapiens
gtctcccgggctggcagcagggccccagcggcaccatgtctgccctcggagtcaccgtggccctgctggtgtgggcggccttcctcctgctggtgtccatgtggaggcaggtgcacagcagctggaatctgcccccaggccctttcccgcttcccatcatcgggaacctcttccagttggaattgaagaatattcccaagtccttcacccggttggcccagcgcttcgggccggtgttcacgctgtacgtgggctcgcagcgcatggtggtgatgcacggctacaaggcggtgaaggaagcgctgctggactacaaggacgagttctcgggcagaggcgacctccccgcgttccatgcgcacagggacaggggaatcatttttaataatggacctacctggaaggacatccggcggttttccctgaccaccctccggaactatgggatggggaaacagggcaatgagagccggatccagagggaggcccacttcctgctggaagcactcaggaagacccaaggccagcctttcgaccccaccttcctcatcggctgcgcgccctgcaacgtcatagccgacatcctcttccgcaagcattttgactacaatgatgagaagtttctaaggctgatgtatttgtttaatgagaacttccacctactcagcactccctggctccagctttacaataattttcccagctttctacactacttgcctggaagccacagaaaagtcataaaaaatgtggctgaagtaaaagagtatgtgtctgaaagggtgaaggagcaccatcaatctctggaccccaactgtccccgggacctcaccgactgcctgctcgtggaaatggagaaggaaaagcacagtgcagagcgcttgtacacaatggacggtatcaccgtgactgtggccgacctgttctttgcggggacagagaccaccagcacaactctgagatatgggctcctgattctcatgaaataccctgagatcgaagagaagctccatgaagaaattgacagggtgattgggccaagccgaatccctgccatcaaggataggcaagagatgccctacatggatgctgtggtgcatgagattcagcggttcatcaccctcgtgccctccaacctgccccatgaagcaacccgagacaccattttcagaggatacctcatccccaagggcacagtcgtagtgccaactctggactctgttttgtatgacaaccaagaatttcctgatccagaaaagtttaagccagaacacttcctgaatgaaaacgagtgtgtgctggagaaggcctggctcgcatggagttgtttcttttgttgtgtgccattttgcagcattttaatttgaagcctctcgttgacccaaaggatatcgacctcagccctatacatattgggtttggctgtatcccaccacgttacaaactctgtgtcattccccgctcatgagtgtgtggaggacaccctgaaccccccgctttcaaacaagatttcgaattgtttgaggtcaggatttctcaaactgattcctttctttgcatatgagtatttgaaaataaatattttcccagaatataaataaatcatcacatgattattttaactat

SEQ ID NO: 75109 - DNA, 1542 bp, Homo sapiens
gaaagaaggtaaattgacagcatgaagtagagcacccaggagaggctacatgtgatgaagaaaccacagtgcagactgtgaggaccccagaaaggctcctccccaaaacctgaccagtggccggtgctggcagctcccaggctgggacacccctctgtctctctgtccctctgccccctctgtcacttctttatacacctgtaaatcctgccctgctctccaaggccctctgtagcccatttctccccaaaatgggtatttagaataaccttctgctggcccctctgccttaggaatcatttttaataatggacctacctggaaggacatccggcggttttccctgaccaccctccggaactatgggatggggaaacagggcaatgagagccggatccagagggaggcccacttcctgctggaagcactcaggaagacccaaggccagcctttcgaccccaccttcctcatcggctgcgcgccctgcaacgtcatagccgacatcctcttccgcaagcattttgactacaatgatgagaagtttctaaggctgatgtatttgtttaatgagaacttccacctactcagcactccctggctccagctttacaataattttcccagctttctacactacttgcctggaagccacagaaaagtcataaaaaatgtggctgaagtaaaagagtatgtgtctgaaagggtgaaggagcaccatcaatctctggaccccaactgtccccgggacctcaccgactgcctgctcgtggaaatggagaaggccgacctgttctttgcggggacagagaccaccagcacaactctgagatatgggctcctgattctcatgaaataccctgagatcgaagagaagctccatgaagaaattgacagggtgattgggccaagccgaatccctgccatcaaggataggcaagagatgccctacatggatgctgtggtgcatgagattcagcggttcatcaccctcgtgccctccaacctgccccatgaagcaacccgagacaccattttcagaggatacctcatccccaagggcacagtcgtagtgccaactctggactctgttttgtatgacaaccaagaatttcctgatccagaaaagtttaagccagaacacttcctgaatgaaaatggaaagttcaagtacagtgactatttcaagccattttccacaggaaaacgagtgtgtgctggagaaggcctggctcgcatggagttgtttcttttgttgtgtgccattttgcagcattttaatttgaagcctctcgttgacccaaaggatatcgacctcagccctatacatattgggtttggctgtatcccaccacgttacaaactctgtgtcattccccgctcatgagtgtgtggaggacaccctgaaccccccgctttcaaacaagatttcgaattgtttgaggtcaggatttctcaaactgattcctttctttgcatatgagtatttgaaaataaatattttcccagaatataaataaatcatcacatgattattttaactat

SEQ ID NO: 75110 - DNA, 786 bp, Homo sapiens
gtgtaggtgggcagatggataaaagcgtgattgaatagatgggtggatgatgggtggatgcccaactggccaggaaccaatccctgaaatttgtcccattcatatcttggcagagaagctccatgaagaaattgacagggtgattgggccaagccgaatccctgccatcaaggataggcaagagatgccctacatggatgctgtggtgcatgagattcagcggttcatcaccctcgtgccctccaacctgccccatgaagcaacccgagacaccattttcagaggatacctcatccccaagggcacagtcgtagtgccaactctggactctgttttgtatgacaaccaagaatttcctgatccagaaaagtttaagccagaacacttcctgaatgaaaatggaaagttcaagtacagtgactatttcaagccattttccacaggaaaacgagtgtgtgctggagaaggcctggctcgcatggagttgtttcttttgttgtgtgccattttgcagcattttaatttgaagcctctcgttgacccaaaggatatcgacctcagccctatacatattgggtttggctgtatcccaccacgttacaaactctgtgtcattccccgctcatgagtgtgtggaggacaccctgaaccccccgctttcaaacaagatttcgaattgtttgaggtcaggatttctcaaactgattcctttctttgcatatgagtatttgaaaataaatattttcccagaatataaataaatcatcacatgattattttaactat

SEQ ID NO: 75111 - DNA, 618 bp, Homo sapiens
caataggcgaaatggggtacggggcccccctcgagacctcgtgcaaaattcggcacgaggccatcaaggataggcaagagatgccctacatggatgctgtggtgcatgagattcagcggttcatcaccctcgtggcacagtcgtagtgccaactctggactctgttttgtatgacaaccaagaatttcctgatccagaaaagtttaagccagaacacttcctgaatgaaaatggaaagttcaagtacagtgactatttcaagccattttccacaggaaaacgagtgtgtgctggagaaggcctggctcgcatggagttgtttcttttgttgtgtgccattttgcagcattttaatttgaagcctctcgttgacccaaaggatatcgacctcagccctatacatattgggtttggctgtatcccaccacgttacaaactctgtgtcattccccgctcatgagtgtgtggaggacaccctgaaccccccgctttcaaacaagatttcgaattgtttgaggtcaggatttctcaaactgattcctttctttgcatatgagtatttgaaaataaatattttcccagaatataaataaatcatcacatgattattttaactat

SEQ ID NO: 75112 - DNA, 429 bp, Homo sapiens
agtttacgttagaaaaagaaggaaaatttgggttatatgtgatagacaggactgcaaaagccaaacaacatagcttcgaggggtgtttgattagacagcccaaatattcctcccagagacatctctggggccccacgcaccccctttcctaacgtcaggatgtgtatcgacctgtgtgtgcacatttgccatgcagagtttgcactgctgaggagaatggtgcccaagaaggacactgttgacccaaaatattccaaataaacaatgattacagccacaaattcaggtttggagaaagttgttggtccaacacacacaattatgttgcatccagaaaaaagtagtaaaatatttttttccctctctagctttacaataattttcccagctttctacactacttgcctggaagccacagaaaagtcataa

SEQ ID NO: 75113 - DNA, 436 bp, Homo sapiens
ctggaaaagagcctcagcagatagtgcctgggactgtagtgaattctaatgccaggaacaaactatcacaaccagccctggggttaatcctgtgagaagattagggctttcatcttcatttagacctgacccctgactgctttctatctaatccttcactaagcaactccttcaactggaaatatactatcctatatagcataatattcaaaactacattcttcactgggggtttccagatgaaagcccacattttgttaacatgactcactgagacagtctttgtttctcctaggcacagtcgtagtgccaactctggactctgttttgtatgacaaccaagaatttcctgatccagaaaagtttaagccagaacacttcctgaatgaaaatggaaagttcaagtacagtgactatttcaagccattttccacag

SEQ ID NO: 75114 - DNA, 366 bp, Homo sapiens
ctagagatagctttcaatctcttcagaaatagcctggtgcagtgagaaaactaggtttgttttcaggccagtctgatcttcatcctattctgtctataactagttgcaggtccttgctcggatggcataattttttgatgcctccatttgcttaactagaaactaggattcatatacacactctgcactttgtattgaagattaatgataatgtaggttttggttgctgtggctgagcctggccagtaataggtgcataacagaagtagctaagagcatttcataatcaggatgaactctccaggacagccctacaaagaaggagctgtttgttcccggatggcctcgaccttccaggcttgattg

SEQ ID NO: 75115 - DNA, 481 bp, Homo sapiens
gatatcttgcaagtagttgaaagtataggcatgttgcttcgggaagaagtcagcactgagatcatagctcttggattcattattgcacagaggactgatcaaactataggagtaagtgggcttattcaggaagggtatagaatgaggaaagaaagccagtgatgaaacttgaggctgtcctcagtgtttaaggaacaaggaccaagaagcagagggagaaacactgtgaggatggaggatgtcacactgtaggatgaaaatgtctgggagaagcaatgaaattgataaatcacctgacatgtttaccagttggaaaatagtattcagagaagatcttattgttctgttagagagttcaaaaaaactgtgtaacaggaacagaaaaaagtaagccaaaaacaaaaaaagtaatgattataggagaataaaaagtttacaaaaaaggaaatttaatcagcagcatgctgcatgactcagatgt

SEQ ID NO: 75116 - DNA, 487 bp, Homo sapiens
ctctatctttacaaaaaacaaaagaattagccaggcatggtggtgcacaactgtagtcccagctatttgagaggctgaggcaggagggtcacttgagcccgggatttcaaggcttcagtgagctgtgatcatgccactgccctccaacctaggcaacctgtgagaccttatctcaaaaaaaaaaaaaagtgcttctcggtgctagcttcagttcaccaggccccccaggggtgtcaggagggcaggggcaggatgtagcatagagtctgggaaacaggctcttggctttgactgactccagccatgggtgcatgtgggcctagaatgtctctcagaaggccttaggccagagatctgcagaaaatagctcagtacgtatgtacctgaatctgggactggccatgggagcacagcttcctgcactactccttttaggcctgatggcctctggaatcaggactcttgtttgtttggccatgattatgtc

SEQ ID NO: 75117 - DNA, 792 bp, Homo sapiens
accaagtgaaaacctcggtcactaaaacttcttggaatagcattcaaggtcttgctttaacacaaaaccccaaaacttggcggtacaaaacaaccattttctgatggatcgggaatccatgtctgaagtctcagctaagaagactccaaggctgggttccaggctggaactgcctggggcatctccccacacacacactggtacttggctggaccaccagcaggttctactccccgtgtttcttcacagtttgtcagttgggctgatttgggtttgctcacagagtatcagccaagatcccaagatcaagtatccaaagagaacccggtgggacttatatttccttttatggcctagccctggaatatgtggcatctctctgtccatagtcacagagggaagaaacagatggcatctctcagtggggaaccagaatcatatggttaaaagaacacatgggatggacaggttgccaccattgttggcatacattaataaagtctgccatgggccgggtgcggtggctcacgcctgtaatcccagcactttgggtggccgaggcgggcggatcacgaggtcaggagatcgagaccatcctggctaacacagtgaaaccccgtctctactaaaaatacaaaaaaattagccgggcgtggtagcgggcgcctgtagtcccagctactcgggaggctgaggcaggagaatggcgtgaacccaggaggcggagcttgcagtgagccgagatcgcgccactgcactccagcctgggcaacagagcgagactctgtctca

SEQ ID NO: 75118 - DNA, 326 bp, Homo sapiens
aaaaagaatatgatggtctttgtaactgattctggacttatgcatcattgatgctgcagtgttaaaactacaagagctagaaaactgaagatgtcgtctgcttacggaagcgctgaaagactaggatgtgatttattaacgaccaacttctgttattgtgtgttaagtttttcatctgtgcatcaaatcacaaagaataaatagagctttttcctttatcagtcccttgggcacagcaggtcctgaacaccctgctctacaatgttgcatcaagagttcaaacaacaaaataaaaaatattaagaggatatccccatcctgtgact

SEQ ID NO: 75119 - DNA, 600 bp, Homo sapiens
  misc_feature (1)..(1): n is a, c, g, or t
  misc_feature (5)..(5): n is a, c, g, or t
  misc_feature (7)..(8): n is a, c, g, or t
ngccnannctaccgataaatcaaatgctgctactttgcatgagaagaattaaaagatagtctgaagcagtttttatagaaagaagacaaaagcagtcatgagtcatgctgtggtccagaaacctaatagcagatggccaactgggacactgaaatttctgtactgctactgcctatgtttctatcacaacaaatatcctgatccctcactgttaaggattcagaactgtcctccaagttttattggactggtccggttctaccctctttcttacttgcagttttcaagaataagtgtagaatgtgctgggaatggaatatcctgatatcagaagagaatggtagaacagcccagacttaacagtcttcacaagaaatacaatctctcaacacttttggtcagtgagtcaggtgatcctgggctataaaacctgggctgggctattttctggagtctcttaactgtgttgcaagtggggcacatgcaatcaaaattccatccttccaggcaacttctctgaacctcagggggaccacatcacactgaattttagacttctcatcttcgatccctttataagtaataaatcaacttatgtaa

SEQ ID NO: 75120 - DNA, 1023 bp, Homo sapiens
  misc_feature (1)..(1): n is a, c, g, or t
  misc_feature (5)..(5): n is a, c, g, or t
  misc_feature (7)..(8): n is a, c, g, or t
ngccnannctaccgataaatcaaatgctgctactttgcatgagaagaattaaaagatagtctgaagcagtttttatagaaagaagacaaaagcagtcatgagtcatgctgtggtccagaaacctaatagcagatggccaactgggacactgaaatttctgtactgctactgcctatgtttctatcacaacaaatatcctgatccctcactgttaaggattcagaactgtcctccaagttttattggactggtccggttctaccctctttcttacttgcagttttcaagaataagtgtagaatgtgctgggaatggaatatcctgatatcagaagagaatggtagaacagcccagacttaacagtcttcacaagaaatacaatctctcaacacttttggtcagtgagtcaggtgatcctgggctataaaacctgggctgggctattttctggagtctcttaactgtgttgcaagtggggcacatgcaatcaaaattccatccttccaggcaacttctctgaacctcagggggaccacatcacactgaattttagacttctcatcttcgatccctttataagtaataaatcaacttatgtaaaaaaaaaaaaaaaacgagaaaagaaaaaaacgcggggacaaaaataaggagagaggaaaaagagaggggaaagaaaagggcaagggggaaaaagaggaaacacgacacaaacacacagggtacacacggtggaacaaacagcaggacaccacaatgaagagacagaaaaaaaggcgaacaccagataacagaatagagcacggcgaacgaaaaaaagaaacacacgaaaagaagacaaaaggagagcagagagaacaggaaagaaagagaacagagaggagaagaaagaaaaaagagaaaaagacaagacagaagaaaaaagaaagaacaagaagaagaaaaagaagggaagagaagaaaagaagaaaaagcgaaaaaaagagaagaagacaaaaaggaaagagaagaacaaaaaaacagaga

SEQ ID NO: 75121 - DNA, 220 bp, Homo sapiens
gttttaaatgacccagaaattgcacacatcgttcctgcttacattccatggttcaaaactacatgatagttacaagggaagtgggcagacatgcactcaagaagaaggaaataacagatttaagagttggccgacagtctgccattttggtatcatatgttaataacagatcttctgttttcagagatattattagggacagaaatctcctgattcagta

SEQ ID NO: 75122 - DNA, 587 bp, Homo sapiens
tccagttgcccacatttgctaggttgtcattgactcatgcaatccttgatccctggggcaatcgcagattcctcttctgtgaccacctcccagccccacctcaagtctggccctgagttctctctgctgttaccttttgcagtggccagatatatactccctttttcaggtctctaccagtctctgatccaacctgcgcccacagccagattggcctaccctaaacaatggtctcttgtctctcttctctaaaacctccagggaccatgctctaaagtacaatgcctaagtccctacctgtggccctttctcctcccctttctctgtaaatcctttgcttctttcctttaggctcagtcacctttatagagaccaagagcatgggctcctgagtcggacaagcaaacagctcagtccctgtgccaccacttacaaactgtgacctggccaagtttcctcagggttctgtaattcagtctcatccttaaaatggaaagaaaagtctctgtcctgttgggttattttaaggattaatacctgcaaagcacttggaactgcttaataagtggtactgtctgaaaatgcca

SEQ ID NO: 75123 - DNA, 986 bp, Homo sapiens
cggaggctgggcgcttgagggctgggcctgcgggccgcgggacagggagggcgcggggccgggctgctgggtccgagctctgggcacgatgtcctccctgacgccgccaggacagcgcctggcccaggcctgggcctggtgaacgcgggtttcttcctctgaggttcaacactccgcacttgggttggctcctttcatcctgattggtttattcgccacgtgccaagcactgaagagggcgtgcaggatggatacttttggagcaaaaatagccctgcttctttcctggggagggatcgcactttctagaggggcggttctcaaagtatggtctcaggactagcagcgtcgaaaatgctgggaactcgttagaaaagcaagttttcaatcctcgccccagaatcagaaactcggggtggagcccagcaatgtgtgtcctgacaagtccacgcgcgaccccagtgctggctagggttgcaaagccactgctctacggagcgagcgagatccatcatagtgggacaagcgagaggatgaggccatacagaccagggagagaggctccttacactgacattcaaagtcctcaatgacccggccccagcctacctctgcagccttatctccctacaaaccatcaaagcagaacaaaaacctgtccctccgatttaggttttagcaaaccacaagaagcacttcataaactggtgactcaagtagaaaagtactgttccacgcacttgacaccaatccacccatttcacctgcatgatcaccctgcctttgcatgagttgccggtgtggacagagcagggacacagtgagacagcggattccagctttgctcttacctagaacacactgcctctcaccaggaatcgtccttccattttatgcagttatcccagacaatgatgcacaagctttgggaaaaaaaccccacaagtccaaaggtgtacttcataataaaggcaagttatctgtca

SEQ ID NO: 75124 - DNA, 750 bp, Homo sapiens
cggaggctgggcgcttgagggctgggcctgcgggccgcgggacagggagggcgcggggccgggctgctgggtccgagctctgggcacgatgtcctccctgacgccgccaggacagcgcctggcccaggcctgggcctggtgaacgcgggtttcttcctctgaggttcaacactccgcacttgggttggctcctttcatcctgattggtttattcgccacgtgccaagcactgaagagggcgtgcaggatggatacttttggagcaaaaatagccctgcttctttcctggggagggatcgcactttctagaggggcggttctcaaagtatggtctcaggactagcagcgtcgaaaatgctgggaactcgttagaaaagcaagttttcaatcctcgccccagaatcagaaactcggggtggagcccagcaatgtgtgtcctgacaagtccacgcgcgaccccagtgctggctagggttgcaaagccactgctctacggagcgagcgagatccatcatagtgggacaagcgagaggatgaggccatacagaccagggcaagttttgagcgtgcagatccaccagctgcttgaagccaggggcaccaggatgtctggtcccccagctcagggatcctgtctccccacaaaaagcagcagcagaagacccctctttgagttctgaacatgttcctagattttcccagtatctatggggattgagagattgataaaggctgcttggagctgaaaaa

SEQ ID NO: 75125 - DNA, 638 bp, Homo sapiens
cggaggctgggcgcttgagggctgggcctgcgggccgcgggacagggagggcgcggggccgggctgctgggtccgagctctgggcacgatgtcctccctgacgccgccaggacagcgcctggcccaggcctgggcctggtgaacgcgggtttcttcctctgaggttcaacactccgcacttgggttggctcctttcatcctgattggtttattcgccacgtgccaagcactgaagagggcgtgcaggatggatacttttggagcaaaaatagccctgcttctttcctggggagggatcgcactttctagaggggcggttctcaaagtatggtctcaggactagcagcgtcgaaaatgctgggaactcgttagaaaagtactgttccacgcacttgacaccaatccacccatttcacctgcatgatcaccctgcctttgcatgagttgccggtgtggacagagcagggacacagtgagacagcggattccagctttgctcttacctagaacacactgcctctcaccaggaatcgtccttccattttatgcagttatcccagacaatgatgcacaagctttgggaaaaaaaccccacaagtccaaaggtgtacttcataataaaggcaagttatctgtca

SEQ ID NO: 75126 - DNA, 867 bp, Homo sapiens
cggaggctgggcgcttgagggctgggcctgcgggccgcgggacagggagggcgcggggccgggctgctgggtccgagctctgggcacgatgtcctccctgacgccgccaggacagcgcctggcccaggcctgggcctggtgaacgcgggtttcttcctctgaggttcaacactccgcacttgggttggctcctttcatcctgattggtttattcgccacgtgccaagcactgaagagggcgtgcaggatggatacttttggagcaaaaatagccctgcttctttcctggggagggatcgcactttctagaggggcggttctcaaagtatggtctcaggactagcagcgtcgaaaatgctgggaactcgttagaaaagcaagttttcaatcctcgccccagaatcagaaactcggggtggagcccagcaatgtgtgtcctgacaagtccacgcgcgaccccagtgctggctagggttgcaaagccactgctctacggagcgagcgagatccatcatagtgggacaagcgagaggatgaggccatacagaccagggttttagcaaaccacaagaagcacttcataaactggtgactcaagtagaaaagtactgttccacgcacttgacaccaatccacccatttcacctgcatgatcaccctgcctttgcatgagttgccggtgtggacagagcagggacacagtgagacagcggattccagctttgctcttacctagaacacactgcctctcaccaggaatcgtccttccattttatgcagttatcccagacaatgatgcacaagctttgggaaaaaaaccccacaagtccaaaggtgtacttcataataaaggcaagttatctgtca

SEQ ID NO: 75127 - DNA, 684 bp, Homo sapiens
tactgtgtacccacaaaatttgaaattaaaagtttttaaaaaggcctcttgttccagaggccaaatgagctgactgacagtacatttttccctgtttctatctctttaacccctcttggtggctgtgactgacatgtgaagttttgtccacaccttctggagtcccaagtgtctggttgacagtgcagtcttctttttagcctctcagttttggaatgacaggttacaaaatgacttgttggaaatatcgacctgtaggtgatgagctggaaaaggtcaaatgccttctctcatgggctctcccaaaaaccaaagtgagttctctctctcagctaccggcttctttctggcatttatttttcctgccccttctccagtatggggagtgggttgttgtcggtcacaccaagcagtagccagattttttgttatttcatatggatttttttcctttcgtaacatggaggaagggccttgtcttttaagtattttacttgtaccatttggcatttgtggcctccctgagtttgtgatctgatatcccaaattgtgcttgagcaaacacatcatggcacctgtttgaagtgacgaaatcatctgcagagccttttcctgaaataacctctcagtgacctgcactttcacctttcctaataaatgcaagctcctaaataaagccttaca

SEQ ID NO: 75128 - DNA, 173 bp, Homo sapiens
gcctgccgcgccgcgatgtgggagaggtgggtcccggtgaccgtgctccccggctgcgtgggctgcaggaccgtcgcggcgctggcgtcctggaccgtgcgcgatgtgaaggaacgtatcttcgcggagactggcttcccggtgtcggagcagcggctgtggcgcggcggccg

SEQ ID NO: 75129 - DNA, 723 bp, Homo sapiens
ctgatggcactggaggaaaacaaaggccgagagaccctgatgcccacagcccccagatcacagaagtgaggccaagatgcccatgtcaccagagccagaagaaaggctcctaccaaagaatattttacatctgctgagatgagggtgagaaacaaaatccaagaatttctgcgacgttttccccaagaaccttcaaaaagaaatacagaaaattctcagatgaaaataaattgattttgctctgggggaaagccaaaaacctttagcgaatccacactgttttatcctgagaacttccatgggtcgctggatcagcaggcaaccattatcagactggagagtcatactttaaggaatacaaatgcaacacacgacaatgtttcctgacatcagatgatgaatggacactgaagggaaaaacaggctttttttccacctggcaggaagagctgaacttggagtacacatttaaaggaagcacagagggaagacttaaacagaagaaagaagcgtactttcatggttttcacaaacaaatatcccaggagaagtgatcatggagaccaaggagaacaggtgggtcccggtgaccgtgctccccggctgcgtgggctgcaggaccgtcgcggcgctggcgtcctggaccgtgcgcgatgtgaaggaacgtatcttcgcggagactggcttcccggtgtcggagcagcggctgtggcgcggcggccg

SEQ ID NO: 75130 - DNA, 383 bp, Homo sapiens
tctttccttctttccttctttccttctttccttccttccttccttccttccttccttccttccttccttccttccttccttcccactgaagccccatcattaatgcaaatccaccctctcctctcccctacttctctacatccacacagctgtcttttccctgctttgaaaatatgtacattagctgaactagagagctaaggtatttcactattcaaagaagagtatttcttacatatatccatatcacaaggcttttaaactatttttgactcctataatttctataactctttacaagtctgatgtagacaccaattggagaacttgagaattaagtttaatgtaaaggatatcaaagagataaaagataatagaatttc

SEQ ID NO: 75131 - DNA, 483 bp, Homo sapiens
gagacagagtccactctgttgctcaggctggagtgcagtgacgcaatctcggctcactgcaacctccgcctcccgggtccaagcgattctcatgcctcagcctcctgagtagttgggactacaggcatgcaccaccacgcccacctaattttttttgtattttcagtagagatggggttttgccatgttggccaggctggtctcgaactcctgacctcagtggtgggattacaggcatgagccaccacgcccaacctgatgccttctttttctgaccatttcctctccagcaatcccaccgtggccacaggaaaacctggcccaggagattccaatgttcttggcttcccctcctgtcacagcctcagtgattttgtgatttcatcttgcttctcagggcttgcttttatcaaaagggttggttagtcacaatggctgttaataggtgcaacaaggcatagaagacctgttaggggttgaact

SEQ ID NO: 75132 - DNA, 330 bp, Homo sapiens
actaggaggacattctttatatgttgagttagaagaatctccaagatatgctgtcaaggaagaatacagaaagcaagaaacaatagcgtatgctaccatttgtgtttaaaaggggggtaggaagtgactaatagactacatcaggaaaaggtgtagcaatttcccataaaactagacatacacttaccctacacccagctattctactcctgggtattgaaacccaagatgaaaatatatgcctatacaaagacttgtacaagaatgttcataatagctgaaaaatagggaacagcctaggtggccatcaacaggcaaatggatacatgt

SEQ ID NO: 75133 - DNA, 470 bp, Homo sapiens
cgccaccacacctggctaatttttgcattttttagtagagacggagtttcaccatgttggccaagctggtcttgaactcctgtacttaaatgatccgcccgccttggcctcccaaagtgctggaattacaggcgtgagtcaccttgcccggtcaccattctcatttcacagatgaacaaactgagtcttggagacatgccggatcacctacacagggtcacatagctgacaaatggccaggcagtaatttgaccccagctctgtggcaccaggcattccagacagacatgggcccagagacactcagctcatcagcagtagcctcagaattatcagaaaacacggccgggtacggtggctcacgcctataatcccagcactttgggaggcggaggtgggtggatcacctgaggtcaggagttcgagaccagcctggccaacatggagaaaccccatctctactaaaaata

SEQ ID NO: 75134 - DNA, 256 bp, Homo sapiens
aaagagatagggtctcactgttacccaagctcgggtgacagagtgaaacactgcacccaagtgcagcagcacgatcatggctcactgcagcctcgacctcctggccttaagggatcctcctcttttagcctcccgagtagctaggactacatgtgcgggccgccacacctggctgatttttaaattttttgtagagacgagggtctcactatgttgcccaggctagtctcaaactcctagcctcatatgatcctcc

SEQ ID NO: 75135 - DNA, 545 bp, Homo sapiens
agcgggctaggtggagggaaggaaggagggagccggggagtgggccaggcagcagccgggctgaagtcggcttggggagccagagggagcggagcggaacctgcggggcagaggcggcggccgcagcggcgcagctgatagcaggaacaggatcaagtcttccatacctgcattcccttcgtcaccgtaactggtacattcaggccacctgtgccaccagcggggacgggctgtacgaaggcctggactggctggccaatcagctcaaaaacaagaagtgaaagccagacagccctaacaaggcaccccacccacccctgacatacctactgtcaccctgccccagtcctaccccttcctctccatgcaagtgtggccagggccctgggtatcatgtccacatgcccagcaagagccttgcctcccctgcctcccctcctttttcctgtccacctatatgaccaatccctaattgctgtcctgatgatgagtcattccaatttactggatttaaaacaaaaaaaaaacaaaactctccagcgcgt

SEQ ID NO: 75136 - DNA, 178 bp, Homo sapiens
gggccacctccctagggggtgagcgccccgcctccagaggcattcacacccgggccaaatgcacttggcggaagcaacagaactttacagcaggggccgcgtagcctggactctgcagtcgctgacaggattcaagtcctgactgccacaagattctcccagatgcttcaggacaagc

SEQ ID NO: 75137 - DNA, 426 bp, Homo sapiens
tcttgcccagagtgaaggtcagagtgccactgtgtaggacaggtggctgggagcctgctcagcaggagctgccaaccccagaaactgatgccagggcccctctaaaaggtccagccagatcatgcttcacagacatgagccaccccggccagcatttccactcagcttttgtccccactcacgaatgttctgcagcttgtcactatgtgtaccctcgagggtggctgatgagcccacatgcaggaaaaagcaggtcagataaactaaatggcaagctgaatgcctggcaaggaacgcacaaacctgccacccgctctcaccagcggtgaccacgggagcccctgaggctaccacgcaacctgcctccagaccagtgtcatctggaagtgtgggatccccagccagcggcattagtgtcatcctgga

SEQ ID NO: 75138 - DNA, 351 bp, Homo sapiens
  misc_feature (18)..(18): n is a, c, g, or t
  misc_feature (54)..(54): n is a, c, g, or t
  misc_feature (137)..(137): n is a, c, g, or t
  misc_feature (142)..(142): n is a, c, g, or t
  misc_feature (146)..(147): n is a, c, g, or t
accaaagtgggaggtttnatttccttggtcctccttccctcccaaggaagccancaagcgcccgtgaaagagccgcctccaggcccaagaaggaggttttatttcttggtctcttcctccttggataaagtccttgnatggnactnnccgaattcggcacgaggtgtttactaattccagtaactacttttggtttgtaaagttgtaatgagcagtgttcattaaaaagtaactcaagacaaaagtgtttactaattccagtaactaccatttctttttcagctagatgagtgatcggaaaatttttgttgcatttcaaaatctaaataaactacagactttatccttata

SEQ ID NO: 75139 - DNA, 3962 bp, Homo sapiens
ggggtactctagcaggatcttaaacgaccgaagactagaaaggttggagctgccgccgcctgcagtcggtgaccgcgcgacttcggccccgcccgcggaatcggatggcataagtgattaaggtggtattgaggatttctgaagcctatgaaaggtagaaactcaaccatgatttctttttcaactctacagcattcctttccttgaagtcttcgtttttaccttagtctcgggcagttatacttaagcatgaacattgacgacaaactggaaggattgtttcttaaatgtggcggcatagacgaaatgcagtcttccaggacaatggttgtaatgggtggagtgtctggccagtctactgtgtctggagagctacaggattcagtacttcaagatcgaagtatgcctcaccaggagatccttgctgcagatgaagtgttacaagaaagtgaaatgagacaacaggatatgatatcacatgatgaactcatggtccatgaggagacagtgaaaaatgatgaagagcagatggaaacacatgaaagacttcctcaaggactacagtatgcacttaatgtccctataagcgtaaagcaggaaattacttttactgatgtatctgagcaactgatgagagacaaaaaacaaatcagagagccagtagacttacagaaaaagaagaagcggaaacaacgttctcccgcaaaaatccttacaataaatgaggatggatcacttggtttgaaaacccctaaatctcacgtttgtgagcactgcaatgctgcctttagaacgaactatcacttacagagacatgtcttcattcatacaggtgaaaaaccatttcaatgtagtcaatgtgacatgcgtttcatacagaagtacctgcttcagagacatgagaagattcatactggtgaaaaaccatttcgctgtgatgaatgtggtatgagattcatacaaaaatatcatatggaaaggcataagagaactcatagtggagaaaaaccttaccagtgtgaatactgtttacagtatttttccagaacagatcgtgtattgaaacataaacgtatgtgccatgaaaatcatgacaaaaaactaaatagatgtgccatcaaaggtggccttctgacatctgaggaagattctggcttttctacatcaccaaaagacaactcactgccaaaaaagaaaaggcagaaaacggagaaaaaatcatctggaatggacaaagagagtgctttggacaaatctgacctgaaaaaagacaaaaatgattacttgcctctttattcttcaagtactaaagtaaaagatgagtatatggttgcagaatatgctgttgaaatgccacattcgtcagttgggggctcgcatttagaagatgcgtcaggagaaatacacccacctaagttagttctcaaaaaaattaatagtaagagaagtctgaaacagccactggagcaaaatcaaacaatttcacctttatccacatatgaagagagcaaagtttcaaagtatgcttttgaacttgtggataaacaggctttactggactcagaaggcaatgctgacattgatcaggttgataatttgcaggaggggcccagtaaacctgtgcatagtagtactaattatgatgatgccatgcagtttttgaagaagaagcggtatcttcaagcagcaagtaacaacagcagggaatatgcgctgaatgtgggtaccatagcttctcagccttctgtaacacaagcagctgtggcaagtgtcattgatgaaagtaccacggcatccatattagagtcacaggcactgaatgtggagattaagagtaatcatgacaaaaatgttattccagatgaggtactgcagactctgttggatcattattcccacaaagctaatggacagcatgagatatccttcagtgttgcagatactgaagtgacttctagcatatcaataaattcttcagaagtaccagaggtcaccccatcagagaatgttggatcaagctcccaagcatcctcatcagataaagccaacatgttgcaggaatactccaagtttctgcagcaggctttggacagaactagccaaaatgatgcctatttgaatagcccgagccttaactttgtgactgataaccagaccctcccaaatcagccagcattctcttccatagacaagcaggtctatgccaccatgcccatcaatagctttcgatcaggaatgaattctccactaagaacaactccagataagtcccactttggactaatagttggtgattcacagcactcatttcccttttcaggtgatgagacaaaccatgcttctgccacatcaacacaggactttctggatcaagtgacttctcagaagaaagctgaggcccagcctgtccaccaagcttaccaaatgagctcctttgaacagcccttccgtgctccctatcatggatcaagagctggaatagctactcaatttagcactgccaatggacaggtgaaccttcggggaccagggacaagtgctgaattttcagaatttcccttggtgaatgtaaatgataatagagctgggatgacatcttcacctgatgccacaactggccagacttttggctaaaaaaaaaaaaaagtgtaaataatactggcactttagaacagattaatcaagagtggggttactctgtgtaaatggagtgctgtacagatttaagagcaatgcgtaataacaagttaagctgatatgaatagcaagataatccaataactgcatttcgtttggttagtcagcattctttgaactgccttacatgttgtcacctttatagaagcaatgcattacttgttttagatcagaaacttgctattccacccacaccaagttaaaaaggaaaaaaaaaagactttcgcacaattgtttcctaactgataacattgtacattcttaggagattagtaattgtgtgaaatttactcatactgtttctaagtttttcagcatagtcattgcacttcagcagggaatctgagtatactttacagacagagtgaacttaaaagtttaatgtcaagagattatggcttaaataaattagtgtgtcctatagggggaaaaaaaccaagaaaccaccttttaaaaagaatgatatgccatatacccttgattttcattttgcattatattgacgtgtttttttgaaggaaaaaaagtaataaaaatctgatagtctaagactccactatttaaaagcctaattactttaaaaatatgcatactttcagaacttttaccaaaacacacaactgttgaagcagtcacttctctatggaagtatgcatattggtgtcagtttctttgtacagttgtacttagatattttttatgatttttcatgtgcaggtatcaaggttttgaagttttagtaaaagaaattctgtagattacattcccaagaacataatgcttacacaaaatgtatattccacgttttaaagcttaattgtattttactttacatatacacttcagttaacatagagcacttagaatctatttggtatttttgatttctcaaagtaaaaaaaaaattagatttttaggtttgatatggttgtgtcataatcatctcgtaattgacaattttaacttttggcaataaaaggaaattgggatatctttggaactgtaaaacctggtttaatctttttctttctagactcttgatagattggataattaaacagtatccagagaaactaaagaaatgggcattttaattgcatattttatcttgagttactttttaatgaacactgctcattacaactttacaaaccaaaagtgtttactaattccagtaactaccatttctttttcagctagatgagtgatcggaaaatttttgttgcatttcaaaatctaaataaactacagactttatccttata

SEQ ID NO: 75140 - DNA, 4274 bp, Homo sapiens
tactgctctgggaggaggaagagaaggaggaagaggaggaggaggaggagggggaggaagaggagaaaggcgcaggggtgggagctgttgccgaagctgccacagcaaaagttctcccccctccccccttcccctcctctcaaggcccctagaaaggttggagctgccgccgcctgcagtcggtgaccgcgcgacttcggccccgcccgcggatagagggaggaatcagcagcttggaaattcaagcacgtgatctggcgggatgggcgtttgcctaacgtatttaatggaggaatcggatggcataagtgattaaggtggtattgaggatttctgaagcctatgaaaggtagaaactcaaccatgatttctttttcaactctacagcattcctttccttgaagtcttcgtttttaccttagtctcggggtcttattctgtcacctaggtggagtgcagtagtacagtcacagctcactgcagccccaacatcctgggctcaagccatcctcctgcctcagcctcccaagtagctgggaccacaggcagttatacttaagcatgaacattgacgacaaactggaaggattgtttcttaaatgtggcggcatagacgaaatgcagtcttccaggacaatggttgtaatgggtggagtgtctggccagtctactgtgtctggagagctacaggattcagtacttcaagatcgaagtatgcctcaccaggagatccttgctgcagatgaagtgttacaagaaagtgaaatgagacaacaggatatgatatcacatgatgaactcatggtccatgaggagacagtgaaaaatgatgaagagcagatggaaacacatgaaagacttcctcaaggactacagtatgcacttaatgtccctataagcgtaaagcaggaaattacttttactgatgtatctgagcaactgatgagagacaaaaaacaaatcagagagccagtagacttacagaaaaagaagaagcggaaacaacgttctcccgcaaaaatccttacaataaatgaggatggatcacttggtttgaaaacccctaaatctcacgtttgtgagcactgcaatgctgcctttagaacgaactatcacttacagagacatgtcttcattcatacaggtgaaaaaccatttcaatgtagtcaatgtgacatgcgtttcatacagaagtacctgcttcagagacatgagaagattcatactggtgaaaaaccatttcgctgtgatgaatgtggtatgagattcatacaaaaatatcatatggaaaggcataagagaactcatagtggagaaaaaccttaccagtgtgaatactgtttacagtatttttccagaacagatcgtgtattgaaacataaacgtatgtgccatgaaaatcatgacaaaaaactaaatagatgtgccatcaaaggtggccttctgacatctgaggaagattctggcttttctacatcaccaaaagacaactcactgccaaaaaagaaaaggcagaaaacggagaaaaaatcatctggaatggacaaagagagtgctttggacaaatctgacctgaaaaaagacaaaaatgattacttgcctctttattcttcaagtactaaagtaaaagatgagtatatggttgcagaatatgctgttgaaatgccacattcgtcagttgggggctcgcatttagaagatgcgtcaggagaaatacacccacctaagttagttctcaaaaaaattaatagtaagagaagtctgaaacagccactggagcaaaatcaaacaatttcacctttatccacatatgaagagagcaaagtttcaaagtatgcttttgaacttgtggataaacaggctttactggactcagaaggcaatgctgacattgatcaggttgataatttgcaggaggggcccagtaaacctgtgcatagtagtactaattatgatgatgccatgcagtttttgaagaagaagcggtatcttcaagcagcaagtaacaacagcagggaatatgcgctgaatgtgggtaccatagcttctcagccttctgtaacacaagcagctgtggcaagtgtcattgatgaaagtaccacggcatccatattagagtcacaggcactgaatgtggagattaagagtaatcatgacaaaaatgttattccagatgaggtactgcagactctgttggatcattattcccacaaagctaatggacagcatgagatatccttcagtgttgcagatactgaagtgacttctagcatatcaataaattcttcagaagtaccagaggtcaccccatcagagaatgttggatcaagctcccaagcatcctcatcagataaagccaacatgttgcaggaatactccaagtttctgcagcaggctttggacagaactagccaaaatgatgcctatttgaatagcccgagccttaactttgtgactgataaccagaccctcccaaatcagccagcattctcttccatagacaagcaggtctatgccaccatgcccatcaatagctttcgatcaggaatgaattctccactaagaacaactccagataagtcccactttggactaatagttggtgattcacagcactcatttcccttttcaggtgatgagacaaaccatgcttctgccacatcaacacaggactttctggatcaagtgacttctcagaagaaagctgaggcccagcctgtccaccaagcttaccaaatgagctcctttgaacagcccttccgtgctccctatcatggatcaagagctggaatagctactcaatttagcactgccaatggacaggtgaaccttcggggaccagggacaagtgctgaattttcagaatttcccttggtgaatgtaaatgataatagagctgggatgacatcttcacctgatgccacaactggccagacttttggctaaaaaaaaaaaaaagtgtaaataatactggcactttagaacagattaatcaagagtggggttactctgtgtaaatggagtgctgtacagatttaagagcaatgcgtaataacaagttaagctgatatgaatagcaagataatccaataactgcatttcgtttggttagtcagcattctttgaactgccttacatgttgtcacctttatagaagcaatgcattacttgttttagatcagaaacttgctattccacccacaccaagttaaaaaggaaaaaaaaaagactttcgcacaattgtttcctaactgataacattgtacattcttaggagattagtaattgtgtgaaatttactcatactgtttctaagtttttcagcatagtcattgcacttcagcagggaatctgagtatactttacagacagagtgaacttaaaagtttaatgtcaagagattatggcttaaataaattagtgtgtcctatagggggaaaaaaaccaagaaaccaccttttaaaaagaatgatatgccatatacccttgattttcattttgcattatattgacgtgtttttttgaaggaaaaaaagtaataaaaatctgatagtctaagactccactatttaaaagcctaattactttaaaaatatgcatactttcagaacttttaccaaaacacacaactgttgaagcagtcacttctctatggaagtatgcatattggtgtcagtttctttgtacagttgtacttagatattttttatgatttttcatgtgcaggtatcaaggttttgaagttttagtaaaagaaattctgtagattacattcccaagaacataatgcttacacaaaatgtatattccacgttttaaagcttaattgtattttactttacatatacacttcagttaacatagagcacttagaatctatttggtatttttgatttctcaaagtaaaaaaaaaattagatttttaggtttgatatggttgtgtcataatcatctcgtaattgacaattttaacttttggcaataaaaggaaattgggatatctttggaactgtaaaacctggtttaatctttttctttctagactcttgatagattggataattaaacagtatccagagaaactaaagaaatgggcattttaattgcatattttatcttgagttactttttaatgaacactgctcattacaactttacaaaccaaaagtgtttactaattccagtaactaccatttctttttcagctagatgagtgatcggaaaatttttgttgcatttcaaaatctaaataaactacagactttatccttata

SEQ ID NO: 75141 - DNA, 4342 bp, Homo sapiens
tttttagtagagacagggtttcaccatgttggccaggatggtctcgatctcctgacctgctgatctgcccgcctcggcctcccaaagtgttgggatgacagacgtgagccactgcacccggccaatgttttatatatttaaaacataaaaatatagttattttatatatttaatggttgtttctaagttttctttagtgatttgtctgatagtgttcctgtcagtttattgatctcttctaatttttaaggtattttaatatattaaggatatggagtttttgactgatgttacaaatacttttcaccaattgattcttaaggatttccaaataaatggacagaataatgaaattttagcattaagagacttgtttcatttagttttagtttgttttctaagaaatgtgataaatgaaatttttgaagagagcagctatttggtgatgtatgtaacatctttgacctttatttttatttgtttatttttgagacagggtcttattctgtcacctaggtggagtgcagtagtacagtcacagctcactgcagccccaacatcctgggctcaagccatcctcctgcctcagcctcccaagtagctgggaccacaggcagttatacttaagcatgaacattgacgacaaactggaaggattgtttcttaaatgtggcggcatagacgaaatgcagtcttccaggacaatggttgtaatgggtggagtgtctggccagtctactgtgtctggagagctacaggattcagtacttcaagatcgaagtatgcctcaccaggagatccttgctgcagatgaagtgttacaagaaagtgaaatgagacaacaggatatgatatcacatgatgaactcatggtccatgaggagacagtgaaaaatgatgaagagcagatggaaacacatgaaagacttcctcaaggactacagtatgcacttaatgtccctataagcgtaaagcaggaaattacttttactgatgtatctgagcaactgatgagagacaaaaaacaaatcagagagccagtagacttacagaaaaagaagaagcggaaacaacgttctcccgcaaaaatccttacaataaatgaggatggatcacttggtttgaaaacccctaaatctcacgtttgtgagcactgcaatgctgcctttagaacgaactatcacttacagagacatgtcttcattcatacaggtgaaaaaccatttcaatgtagtcaatgtgacatgcgtttcatacagaagtacctgcttcagagacatgagaagattcatactggtgaaaaaccatttcgctgtgatgaatgtggtatgagattcatacaaaaatatcatatggaaaggcataagagaactcatagtggagaaaaaccttaccagtgtgaatactgtttacagtatttttccagaacagatcgtgtattgaaacataaacgtatgtgccatgaaaatcatgacaaaaaactaaatagatgtgccatcaaaggtggccttctgacatctgaggaagattctggcttttctacatcaccaaaagacaactcactgccaaaaaagaaaaggcagaaaacggagaaaaaatcatctggaatggacaaagagagtgctttggacaaatctgacctgaaaaaagacaaaaatgattacttgcctctttattcttcaagtactaaagtaaaagatgagtatatggttgcagaatatgctgttgaaatgccacattcgtcagttgggggctcgcatttagaagatgcgtcaggagaaatacacccacctaagttagttctcaaaaaaattaatagtaagagaagtctgaaacagccactggagcaaaatcaaacaatttcacctttatccacatatgaagagagcaaagtttcaaagtatgcttttgaacttgtggataaacaggctttactggactcagaaggcaatgctgacattgatcaggttgataatttgcaggaggggcccagtaaacctgtgcatagtagtactaattatgatgatgccatgcagtttttgaagaagaagcggtatcttcaagcagcaagtaacaacagcagggaatatgcgctgaatgtgggtaccatagcttctcagccttctgtaacacaagcagctgtggcaagtgtcattgatgaaagtaccacggcatccatattagagtcacaggcactgaatgtggagattaagagtaatcatgacaaaaatgttattccagatgaggtactgcagactctgttggatcattattcccacaaagctaatggacagcatgagatatccttcagtgttgcagatactgaagtgacttctagcatatcaataaattcttcagaagtaccagaggtcaccccatcagagaatgttggatcaagctcccaagcatcctcatcagataaagccaacatgttgcaggaatactccaagtttctgcagcaggctttggacagaactagccaaaatgatgcctatttgaatagcccgagccttaactttgtgactgataaccagaccctcccaaatcagccagcattctcttccatagacaagcaggtctatgccaccatgcccatcaatagctttcgatcaggaatgaattctccactaagaacaactccagataagtcccactttggactaatagttggtgattcacagcactcatttcccttttcaggtgatgagacaaaccatgcttctgccacatcaacacaggactttctggatcaagtgacttctcagaagaaagctgaggcccagcctgtccaccaagcttaccaaatgagctcctttgaacagcccttccgtgctccctatcatggatcaagagctggaatagctactcaatttagcactgccaatggacaggtgaaccttcggggaccagggacaagtgctgaattttcagaatttcccttggtgaatgtaaatgataatagagctgggatgacatcttcacctgatgccacaactggccagacttttggctaaaaaaaaaaaaaagtgtaaataatactggcactttagaacagattaatcaagagtggggttactctgtgtaaatggagtgctgtacagatttaagagcaatgcgtaataacaagttaagctgatatgaatagcaagataatccaataactgcatttcgtttggttagtcagcattctttgaactgccttacatgttgtcacctttatagaagcaatgcattacttgttttagatcagaaacttgctattccacccacaccaagttaaaaaggaaaaaaaaaagactttcgcacaattgtttcctaactgataacattgtacattcttaggagattagtaattgtgtgaaatttactcatactgtttctaagtttttcagcatagtcattgcacttcagcagggaatctgagtatactttacagacagagtgaacttaaaagtttaatgtcaagagattatggcttaaataaattagtgtgtcctatagggggaaaaaaaccaagaaaccaccttttaaaaagaatgatatgccatatacccttgattttcattttgcattatattgacgtgtttttttgaaggaaaaaaagtaataaaaatctgatagtctaagactccactatttaaaagcctaattactttaaaaatatgcatactttcagaacttttaccaaaacacacaactgttgaagcagtcacttctctatggaagtatgcatattggtgtcagtttctttgtacagttgtacttagatattttttatgatttttcatgtgcaggtatcaaggttttgaagttttagtaaaagaaattctgtagattacattcccaagaacataatgcttacacaaaatgtatattccacgttttaaagcttaattgtattttactttacatatacacttcagttaacatagagcacttagaatctatttggtatttttgatttctcaaagtaaaaaaaaaattagatttttaggtttgatatggttgtgtcataatcatctcgtaattgacaattttaacttttggcaataaaaggaaattgggatatctttggaactgtaaaacctggtttaatctttttctttctagactcttgatagattggataattaaacagtatccagagaaactaaagaaatgggcattttaattgcatattttatcttgagttactttttaatgaacactgctcattacaactttacaaaccaaaagtgtttactaattccagtaactaccatttctttttcagctagatgagtgatcggaaaatttttgttgcatttcaaaatctaaataaactacagactttatccttata

SEQ ID NO: 75142 - DNA, 3589 bp, Homo sapiens
ggggtactctagcaggatcttaaacgaccgaagactagaaaggttggagctgccgccgcctgcagtcggtgaccgcgcgacttcggccccgcccgcggatagagggaggaatcagcagcttggaaattcaagcacgtgatctggcgggatgggcgtttgcctaacgtatttaatggaggaatcggatggcataagtgattaaggtggtattgaggatttctgaagcctatgaaaggtagaaactcaaccatgatttctttttcaactctacagcattcctttccttgaagtcttcgtttttaccttagtctcgggcagttatacttaagcatgaacattgacgacaaactggaaggattgtttcttaaatgtggcggcatagacgaaatgcagtcttccaggacaatggttgtaatgggtggagtgtctggccagtctactgtgtctggagagctacaggattcagtacttcaagatcgaagtatgcctcaccaggagatccttgctgcagatgaagtgttacaagaaagtgaaatgagacaacaggatatgatatcacatgatgaactcatggtccatgaggagacagtgaaaaatgatgaagagcagatggaaacacatgaaagacttcctcaaggactacagtatgcacttaatgtccctataagcgtaaagcaggaaattacttttactgatgtatctgagcaactgatgagagacaaaaaacaaatcagagagccagtagacttacagaaaaagaagaagcggaaacaacgttctcccgcaaaaatccttacaataaatgaggatggatcacttggtttgaaaacccctaaatctcacgtttgtgagcactgcaatgctgcctttagaacgaactatcacttacagagacatgtcttcattcatacaggtgaaaaaccatttcaatgtagtcaatgtgacatgcgtttcatacagaagtacctgcttcagagacatgagaagattcatactggtgaaaaaccatttcgctgtgatgaatgtggtatgagattcatacaaaaatatcatatggaaaggcataagagaactcatagtggagaaaaaccttaccagtgtgaatactgtttacagtatttttccagaacagatcgtgtattgaaacataaacgtatgtgccatgaaaatcatgacaaaaaactaaatagatgtgccatcaaaggtggccttctgacatctgaggaagattctggcttttctacatcaccaaaagacaactcactgccaaaaaagaaaaggcagaaaacggagaaaaaatcatctggaatggacaaagagagtgctttggacaaatctgacctgaaaaaagacaaaaatgattacttgcctctttattcttcaagtactaaagtaaaagatgagtatatggttgcagaatatgctgttgaaatgccacattcgtcagttgggggctcgcatttagaagatgcgtcaggagaaatacacccacctaagttagttctcaaaaaaattaatagtaagagaagtctgaaacagccactggagcaaaatcaaacaatttcacctttatccacatatgaagagagcaaagtttcaaagtatgcttttgaacttgtggataaacaggctttactggactcagaaggcaatgctgacattgatcaggttgataatttgcaggaggggcccagtaaacctgtgcatagtagtactaattatgatgatgccatgcagtttttgaagaagaagcggtatcttcaagcagcaagtaacaacagcagggaatatgcgctgaatgtgggtaccatagcttctcagccttctgtaacacaagcagctgtggcaagtgtcattgatgaaagtaccacggcatccatattagagtcacaggcactgaatgtggagattaagagtaatcatgacaaaaatgttattccagatgaggtgatgagacaaaccatgcttctgccacatcaacacaggactttctggatcaagtgacttctcagaagaaagctgaggcccagcctgtccaccaagcttaccaaatgagctcctttgaacagcccttccgtgctccctatcatggatcaagagctggaatagctactcaatttagcactgccaatggacaggtgaaccttcggggaccagggacaagtgctgaattttcagaatttcccttggtgaatgtaaatgataatagagctgggatgacatcttcacctgatgccacaactggccagacttttggctaaaaaaaaaaaaaagtgtaaataatactggcactttagaacagattaatcaagagtggggttactctgtgtaaatggagtgctgtacagatttaagagcaatgcgtaataacaagttaagctgatatgaatagcaagataatccaataactgcatttcgtttggttagtcagcattctttgaactgccttacatgttgtcacctttatagaagcaatgcattacttgttttagatcagaaacttgctattccacccacaccaagttaaaaaggaaaaaaaaaagactttcgcacaattgtttcctaactgataacattgtacattcttaggagattagtaattgtgtgaaatttactcatactgtttctaagtttttcagcatagtcattgcacttcagcagggaatctgagtatactttacagacagagtgaacttaaaagtttaatgtcaagagattatggcttaaataaattagtgtgtcctatagggggaaaaaaaccaagaaaccaccttttaaaaagaatgatatgccatatacccttgattttcattttgcattatattgacgtgtttttttgaaggaaaaaaagtaataaaaatctgatagtctaagactccactatttaaaagcctaattactttaaaaatatgcatactttcagaacttttaccaaaacacacaactgttgaagcagtcacttctctatggaagtatgcatattggtgtcagtttctttgtacagttgtacttagatattttttatgatttttcatgtgcaggtatcaaggttttgaagttttagtaaaagaaattctgtagattacattcccaagaacataatgcttacacaaaatgtatattccacgttttaaagcttaattgtattttactttacatatacacttcagttaacatagagcacttagaatctatttggtatttttgatttctcaaagtaaaaaaaaaattagatttttaggtttgatatggttgtgtcataatcatctcgtaattgacaattttaacttttggcaataaaaggaaattgggatatctttggaactgtaaaacctggtttaatctttttctttctagactcttgatagattggataattaaacagtatccagagaaactaaagaaatgggcattttaattgcatattttatcttgagttactttttaatgaacactgctcattacaactttacaaaccaaaagtgtttactaattccagtaactaccatttctttttcagctagatgagtgatcggaaaatttttgttgcatttcaaaatctaaataaactacagactttatccttata

SEQ ID NO: 75143 - DNA, 1880 bp, Homo sapiens
  misc_feature (1852)..(1852): n is a, c, g, or t
  misc_feature (1863)..(1863): n is a, c, g, or t
  misc_feature (1877)..(1877): n is a, c, g, or t
ggggtactctagcaggatcttaaacgaccgaagactagaaaggttggagctgccgccgcctgcagtcggtgaccgcgcgacttcggccccgcccgcggatagagggaggaatcagcagcttggaaattcaagcacgtgatctggcgggatgggcgtttgcctaacgtatttaatggaggaatcggatggcataagtgattaaggtggtattgaggatttctgaagcctatgaaaggtagaaactcaaccatgatttctttttcaactctacagcattcctttccttgaagtcttcgtttttaccttagtctcgggcagttatacttaagcatgaacattgacgacaaactggaaggattgtttcttaaatgtggcggcatagacgaaatgcagtcttccaggacaatggttgtaatgggtggagtgtctggccagtctactgtgtctggagagctacaggattcagtacttcaagatcgaagtatgcctcaccaggagatccttgctgcagatgaagtgttacaagaaagtgaaatgagacaacaggatatgatatcacatgatgaactcatggtccatgaggagacagtgaaaaatgatgaagagcagatggaaacacatgaaagacttcctcaaggactacagtatgcacttaatgtccctataagcgtaaagcaggaaattacttttactgatgtatctgagcaactgatgagagacaaaaaacaaatcagagagccagtagacttacagaaaaagaagaagcggaaacaacgttctcccgcaaaaatccttacaataaatgaggatggatcacttggtttgaaaacccctaaatctcacgtttgtgagcactgcaatgctgcctttagaacgaactatcacttacagagacatgtcttcattcatacaggtgaaaaaccatttcaatgtagtcaatgtgacatgcgtttcatacagaagtacctgcttcagagacatgagaagattcatactggtgaaaaaccatttcgctgtgatgaatgtggtatgagattcatacaaaaatatcatatggaaaggcataagagaactcatagtggagaaaaaccttaccagtgtgaatactgtttacagtatttttccagaacagatcgtgtattgaaacataaacgtatgtgccatgaaaatcatgacaaaaaactaaatagatgtgccatcaaaggtggccttctgacatctgaggaagattctggcttttctacatcaccaaaagacaactcactgccaaaaaagaaaaggcagaaaacggagaaaaaatcatctggaatggacaaagagagtgctttggacaaatctgacctgaaaaaagacaaaaatgattacttgcctctttattcttcaagtactaaagtaaaagatgagtatatggttgcagaatatgctgttgaaatgccacattcgtcagttgggggctcgcatttagaagatgcgtcaggagaaatacacccacctaagttagttctcaaaaaaattaatagtaagagaagtctgaaacagccactggagcaaaatcaaacaatttcacctttatccacatatgaagagagcaaagtttcaaagtatgcttttgaacttgtggataaacaggctttactggactcagaaggcaatgctgacattgatcaggttgataatttgcaggaggggcccagtaaacctgtgcatagtagtactaattatgatgatgccatgcagtttttgaagaagaagcggtatcttcaagcagcaagtaacaacagcagggaatatgcgctgaatgtgggtaccatagcttctcagccttcttgggttaaaaaaaccccaaaccccnaaaaaaggggnccccccaaaggggnccc

SEQ ID NO: 75144 - DNA, 484 bp, Homo sapiens
ggaaacaacgttctcccgcaaaagtaagacaatgtattaaggtggtaatcacaacctcttaattccaactgttggttaattctataggcaagaacctggctggaccctaaggcagatgtagaagtcttgtgtggtttagtaggagggggtgcgtgcctgcatggaggtggtgggccttgctttcaatttttctgcttctctttcaccatgttcctgacttgtctaaaagtgaacttttctttttccatatctctatcggatggcatgcattgccctttcttctcatttgtattagttttccttatctttatattaaggtttcaggaaaatgtaataccagttattcatcaggaaaagatataggatccctgttaataggatgtaaacttcatgagggcagggacttcattttgttcacagctgtatcctaagagcctggaataggagacataatagatcctcagtaaatattttatgggttaat

SEQ ID NO: 75145 - DNA, 4157 bp, Homo sapiens
tactgctctgggaggaggaagagaaggaggaagaggaggaggaggaggagggggaggaagaggagaaaggcgcaggggtgggagctgttgccgaagctgccacagcaaaagttctcccccctccccccttcccctcctctcaaggcccctagaaaggttggagctgccgccgcctgcagtcggtgaccgcgcgacttcggccccgcccgcggatagagggaggaatcagcagcttggaaattcaagcacgtgatctggcgggatgggcgtttgcctaacgtatttaatggaggaatcggatggcataagtgattaaggtggtattgaggatttctgaagcctatgaaaggtagaaactcaaccatgatttctttttcaactctacagcattcctttccttgaagtcttcgtttttaccttagtctcgggcagttatacttaagcatgaacattgacgacaaactggaaggattgtttcttaaatgtggcggcatagacgaaatgcagtcttccaggacaatggttgtaatgggtggagtgtctggccagtctactgtgtctggagagctacaggattcagtacttcaagatcgaagtatgcctcaccaggagatccttgctgcagatgaagtgttacaagaaagtgaaatgagacaacaggatatgatatcacatgatgaactcatggtccatgaggagacagtgaaaaatgatgaagagcagatggaaacacatgaaagacttcctcaaggactacagtatgcacttaatgtccctataagcgtaaagcaggaaattacttttactgatgtatctgagcaactgatgagagacaaaaaacaaatcagagagccagtagacttacagaaaaagaagaagcggaaacaacgttctcccgcaaaaatccttacaataaatgaggatggatcacttggtttgaaaacccctaaatctcacgtttgtgagcactgcaatgctgcctttagaacgaactatcacttacagagacatgtcttcattcatacaggtgaaaaaccatttcaatgtagtcaatgtgacatgcgtttcatacagaagtacctgcttcagagacatgagaagattcatactggtgaaaaaccatttcgctgtgatgaatgtggtatgagattcatacaaaaatatcatatggaaaggcataagagaactcatagtggagaaaaaccttaccagtgtgaatactgtttacagtatttttccagaacagatcgtgtattgaaacataaacgtatgtgccatgaaaatcatgacaaaaaactaaatagatgtgccatcaaaggtggccttctgacatctgaggaagattctggcttttctacatcaccaaaagacaactcactgccaaaaaagaaaaggcagaaaacggagaaaaaatcatctggaatggacaaagagagtgctttggacaaatctgacctgaaaaaagacaaaaatgattacttgcctctttattcttcaagtactaaagtaaaagatgagtatatggttgcagaatatgctgttgaaatgccacattcgtcagttgggggctcgcatttagaagatgcgtcaggagaaatacacccacctaagttagttctcaaaaaaattaatagtaagagaagtctgaaacagccactggagcaaaatcaaacaatttcacctttatccacatatgaagagagcaaagtttcaaagtatgcttttgaacttgtggataaacaggctttactggactcagaaggcaatgctgacattgatcaggttgataatttgcaggaggggcccagtaaacctgtgcatagtagtactaattatgatgatgccatgcagtttttgaagaagaagcggtatcttcaagcagcaagtaacaacagcagggaatatgcgctgaatgtgggtaccatagcttctcagccttctgtaacacaagcagctgtggcaagtgtcattgatgaaagtaccacggcatccatattagagtcacaggcactgaatgtggagattaagagtaatcatgacaaaaatgttattccagatgaggtactgcagactctgttggatcattattcccacaaagctaatggacagcatgagatatccttcagtgttgcagatactgaagtgacttctagcatatcaataaattcttcagaagtaccagaggtcaccccatcagagaatgttggatcaagctcccaagcatcctcatcagataaagccaacatgttgcaggaatactccaagtttctgcagcaggctttggacagaactagccaaaatgatgcctatttgaatagcccgagccttaactttgtgactgataaccagaccctcccaaatcagccagcattctcttccatagacaagcaggtctatgccaccatgcccatcaatagctttcgatcaggaatgaattctccactaagaacaactccagataagtcccactttggactaatagttggtgattcacagcactcatttcccttttcaggtgatgagacaaaccatgcttctgccacatcaacacaggactttctggatcaagtgacttctcagaagaaagctgaggcccagcctgtccaccaagcttaccaaatgagctcctttgaacagcccttccgtgctccctatcatggatcaagagctggaatagctactcaatttagcactgccaatggacaggtgaaccttcggggaccagggacaagtgctgaattttcagaatttcccttggtgaatgtaaatgataatagagctgggatgacatcttcacctgatgccacaactggccagacttttggctaaaaaaaaaaaaaagtgtaaataatactggcactttagaacagattaatcaagagtggggttactctgtgtaaatggagtgctgtacagatttaagagcaatgcgtaataacaagttaagctgatatgaatagcaagataatccaataactgcatttcgtttggttagtcagcattctttgaactgccttacatgttgtcacctttatagaagcaatgcattacttgttttagatcagaaacttgctattccacccacaccaagttaaaaaggaaaaaaaaaagactttcgcacaattgtttcctaactgataacattgtacattcttaggagattagtaattgtgtgaaatttactcatactgtttctaagtttttcagcatagtcattgcacttcagcagggaatctgagtatactttacagacagagtgaacttaaaagtttaatgtcaagagattatggcttaaataaattagtgtgtcctatagggggaaaaaaaccaagaaaccaccttttaaaaagaatgatatgccatatacccttgattttcattttgcattatattgacgtgtttttttgaaggaaaaaaagtaataaaaatctgatagtctaagactccactatttaaaagcctaattactttaaaaatatgcatactttcagaacttttaccaaaacacacaactgttgaagcagtcacttctctatggaagtatgcatattggtgtcagtttctttgtacagttgtacttagatattttttatgatttttcatgtgcaggtatcaaggttttgaagttttagtaaaagaaattctgtagattacattcccaagaacataatgcttacacaaaatgtatattccacgttttaaagcttaattgtattttactttacatatacacttcagttaacatagagcacttagaatctatttggtatttttgatttctcaaagtaaaaaaaaaattagatttttaggtttgatatggttgtgtcataatcatctcgtaattgacaattttaacttttggcaataaaaggaaattgggatatctttggaactgtaaaacctggtttaatctttttctttctagactcttgatagattggataattaaacagtatccagagaaactaaagaaatgggcattttaattgcatattttatcttgagttactttttaatgaacactgctcattacaactttacaaaccaaaagtgtttactaattccagtaactaccatttctttttcagctagatgagtgatcggaaaatttttgttgcatttcaaaatctaaataaactacagactttatccttata

SEQ ID NO: 75146 - DNA, 4043 bp, Homo sapiens
ggggtactctagcaggatcttaaacgaccgaagactagaaaggttggagctgccgccgcctgcagtcggtgaccgcgcgacttcggccccgcccgcggatagagggaggaatcagcagcttggaaattcaagcacgtgatctggcgggatgggcgtttgcctaacgtatttaatggaggaatcggatggcataagtgattaaggtggtattgaggatttctgaagcctatgaaaggtagaaactcaaccatgatttctttttcaactctacagcattcctttccttgaagtcttcgtttttaccttagtctcgggcagttatacttaagcatgaacattgacgacaaactggaaggattgtttcttaaatgtggcggcatagacgaaatgcagtcttccaggacaatggttgtaatgggtggagtgtctggccagtctactgtgtctggagagctacaggattcagtacttcaagatcgaagtatgcctcaccaggagatccttgctgcagatgaagtgttacaagaaagtgaaatgagacaacaggatatgatatcacatgatgaactcatggtccatgaggagacagtgaaaaatgatgaagagcagatggaaacacatgaaagacttcctcaaggactacagtatgcacttaatgtccctataagcgtaaagcaggaaattacttttactgatgtatctgagcaactgatgagagacaaaaaacaaatcagagagccagtagacttacagaaaaagaagaagcggaaacaacgttctcccgcaaaaatccttacaataaatgaggatggatcacttggtttgaaaacccctaaatctcacgtttgtgagcactgcaatgctgcctttagaacgaactatcacttacagagacatgtcttcattcatacaggtgaaaaaccatttcaatgtagtcaatgtgacatgcgtttcatacagaagtacctgcttcagagacatgagaagattcatactggtgaaaaaccatttcgctgtgatgaatgtggtatgagattcatacaaaaatatcatatggaaaggcataagagaactcatagtggagaaaaaccttaccagtgtgaatactgtttacagtatttttccagaacagatcgtgtattgaaacataaacgtatgtgccatgaaaatcatgacaaaaaactaaatagatgtgccatcaaaggtggccttctgacatctgaggaagattctggcttttctacatcaccaaaagacaactcactgccaaaaaagaaaaggcagaaaacggagaaaaaatcatctggaatggacaaagagagtgctttggacaaatctgacctgaaaaaagacaaaaatgattacttgcctctttattcttcaagtactaaagtaaaagatgagtatatggttgcagaatatgctgttgaaatgccacattcgtcagttgggggctcgcatttagaagatgcgtcaggagaaatacacccacctaagttagttctcaaaaaaattaatagtaagagaagtctgaaacagccactggagcaaaatcaaacaatttcacctttatccacatatgaagagagcaaagtttcaaagtatgcttttgaacttgtggataaacaggctttactggactcagaaggcaatgctgacattgatcaggttgataatttgcaggaggggcccagtaaacctgtgcatagtagtactaattatgatgatgccatgcagtttttgaagaagaagcggtatcttcaagcagcaagtaacaacagcagggaatatgcgctgaatgtgggtaccatagcttctcagccttctgtaacacaagcagctgtggcaagtgtcattgatgaaagtaccacggcatccatattagagtcacaggcactgaatgtggagattaagagtaatcatgacaaaaatgttattccagatgaggtactgcagactctgttggatcattattcccacaaagctaatggacagcatgagatatccttcagtgttgcagatactgaagtgacttctagcatatcaataaattcttcagaagtaccagaggtcaccccatcagagaatgttggatcaagctcccaagcatcctcatcagataaagccaacatgttgcaggaatactccaagtttctgcagcaggctttggacagaactagccaaaatgatgcctatttgaatagcccgagccttaactttgtgactgataaccagaccctcccaaatcagccagcattctcttccatagacaagcaggtctatgccaccatgcccatcaatagctttcgatcaggaatgaattctccactaagaacaactccagataagtcccactttggactaatagttggtgattcacagcactcatttcccttttcaggtgatgagacaaaccatgcttctgccacatcaacacaggactttctggatcaagtgacttctcagaagaaagctgaggcccagcctgtccaccaagcttaccaaatgagctcctttgaacagcccttccgtgctccctatcatggatcaagagctggaatagctactcaatttagcactgccaatggacaggtgaaccttcggggaccagggacaagtgctgaattttcagaatttcccttggtgaatgtaaatgataatagagctgggatgacatcttcacctgatgccacaactggccagacttttggctaaaaaaaaaaaaaagtgtaaataatactggcactttagaacagattaatcaagagtggggttactctgtgtaaatggagtgctgtacagatttaagagcaatgcgtaataacaagttaagctgatatgaatagcaagataatccaataactgcatttcgtttggttagtcagcattctttgaactgccttacatgttgtcacctttatagaagcaatgcattacttgttttagatcagaaacttgctattccacccacaccaagttaaaaaggaaaaaaaaaagactttcgcacaattgtttcctaactgataacattgtacattcttaggagattagtaattgtgtgaaatttactcatactgtttctaagtttttcagcatagtcattgcacttcagcagggaatctgagtatactttacagacagagtgaacttaaaagtttaatgtcaagagattatggcttaaataaattagtgtgtcctatagggggaaaaaaaccaagaaaccaccttttaaaaagaatgatatgccatatacccttgattttcattttgcattatattgacgtgtttttttgaaggaaaaaaagtaataaaaatctgatagtctaagactccactatttaaaagcctaattactttaaaaatatgcatactttcagaacttttaccaaaacacacaactgttgaagcagtcacttctctatggaagtatgcatattggtgtcagtttctttgtacagttgtacttagatattttttatgatttttcatgtgcaggtatcaaggttttgaagttttagtaaaagaaattctgtagattacattcccaagaacataatgcttacacaaaatgtatattccacgttttaaagcttaattgtattttactttacatatacacttcagttaacatagagcacttagaatctatttggtatttttgatttctcaaagtaaaaaaaaaattagatttttaggtttgatatggttgtgtcataatcatctcgtaattgacaattttaacttttggcaataaaaggaaattgggatatctttggaactgtaaaacctggtttaatctttttctttctagactcttgatagattggataattaaacagtatccagagaaactaaagaaatgggcattttaattgcatattttatcttgagttactttttaatgaacactgctcattacaactttacaaaccaaaagtgtttactaattccagtaactaccatttctttttcagctagatgagtgatcggaaaatttttgttgcatttcaaaatctaaataaactacagactttatccttata

SEQ ID NO: 75147 - DNA, 3467 bp, Homo sapiens
atccctgagtcagggttgtggcctgctcagagaatggggcaaaacggagctgcatgctgccttcctctgcaaaccagcctgtttgctataagcgtaaagcaggaaattacttttactgatgtatctgagcaactgatgagagacaaaaaacaaatcagagagccagtagacttacagaaaaagaagaagcggaaacaacgttctcccgcaaaaatccttacaataaatgaggatggatcacttggtttgaaaacccctaaatctcacgtttgtgagcactgcaatgctgcctttagaacgaactatcacttacagagacatgtcttcattcatacaggtgaaaaaccatttcaatgtagtcaatgtgacatgcgtttcatacagaagtacctgcttcagagacatgagaagattcatactggtgaaaaaccatttcgctgtgatgaatgtggtatgagattcatacaaaaatatcatatggaaaggcataagagaactcatagtggagaaaaaccttaccagtgtgaatactgtttacagtatttttccagaacagatcgtgtattgaaacataaacgtatgtgccatgaaaatcatgacaaaaaactaaatagatgtgccatcaaaggtggccttctgacatctgaggaagattctggcttttctacatcaccaaaagacaactcactgccaaaaaagaaaaggcagaaaacggagaaaaaatcatctggaatggacaaagagagtgctttggacaaatctgacctgaaaaaagacaaaaatgattacttgcctctttattcttcaagtactaaagtaaaagatgagtatatggttgcagaatatgctgttgaaatgccacattcgtcagttgggggctcgcatttagaagatgcgtcaggagaaatacacccacctaagttagttctcaaaaaaattaatagtaagagaagtctgaaacagccactggagcaaaatcaaacaatttcacctttatccacatatgaagagagcaaagtttcaaagtatgcttttgaacttgtggataaacaggctttactggactcagaaggcaatgctgacattgatcaggttgataatttgcaggaggggcccagtaaacctgtgcatagtagtactaattatgatgatgccatgcagtttttgaagaagaagcggtatcttcaagcagcaagtaacaacagcagggaatatgcgctgaatgtgggtaccatagcttctcagccttctgtaacacaagcagctgtggcaagtgtcattgatgaaagtaccacggcatccatattagagtcacaggcactgaatgtggagattaagagtaatcatgacaaaaatgttattccagatgaggtactgcagactctgttggatcattattcccacaaagctaatggacagcatgagatatccttcagtgttgcagatactgaagtgacttctagcatatcaataaattcttcagaagtaccagaggtcaccccatcagagaatgttggatcaagctcccaagcatcctcatcagataaagccaacatgttgcaggaatactccaagtttctgcagcaggctttggacagaactagccaaaatgatgcctatttgaatagcccgagccttaactttgtgactgataaccagaccctcccaaatcagccagcattctcttccatagacaagcaggtctatgccaccatgcccatcaatagctttcgatcaggaatgaattctccactaagaacaactccagataagtcccactttggactaatagttggtgattcacagcactcatttcccttttcaggtgatgagacaaaccatgcttctgccacatcaacacaggactttctggatcaagtgacttctcagaagaaagctgaggcccagcctgtccaccaagcttaccaaatgagctcctttgaacagcccttccgtgctccctatcatggatcaagagctggaatagctactcaatttagcactgccaatggacaggtgaaccttcggggaccagggacaagtgctgaattttcagaatttcccttggtgaatgtaaatgataatagagctgggatgacatcttcacctgatgccacaactggccagacttttggctaaaaaaaaaaaaaagtgtaaataatactggcactttagaacagattaatcaagagtggggttactctgtgtaaatggagtgctgtacagatttaagagcaatgcgtaataacaagttaagctgatatgaatagcaagataatccaataactgcatttcgtttggttagtcagcattctttgaactgccttacatgttgtcacctttatagaagcaatgcattacttgttttagatcagaaacttgctattccacccacaccaagttaaaaaggaaaaaaaaaagactttcgcacaattgtttcctaactgataacattgtacattcttaggagattagtaattgtgtgaaatttactcatactgtttctaagtttttcagcatagtcattgcacttcagcagggaatctgagtatactttacagacagagtgaacttaaaagtttaatgtcaagagattatggcttaaataaattagtgtgtcctatagggggaaaaaaaccaagaaaccaccttttaaaaagaatgatatgccatatacccttgattttcattttgcattatattgacgtgtttttttgaaggaaaaaaagtaataaaaatctgatagtctaagactccactatttaaaagcctaattactttaaaaatatgcatactttcagaacttttaccaaaacacacaactgttgaagcagtcacttctctatggaagtatgcatattggtgtcagtttctttgtacagttgtacttagatattttttatgatttttcatgtgcaggtatcaaggttttgaagttttagtaaaagaaattctgtagattacattcccaagaacataatgcttacacaaaatgtatattccacgttttaaagcttaattgtattttactttacatatacacttcagttaacatagagcacttagaatctatttggtatttttgatttctcaaagtaaaaaaaaaattagatttttaggtttgatatggttgtgtcataatcatctcgtaattgacaattttaacttttggcaataaaaggaaattgggatatctttggaactgtaaaacctggtttaatctttttctttctagactcttgatagattggataattaaacagtatccagagaaactaaagaaatgggcattttaattgcatattttatcttgagttactttttaatgaacactgctcattacaactttacaaaccaaaagtgtttactaattccagtaactaccatttctttttcagctagatgagtgatcggaaaatttttgttgcatttcaaaatctaaataaactacagactttatccttata

SEQ ID NO: 75148 - DNA, 2105 bp, Homo sapiens
tactgctctgggaggaggaagagaaggaggaagaggaggaggaggaggagggggaggaagaggagaaaggcgcaggggtgggagctgttgccgaagctgccacagcaaaagttctcccccctccccccttcccctcctctcaaggcccctagaaaggttggagctgccgccgcctgcagtcggtgaccgcgcgacttcggccccgcccgcggatagagggaggaatcagcagcttggaaattcaagcacgtgatctggcgggatgggcgtttgcctaacgtatttaatggaggaatcggatggcataagtgattaaggtggtattgaggatttctgaagcctatgaaaggtgaaaaaccatttcaatgtagtcaatgtgacatgcgtttcatacagaagtacctgcttcagagacatgagaagattcatactggtgaaaaaccatttcgctgtgatgaatgtggtgatgagacaaaccatgcttctgccacatcaacacaggactttctggatcaagtgacttctcagaagaaagctgaggcccagcctgtccaccaagcttaccaaatgagctcctttgaacagcccttccgtgctccctatcatggatcaagagctggaatagctactcaatttagcactgccaatggacaggtgaaccttcggggaccagggacaagtgctgaattttcagaatttcccttggtgaatgtaaatgataatagagctgggatgacatcttcacctgatgccacaactggccagacttttggctaaaaaaaaaaaaaagtgtaaataatactggcactttagaacagattaatcaagagtggggttactctgtgtaaatggagtgctgtacagatttaagagcaatgcgtaataacaagttaagctgatatgaatagcaagataatccaataactgcatttcgtttggttagtcagcattctttgaactgccttacatgttgtcacctttatagaagcaatgcattacttgttttagatcagaaacttgctattccacccacaccaagttaaaaaggaaaaaaaaaagactttcgcacaattgtttcctaactgataacattgtacattcttaggagattagtaattgtgtgaaatttactcatactgtttctaagtttttcagcatagtcattgcacttcagcagggaatctgagtatactttacagacagagtgaacttaaaagtttaatgtcaagagattatggcttaaataaattagtgtgtcctatagggggaaaaaaaccaagaaaccaccttttaaaaagaatgatatgccatatacccttgattttcattttgcattatattgacgtgtttttttgaaggaaaaaaagtaataaaaatctgatagtctaagactccactatttaaaagcctaattactttaaaaatatgcatactttcagaacttttaccaaaacacacaactgttgaagcagtcacttctctatggaagtatgcatattggtgtcagtttctttgtacagttgtacttagatattttttatgatttttcatgtgcaggtatcaaggttttgaagttttagtaaaagaaattctgtagattacattcccaagaacataatgcttacacaaaatgtatattccacgttttaaagcttaattgtattttactttacatatacacttcagttaacatagagcacttagaatctatttggtatttttgatttctcaaagtaaaaaaaaaattagatttttaggtttgatatggttgtgtcataatcatctcgtaattgacaattttaacttttggcaataaaaggaaattgggatatctttggaactgtaaaacctggtttaatctttttctttctagactcttgatagattggataattaaacagtatccagagaaactaaagaaatgggcattttaattgcatattttatcttgagttactttttaatgaacactgctcattacaactttacaaaccaaaagtgtttactaattccagtaactaccatttctttttcagctagatgagtgatcggaaaatttttgttgcatttcaaaatctaaataaactacagactttatccttata

SEQ ID NO: 75149 - DNA, 290 bp, Homo sapiens
tcttgctgggggattccacacccatgagatgtgtgaatcttgagacttttttgctgacagattttatcgagtgctcaccttgcccatgctctgttagggtctcaacaggaagcagatgacataattccaaatagggtaatttgaggaaggttatttgcaatgagactatttacaacggtgttgggggtaggaaccacgagggaggatgcagtaacttgtgggtcagcagcagccgtgatgtcatcacttccagacctgaggcacaaagggaagggctactaccgcaaact

SEQ ID NO: 75150 - DNA, 342 bp, Homo sapiens
cacttcaacctccgcctcctgggttcaaggattctcttgcctcagcctcccgagtagctgggattacaggcacacaccaccaggcccagctcatttttttgtgtttttagtagaggcagggtttcgccatgttggccaggctggtctggaactcttgaccccaggtgatccgcctgcctcggttctctatatttaaataaacagacagcagctcagcaccgcgctgtacagagcatgggagcctgggtgtggaatgggctttccagtgtttgcacagtgacgacatcgcccagagagggatttctcagtgtatccctgtccttaatgatacttgagtgtatg

SEQ ID NO: 75151 - DNA, 508 bp, Homo sapiens
taagttttaaaaggtttgccataggcccaggatcatattctaagctaacctccaattgtggttggggtagaaaaactgccttgcatttagagtagtacatgtgtgtatgttcccaaaacattttaatagaaactctcattttattcccttagtgtctccggggtggggataagagacagttatctttttatagctgtagtgatctgaaaaatctgctgagtaatagagagttaagaggtggttgtacttgagaacagagaggttccgagaacatcagtggcctcttggctgaaaggagtctctgagaatcttcctgtgtggctttaactgaatcagcacaacagggcatgtaattcagaccatgcatatatatttcttcatcatctattctgctctcagccgtttctttcccatctgccttttcctgtctttcagaacatttctggggtgttgtttgggctcagcactgtgggaagtgaagcatttagcctagccagggactgggcat

SEQ ID NO: 75152 - DNA, 280 bp, Homo sapiens
aaataaattagaaatcttgaaaataaaaaatattgtcattgcgataaaaatcaaaaggatttccagactggaaagagctggatagaatcagtaatctgaaagatagtactgaggaattcacccagaatgcagcacctagaaataaaaagaaaaatatatgaaaacgcaagtaagagagatgaaagagagtttgaggctccaaaatacttcggataggagtttctgaagaagagaattaggtggaatggtggagaagcaatatatgtggagacactgattg

SEQ ID NO: 75153 - DNA, 774 bp, Homo sapiens
catacatatctataaaagcattcctatgatgttctcttctcttaaaaactcttccagagactcttctaaaggaatttaaaatacaagtttctgaacagatatagaataccattagttcactggccaagtaataatccacaggctggtatattttaaattcataacagtgtactctgtgcctactaaggtagagaggacacctcccggattcaaatgatcctcctgcctcagcctcctgagtacccgggattacaggcacatgtcattatgctggccaatttttgtatttttagtagagatggggtttcgccatgttggccaggctggtcccgaactcctggcctcaggtgatctgctcgtcttggcctcccaaagttctgggattacaagtgtgagccaccacacccggcctggagggattaaagtttttagtataaagaacactgtagtatggaaagaccctgtctcaaaaaaataaaataaaatccccaacttcaagcatcttctctgtttcacctctcaacatcccagggtggccctcagatctgccatagactcctaagtcctcatcacaccacatcaaaaccattccaacagccccaactggagctctctaaagtaccttatatccaaatgccaggctcatcttcaaacacttaaacacacaccgcctctcagaccagcctgttactataaacttctcagtctggcattcaagacatacatacgccaccaagccttttaatctttctccaaagactccaagaaaaaaaa

SEQ ID NO: 75154 - DNA, 870 bp, Homo sapiens
atcgcaatagagggcgactgtgcccctgaggagaaaatctgggaggagctgagtatgttggaggtgtttgaggggagggaggacagtgtcttcgcacatcccaggaagctgctcatgcaagatctggtgcaggaaaactacctggagtaccggcaggtgcccggcagtgatcctgcatgctacgagttcctgtggggtccaagggccctcattgaaaccagctatgtgaaagtcctgcaccatacactaaagatcggtggagaacctcacatttcctacccacccctgcatgaacgggctttgagagagggagaagagtgagtctcagcacatgttgcagccagggccagtgggagggggtctgggccagtgcaccttccagggccccatccattagcttccactgcctcgtgtgatatgaggcccattcctgcctctttgaagagagcagtcagcattcttagcagtgagtttctgttctgttggatgactttgagatttatctttgtttcctgttggaattgttcaaatgttccttttaacaaatggttggatgaacttcagcatccaagtttatgaatgacagtagtcacacatagtgctgtttatatagtttaggggtaagagtcctgttttttattcagattgggaaatccattccattttgtgagttgtcacataataacagcagtggaatatgtatttgcctatattgtgaacgaattagcagtaaaatacatgatacaaggaactcaaaagatagttaattcttgccttatacctcagtctattatgtaaaattaaaaatatgtgtatgtttttgcttctttgagaatgcaaaagaaattaaatctgaataaataattcttc

SEQ ID NO: 75155 - DNA, 429 bp, Homo sapiens
gcttgttgtggtcctcagtcacctggacttctgccctatgtctgatggcttctatttataaacctaaccctgtaaccaaggcagttagtctctcttccacatcccctgtgacattttcattttggcatctgcctttggctaatgctgactcctttactcattcttcttcctgtaaggtgcttgtttgccagtgcttgttcattaagtctccactatttttagtaagcttccaagctcactatgtctgttccctccaaaccactaccgtgcttattagattccatccatccattcatttgtatgtttattcttcaagaatattttcagtgttttccaataatatgcttggctctgggtttgcagacatgaatcaattcaatccctgttctagtggaaaaataaaacaagcagagagataaagaacagtga

SEQ ID NO: 75156 - DNA, 361 bp, Homo sapiens
  misc_feature (289)..(289): n is a, c, g, or t
  misc_feature (314)..(314): n is a, c, g, or t
ggctgttatggttccaaggactggatcgaaccagctcacctgctccacgttgctcatttctctcagcaaatccaaggactcagaaggaacccttcaccaactgcccattcccgcatgccgacctgcagagctaactccaagcttgctccacccaccttctgtcaccaccgtcccttttcttgtctcaaaagtcatcatgaaaatgcaaatgttgccacaatttgttgaaaaaataacaaaattatagtatgtgaaagagtaaaaaaaaaaaaaaaaaaaaaaaactcgngggggggggcccgggtacccatttnggccctttaggtgagtcgttttttacatttaattgggccgtcgtttt

SEQ ID NO: 75157 - DNA, 1037 bp, Homo sapiens
ggaagtccgaaatcaaggtaccagcaggatttttatgaacttgtgaggaatgctctacttccaagatgtgtggaatggtggaagacaaacattcaggatcttggctagagaaaacctgtgggaggaagatatttcagctaagacataaaaggtgtgaaagcactagccaagaggaaacatgtggaggaagggaatggttagagaaaaagacattcggatcaatggcagcatgtatgaaggtcctgagtggtcctagttcacctcctcagctgtgctgatgtcatgaaaaccagccttgacctcacaaactaccccttgatgatgctgaccgctggactactaatatccaactgcctgtgtcatttcttcatctttccttggtgccaaccatgcctgcatatcagggcagcattctatgatcccatggctctcacatcgacagaccacaacactaaggttaaaaggaacaaaagaaaactccaaatcacaagtaacagactcttttatggttggccaatagacagaccggattgggaaattcttttacacggcatccagtgatttccaaaaacaatttaatttcaaacaacgatccttccagatatgacatttgggaagaattgtttaaaaacaccagaagtaaatgtgaaataccagtggtttctagacaatcaaactctgcaattgttaagaagcaactggaatcagacagacctggattcagatcatagatgcacagttaaatcaaatacctttgaacaagttacttaacctccccaagcctcagtttctaccataagaggttggaatgagaggatgactgcaaaggacctgggatggtgcctaacaaaactttatctgtcagcttctccctgccacttcacaggagacccaactctctgcaacagaaaccagcttttccacttagtaatcactgtgtgctttagtttcctggtttataaaataggggcattgagctctgcccagagggttattatgagaacaaatgaaataaagcatgtaaagtgtttagtaca

SEQ ID NO: 75158 - DNA, 351 bp, Homo sapiens
acaaacttttcaccattctaaagaacccactttccttatcaaccaagctgggcttctctctagtgactcctattctagcctttccccagaaacagagagtgttaatcctggtgaaaatataaagacagacactcagaaaaagagacctgggactgtgatactatcaaagcttcttatgtctcccacccgcctccacagatcttggagacatctcagcgttaatgaggactttgccaacattccagactgccgtcctgcaatgaagctctgagtcacggtctgtgaggctaagtactggcaacggttgaatccccaggacaactacctcactaaccttcactctaacaagag

SEQ ID NO: 75159 - DNA, 807 bp, Homo sapiens
ggaagtccgaaatcaaggtaccagcaggatttttatgaacttgtgaggaatgctctacttccaagatgtgtggaatggtggaagacaaacattcaggatcttggctagagaaaacctgtgggaggaagatatttcagctaagacataaaaggtgtgaaagcactagccaagaggaaacatgtggaggaagggaatggttagagaaaaagacattcggatcaatggcagcatgtatgaaggtcctgagtggtcctagttcacctcctcagctgtgctgatgtcatgaaaaccagccttgacctcacaaactaccccttgatgatgctgaccgctggactactaatatccaactgcctgtgtcatttcttcatctttccttggtgccaaccatgcctgcatatcagggcagcattctatgatcccatggctctcacatcgacagaccacaacactaagccaacaatgatacggcgtccaccagcagttgtttgctacatttgtggtcgtgaatatggaacaaaatctattagcattcatgagccacaatgtctgaaaaaatggcataatgaaaacaacttgttgcctaaagagttaaggagaccagtacctaaaaaaccagaagtcaggaccattactgccaaaggcttctatgatcttgatgctttaaatgaagctgcttggacaagtgcccacagccagttggttccctgtaatgtttgtgggcgtaccttcctgccagacagactgattgttcaccaacgatcttgtaaacccaaagccgccaagtaaagcccttttctctctact

SEQ ID NO: 75160 - DNA, 743 bp, Homo sapiens
cagctccttccctgaaaactcagaggtgctcagcatgccatgctaaaaggcaaaataaaaagatcttggagacatctcagctttaatgaggactttccaacattccagactgccgtcctgcaatgaagctctgagtcacggtctgtgaggctaagctttaggccctttcaagctaattggaacagaagagagctaattaactataaaccagaatgaagcttttgtctaataagtttttattaggcaaaactcacagtgggaagagcataatcagaaaaacacatgagggcaggatattctcatcttttcaaattctgcatgtgtatctattagccaacaatgatacggcgtccaccagcagttgtttgctacatttgtggtcgtgaatatggaacaaaatctattagcattcatgagccacaatgtctgaaaaaatggcataatgaaaacaacttgttgcctaaagagttaaggagaccagtacctaaaaaaccagaagtcaggaccattactgacaaataagaaaaacagttctgaaatgcctgtccaaagaattatcttctgatgctgagacataaagacactatgtcctggcaacactgtgcatgagagggacctatgggaatttgctgtattctccaaaagtttctttcatacatcatcaaaccctttgaatgtaaaataaataataaaatacttaaaaaataaaaatgaataaaacttaaaaaaatatgaaacttaaa

SEQ ID NO: 75161 - DNA, 866 bp, Homo sapiens
ggaagtccgaaatcaaggtaccagcaggatttttatgaacttgtgaggaatgctctacttccaagatgtgtggaatggtggaagacaaacattcaggatcttggctagagaaaacctgtgggaggaagatatttcagctaagacataaaaggtgtgaaagcactagccaagaggaaacatgtggaggaagggaatggttagagaaaaagacattcggatcaatggcagcatgtatgaaggtcctgagtggtcctagttcacctcctcagctgtgctgatgtcatgaaaaccagccttgacctcacaaactaccccttgatgatgctgaccgctggactactaatatccaactgcctgtgtcatttcttcatctttccttggtgccaaccatgcctgcatatcagggcagcattctatgatcccatggctctcacatcgacagaccacaacactaagccaacaatgatacggcgtccaccagcagttgtttgctacatttgtggtcgtgaatatggaacaaaatctattagcattcatgagccacaatgtctgaaaaaatggcataatgaaaacaacttgttgcctaaagagttaaggagaccagtacctaaaaaaccagaagtcaggaccattactgacaaataagaaaaacagttctgaaatgcctgtccaaagaattatcttctgatgctgagacataaagacactatgtcctggcaacactgtgcatgagagggacctatgggaatttgctgtattctccaaaagtttctttcatacatcatcaaaccctttgaatgtaaaataaataataaaatacttaaaaaataaaaatgaataaaacttaaaaaaatatgaaacttaaa

SEQ ID NO: 75162 - DNA, 796 bp, Homo sapiens
atcttggagacatctcagctttaatgaggactttccaacattccagactgccgtcctgcaatgaagctctgagtcacggtctgtgaggctaaggtactggcaacggtgtgaaccccaggacaactaacctcactaaccttcactctaagcagaagcccaaagtgagtctggcctgaaatcagagcaagcactacagaaagacatctttgttaatggaaagaggaaagaagaaaagaatttccaataagttacaacaaacttttcaccattctaaagaacccactttccttatcaaccaagctgggcttctctctagtgactcctattctagcctttccccagaaacagagagtgttaatcctggtgaaaatataaagacagacactcagaaaaagagacctgggactgtgatactatcaaaactgtcaagtagaagaattatatcggaaagccagcttagcccccctgtgatcccggcccgcaggcctggattccgggtatgctatatctgtggccgagaatttgggtcccagtcaattgccattcatgaaccccagtgcttgcagaagtggcatattgaaaacagcaagttgcccaagcatttgaggaggccagaaccctccaaaccacagtctctcagcagcagtgggtcctacagtcttcaggcaactaacgaggctgcatttcagagtgcccaggctcagctgctgccctgtgaatcctgtggccgcacattcttgccagatcatcttcttgttcatcacagaagctgcaagccaaagggtgagggtcccag

SEQ ID NO: 75163 - DNA, 1044 bp, Homo sapiens
gatcaaacccatcttcgaaacaccactccaccatgctggatatttttccatcaaaatttcaaaaaaaacataacgttgggggaaagagggaatgccttaggctttagtgtactggtcctgtctttatcttagttcattccatttttctcccaacaaacaacactcaattggagtttctttactcttatgtgttaggctgagttcagtagagactggaacggtcaaggcttcagactgcaatgaacatccagctgtgttcatgtgacccttagctcaatgtcaccagttaacggcattgtgaatactgtgaagtcttcggggctgttgcagtgcaacactattaacctttacgctggttaaagagccaggttgccaggcaaaacctggacctccaattaagtatagtatttctctgaatcttaggatctttaataaatttatatttggtttacctagaaaatatatttgtctgtgtgtgtgtatatatatacatatgtgtatatatatatattttttgagacagggtctcgctttgccacccaggctggaatgcagtgcagtgacatgctcatggctcactgcagctttgaccttctgggttcaaacaatcctgacacctcagccaccctagtagctgtgactacagaaaaatattttttaaatgaaatgaagtcccaaaaaagtcacaattcaatagtcactaagtatttaacaactaccattttcaaaattgagtgccatctcagtgaccagctatgggacacatgctcactgaaccccagaggcacaggtgaggcttgccaggcagatgactcgacatttagaagtgtctgatttgttttataagaactctatgggaaattaagcaacaggaaaaaaaaaggaggaagaataattgaaactaaaagcccaaggcgaggttacgtcagtcttcagtttaaaataccttgttgctagaatatactgattatgaagcttgtggtgtctcgactagttaagactgaacttgattaaaacttttctctggacacacaaacagaaagg

SEQ ID NO: 75164 - DNA, 489 bp, Homo sapiens
ggaggaacagaaaggacatttagtcagaactaaggggctagataaactgtattgcatggggtagtctcaaataacaaaaaatttctttgagttctaggtcactctgagcattcccaagaaatccacagaagtacaagttcagtttataattatgagaacacagaatttaacttgtacaaaaagatgtagtttttacaatgttttaatttgtactaaatgtttgagggatgcaactatgatgtaaattgaggaaagattatactttatttggtttataaacttaccaaaatttattcccaattttggaatattatacccacccaaggcaacaacattttgtgatatttgagtcaccaagacaacacctctgtattgatttgcaactgtaattgtcacatgaagatatatcatttttattaacatagtgtattattaatgattaaatggtaagtggtgtagcattttaaaatattttgaatttgctaccct

SEQ ID NO: 75165 - DNA, 718 bp, Homo sapiens
gcggccgctgggccccttggtgctggcgctgggcggcgccgcggcggtgctgggctcggtgctcttcatcctctggaagacctacttcggccgcggccgagagcggcgctgggaccggggagaggcctggtggggcgcggaggctgcccgcctccccgagtgggacgagtgggaccccgaggacgaggaggacgaggagccggcgctggaggagctggaacagcgcgaggtgctggtgctggggctggatggcgcaggcaagagcacgttcctgcgcgtgttgtcggggaagccaccgctggaaggccacatccccacctggggcttcaactccgtgcgtctgcccaccaaggactttgaggtggacctgctagaaattgggggcagccagaacctgcgcttctactggaaggagtttgtgagcgaggtggatgtgctggtgtttgtggtggactcggctgaccgactgcggctgccctgggcccgacaggagctgcacaagctgctggacaaggaccctgacctgcctgtcgtcgtggtggccaacaagcagatgttaaaatgaaaacagcgacactgaacaatttcccgagggtgctgaggccccagcctcctgttcgtccttgatttctccttccttcccatcccccgtgcaagtcatcagcagggcctgtcatctcgtctgttctctttacatctcgtctctttaatgtaggtc

SEQ ID NO: 75166 - DNA, 448 bp, Homo sapiens
acaattggatagaaacatgcatgaaattgagataaaacatttcaacagactggacagactctgaacactgttgaagagaacattgataaattggaacctggtgctgaggcattttcccagaatgcaatgtacagagacaaagataaaacagggagaacatggaagacaccttgagatgctccaacaatcatccaattggagttgcagaagaaacagaaaaaatggtgaagaagttggatttgttgagagtttgcagacctggagagaaatgtgaggtctcagatctggagtgcattctggaatagcaagcaagataaatataaataaatgaacccgtagacacgttagaacctctaggtactttagacctagtacctacaaaataagggcagccagatcgttctcagacttcttaacaacaacaggtggcagagaccatggcaaaatc

SEQ ID NO: 75167 - DNA, 365 bp, Homo sapiens
tgtcataggctgacctgttctgaactggtaacattcccagagtttacttatctccagaagtacacaatgatttaaaaagatgttttaggccaggcacggtggctcacacctgtaatctcagcagtttgggaggccaaggtgggtggatcacgagttcaggagatcgagaccatcttggctaacacggtgaaaccccatctctactaaaaatacaaaaaattagccaggtgtggtggcgggcgcctgtagtcccagctactcaggaggctgacgcaggagaatggcgtgaacccgggaggcagagcttgcagtgagctgagatcgcactactgcagtccggcctgggcgacagagcgagattccgt

SEQ ID NO: 75168 - DNA, 795 bp, Homo sapiens
ggaaaaggaatattcactgggatcaggtgatacactggggatcgagaacaaccggggaaccgtaatgagaggggtatctcgtaatacaacagtggaaaaagtaaaatctactgagcgatggatgtgcacagaccatctgctcccatctactaagcagagtgaggcaggaggaatgaggcccgaaatacagggccagtcggggaaacagtaggtgaggcccatgtctataaatattcagaattttttaattaaggtagttcttcgcaaaccatatgtttagtgagatgcaaatcaatttaaaataactttgaatatatcagatatttgacatgatacgtaattcaagaagtctgaaatatattctaaagctagtcttgactatcagcttgttcctgttggaaaaaagaacgaggaagaaaggtgccagacaatgacagagaactaaaagaaatttattggatcaggaaagcaaaactattaaaaagctttatccaaaatgtatccctctggggccaggcatcatggctgaggcccgtaatcccaacactttgggaagctgaggtgttaggattgcttgagcccaggagttcaagaccagcctaggcaacatagcaaggcctggtctctactaaaaatttaaaattagccaggagcaatggcatgcatctatagtcccagctactcaggaggctgaagtgggaaaattgcttgagtacaagaggtcaaggctacagcgagctatgatctcaccactgcactccagcctgagtaacagagcaaaatcctgtctcttta

SEQ ID NO: 75169 - DNA, 375 bp, Homo sapiens
ctcctccacctacctcccactaggcagctctaaattgttaaccactgttagcctaaccattgctaatattaagtcacattaaaataaatgaaacaaccattgcatgcacagcccagagcccggcatgtagctggctctaccacatctaaatccaatcattcattcctatgacagcaaatcccagacactgcagacgtccactaacagcaccctactgtacttcgattcccaaagcaacaaaggctgtcaatgttcttcgagttggggtataaatagggtgagacaattttcagtgctatgtgggaagaagcaacacaatattctcagcctaaaaatagttggatttgtcacagcagtgttgttttgttttattgt

SEQ ID NO: 75170 - DNA, 303 bp, Homo sapiens
agtaagacacagggggcatttttatttattaagataggggaattctgaagttgtttatagggcaacggatatcgcagagagaagacagaatgtggatatcaaaagaagcaagccgggctgggcatggtggctcatgcctgtaatcccagcactttgggaggccgaggcgggtggatcacctgaggtcaagagttcaagaccagcctggccaaaatggcgaaacaccgtctctactaaaaatacaaaaattagctgggcatgttggcgggtgcgtgtaatcccagctgctcgggagtctgaggc

SEQ ID NO: 75171 - DNA, 1430 bp, Homo sapiens
aggtgtcagaaaattaacataagatgaaaaatgattgttaactacctgtttgaaattagtgtatatattttagtgggcctggtcttcatggttttgtaattttttcaaaaaatgatcatggcatgaacaaggctattaatctgaactaatgaattaggagtctacttgccacctgtaaatactgtggaagttttatttattcatttaacattcagggattccacatgaccacctgcaaataatgagaataaagatatgaacaaaatagatgtggttcccgcccttctgaaggttaacacctatctagttagggagacagacattaacaatcacacatatattattaaaactgagataagtgctatgatgaaaaaggcgcgggcagaagagcacagtggtggaaaatgccagtaaggagagtcaagctttatacttgggaacaaaacacaaattttccattttggaaaaaaagcctgagtcgaagtgtgctgactgggtaaattaaggagaggaactctggaacctgggtgcctcagggaaatgtggtggggaccgggcatgagagctggcccgtgaggctgggccaggaaaagaagctggtgctcaggtaccctgagccagggttgcccaaaacaaccaagattctacaactgagtgtggcccaaaaaatcagcaaaataggtctgagatttagaaacagtgagttcaatcccttaacagagagagactgcatctgttgaaatgatatttgattgtgaataacaaaaacgttgccatatagtgggtgaagcaagaagtgggttttttttttttactgacaccacagctctacagtgatgttttatttaaacttatgctccttctgtttctccatgcttcatgggtgactttgttccttttgcctgtcgtctcactgttttgggatggcaactccagtatcatttctttattataggtaggacaaagaggaatgacaaaaggcatgtaaccacctgaatttgcccctatcaaagagctctccaggaagcaccaccaaggaattttcactgacatttcccaggccagaccatgctgctgctaagcaaaatgaggattctgctagtgaggatgaaaggaagaatgtgtaatcagttttcttgaagtataatacatgtacaataaactgaacctattggaaatatacatttggatgagttttgacagatgtatataccacagtcaagatacagaacattcccatcactccaagagattctttgtgtccctttgtggtcaatccctcctacacgaggcccctaggtaaccgctgatctgttttccatcacaatagattagtctgcatattctagcatctttaataaatgcagtcatacagtatgtatggagcatgggggtaggcctaggtcacaagactgaaagacacgacttag

SEQ ID NO: 75172 - DNA, 1484 bp, Homo sapiens
aggtgtcagaaaattaacataagatgaaaaatgattgttaactacctgtttgaaattagtgtatatattttagtgggcctggtcttcatggttttgtaattttttcaaaaaatgatcatggcatgaacaaggctattaatctgaactaatgaattaggagtctacttgccacctgtaaatactgtggaagttttatttattcatttaacattcagggattccacatgaccacctgcaaataatgagaataaagatatgaacaaaatagatgtggttcccgcccttctgaaggttaacacctatctagttagggagacagacattaacaatcacacatatattattaaaactgagataagtgctatgatgaaaaaggcgcgggcagaagagcacagtggtggaaaatgccagtaaggagagtcaagctttatacttgggaacaaaacacaaattttccattttggaaaaaaagcctgagtcgaagtgtgctgactgggtaaattaaggagagaaaagagagtctacctgctttaggacagcatggagcttcacagtgactttgtgggaactctggaacctgggtgcctcagggaaatgtggtggggaccgggcatgagagctggcccgtgaggctgggccaggaaaagaagctggtgctcaggtaccctgagccagggttgcccaaaacaaccaagattctacaactgagtgtggcccaaaaaatcagcaaaataggtctgagatttagaaacagtgagttcaatcccttaacagagagagactgcatctgttgaaatgatatttgattgtgaataacaaaaacgttgccatatagtgggtgaagcaagaagtgggttttttttttttactgacaccacagctctacagtgatgttttatttaaacttatgctccttctgtttctccatgcttcatgggtgactttgttccttttgcctgtcgtctcactgttttgggatggcaactccagtatcatttctttattataggtaggacaaagaggaatgacaaaaggcatgtaaccacctgaatttgcccctatcaaagagctctccaggaagcaccaccaaggaattttcactgacatttcccaggccagaccatgctgctgctaagcaaaatgaggattctgctagtgaggatgaaaggaagaatgtgtaatcagttttcttgaagtataatacatgtacaataaactgaacctattggaaatatacatttggatgagttttgacagatgtatataccacagtcaagatacagaacattcccatcactccaagagattctttgtgtccctttgtggtcaatccctcctacacgaggcccctaggtaaccgctgatctgttttccatcacaatagattagtctgcatattctagcatctttaataaatgcagtcatacagtatgtatggagcatgggggtaggcctaggtcacaagactgaaagacacgacttag

SEQ ID NO: 75173 - DNA, 888 bp, Homo sapiens
tgaagtcagttcgagaccagcttggccaacatagtgaaaccccgtctctcctaaaaatactgtagtcccagctacgggaagctgaggcaggagaattgcttaagcccaggaggtggaggttgcaaggagccgagattgcgccactgcacaccagcctggctgacagagattccacctcaacaacaacaacgacaacaaaaagcagcggggaaaataatacaacacaaagctgctgtggtctgaagggcttaaaacagtacctggtgcatagttagtgcaagcttactgagtgttgagtgttattactgtcaatgataataatagaatgcctttgaacccttctcaggagaagcagcctttttatttcctcatgttggcccctgcatctttgctagagtgatcaattagacacatatactttctgaaattctgagggcacccagtgggatgatctttaaggtatacttccagccagaatgttgggggcggtgtgtgtgtgtgtgtgtgtgtgtgtgtgtgtttctggctaatagtatacactggttaactgagaatagcccattccttttagtttcgttctcctacagttgaacattgattagaaatgcacaaatcctgtcccttgccttagcggagttattagtattcctttctgaggaggccataaggtattatcggcaggcaccataggtaggctgtgagaagggcgagtcagttctgcctcttcccctggcttccacatctgtaaaatgggggcaataacacttagagggcgtgggggctttccatcctcacaaggagatctcaggtgagatgatggctccaagataactttttaaactgtaacatgccggtcacccaaaatggcatatcctccttaccacagag

SEQ ID NO: 75174 - DNA, 313 bp, Homo sapiens
atctaatacaaagctatactacccacacttgtgtctaccctttcatttaaaacacaattaactggccaggcatggtagctcatgcctgtaattccagtacttggggaggctgaggcaggagaatggcttcagaccaggagtttgagaccagcctgggcaacaatgcaaggccctgtctctattaataaacaaaaacacggctaggcacggtggctcacgcctgtaatgccagcactttgggaggccgaggcaggtggatcacgaggtcaagagatcgagaccatcctggccaacatggtgaaaccccatctct

SEQ ID NO: 75175 - DNA, 405 bp, Homo sapiens
aggtagctggaagtgccaaggagttagcacctgggagcagcctttaaacaatactgtgggatttggtggacaaataccccagcgtccttgcccatcagcaggaaaactccaaggcgcatgttctatgctggcttttgagtcccccagtggaattcagctccagttgcccacagtagtgggcaactgcttgatacccaccttttgtttgttgctttcccttcccaaatttacttccccactctcctgctggtcctttcttggattacctcccaagtcgatgccttgcacttgcatccttgtctcagggtttgcttctgggaaaacccaactatgatactgagtaccccacagcaggcagcgctaagacctgtgctgccaccctagaattcagagtcttcagtccca

SEQ ID NO: 75176 - DNA, 511 bp, Homo sapiens
acggcccgggcgcggtacccatgcggccagtaggtgtcgctgttcccctgccggcgggagccaggagccccgcgcgggcccccagcgccactcagccttccgctcccggcaggttcgcagacccaccggagctcccgagagagggccgctctacccgcccccgccccgggactgtgcccgtgctcacctggctaccaccgtagcgacactgccggcctaaggaagtaccttcggggagagaaaggagagacgggtctgttggggcgaaacatgggccccgacggaagcggctccgagccggcttctctcgtggctcccaactctccctcctttctcttcacgtgccatgggcggcggtggggcactgagggcctcctggtaaaatccgaagaggggagattcaaccggggttccatatgggctttacgaataaacaagaggttgaaaatcccagcttcgtgggagctagctacagaaagagtggattggtttcaatattcttgcctcaaaa

SEQ ID NO: 75177 - DNA, 395 bp, Homo sapiens
aaacatttaggttttccttctttgggtcttcattgctttatgagggctcctgtgtcacataaaatttatattaagtaaatctgtatgcttttctcttgttaatctgttttatgtcaatttaattctctgtcccagctagagaccctaagagagtggaggtaaagttttgccttccctactttctcttatctgacatgatcaggagtggattattttatttcaactttaaaaaatacattaattttccatctgtcaaagtgtggccagggtcttttctttgaggatggagcctgtgattagattcctcatcttctttcttacataaacctcaccagttatgtatcacccgcaatttccagtttgcttccttaaagtgaaacagttaatggcatgtt

SEQ ID NO: 75178 - DNA, 522 bp, Homo sapiens
caggagactgagtggttggagccgtccgggagcacagaggttgggagtctattgtcatagcagtcaaagccgggagtcccctgacatatgaggtccccaaggtgtctgctcaagcacccagtgggcagggccctcgtgtgactctgcaggtccatgagtggggctctgcttagcctagacccccaggtctcagttggcttgggacttcttgagagatacatccctacacctctgggaaaaatcaaaattagcttggcacggtggctcacacctagaatcccagcactttgggaggctgaggtgggcagatcgcctgaggagctcaggagtttgagaccagcctgggcaacatggcaaaaccctgtctctacaaaaaatacaaaaattagccaggagtggtggtgtgtgcctgtggtcccagctactagggaggctgaggtgggaggatggcttgagcctgggaggttgaagctgcagtgagccatgactactctgttcactgcacttcagcctgggtaacag

SEQ ID NO: 75179 - DNA, 531 bp, Homo sapiens
ctgtaaattggtgcaagctcatgctaagggaagggacaaaatttgcacttaataagagattgaagtttatatttggtctggacttttaataagtaaaagtgaccagaaatcagtgaaatcatcccaagatttactgtgggatatgtcaaggaaatttgactttgcatagccgaaagagtgtaattggagaaaaattaaattactttaagtttatattattgctccacagaggtttgactacccagtaagctagttacagatatactttaaccactgttgtttttgtaatgtttgtgatcttccataacaaatatttctcatataatgtttttcttaaattgaagtataaaaagaaaattaatcacttaatttgttaacctcttatttacggcttcattggtgttttaaactattcaaagtgctaatcagaatcgctgagataagaaatcaaaggtaatacaatttttcatctgcccttaatagatccagaaagatttaattactggttgcttttgagttacttaaattttg

SEQ ID NO: 75180 - DNA, 3112 bp, Homo sapiens
cacagatctgcaagtgatatttggactgcttacagccttcgctggatcaggaatatcttcacgtaatcactagacagaagctttctcagaacttctttgtgctgtgtgcattcaactcacagatttgaagctttctttagatagagcaggtttgaaacactctttttgtataatctgcaagtggacatttggagggctttaagccctacggtggaaaaggaaatatcttccaataaaaactagacagaagcattctcacaaacatctttgtgatgtttgccttcaactcacagagttgaacataccttatgatagagagttttggaattcccggagcgattgcatgcaggggccgcgtaccgcgaagtgcagaagctgatgcaccacgagtggctgggcgcgggcgcgggccaccccgtgggcctagcgcacccccagtggctacccacgggaggaggcggcggcggcgattgggccggcgcgcacctagaacacggcaaggcaggaggcggcggcaccggccgagccgacgacggcggcggcggcggaggtttccacgcgcgcctggtgcaccagggggcggcccacgcgggcgcggcatgggcgcagggcagcacagcgcaccacttgggcccggccatgtcgccctcgcccggggccagcgggggccaccagccccagccgctcgggctgtacgcgcaggcggcctacccggggggcggcggcggcggcctggccgggatgctggcggcgggcggtggcggcgcggggccgggcctgcaccacgcgctgcacgaggatggccacgaggcgcagctggagccgtcgccgccgccgcatctgggcgcccacggacacgcacacggacatgcacacgcgggcggcctgcacgcggcggcggcgcacctgcacccgggcgcgggcggcggcggctcatcggtgggcgagcactcggacgaggatgcgcccagctcggacgacctggagcagttcgccaagcagttcaagcagcggcgcatcaagctgggctttacgcaggccgacgtggggctggcgctgggcacgctctacggtaacgtgttctcgcagaccaccatctgccgcttcgaggccctgcagctgagcttcaagaacatgtgcaagctcaagccgctgctcaacaagtggctggaggagaccgactcgtccagcggcagccccaccaacctggacaagatcgcggcgcagggccgcaagcgcaagaagcgcacgtccatcgaggtgggggtcaaaggcgcgctcgagagccactttctcaagtgccccaagccctcggcgcacgagatcaccggcttggcagacagcctgcagctggagaaggaggtggtgcgcgtctggttctgcaaccggcggcagaaggagaagcgcatgacccctgcggccggcgcgggccacccgcccatggacgatgtatacgcgcctggggagctagggcctggcgggggcggcgcatcgccaccctccgcgcccccaccgcccccgccggcggcgctgcaccaccaccaccaccacacactgcccggctcagtgcagtgaccccgcgggccgggcccccgccggcgcgctgcagggcgggcgcgcagcccgccgcgcggcctggactctttttgttcggttgctttggattttacaaaaaaaaaaaaaaagcccagaaactttcgaacaaaaccaaacacccggacgaccctctccggtgagcggcgaagacagcccggtaggctgcgtcgcccgagccccgggagagaggagcgaagatccggaactcgccaactcaccccgggcatcctgcccgccgcctgctctctgcccccatcccctcgacgacccccgcccctgcccccccgggctgttcggggccggatcccggcagcggcctccccaaagcgacaggtaacgcagtgcggggttagggattccccgggagagaggacgaagcgaggagagttctccatcccctctccccgcgtggactcctgagcctgcgggtccagggtggggggctgtcactttattcgctacacgcctcttctctcctataaggatgcgccccaccccgctttcccctttctccgggcttggttttttacggtttttatttattcgtggagcctctcggctcctggggtccttctaactccgcccgcgcccttaatttaaatcgcagtatactgtatttatcggggccccggaggggaggtcgcgagagccgcgtctgtgtataaaagcaggaaatagccaaagctttaatctagcctaatttatttttccccttatatttccctaccctaccctccccccaaaaaaaagcaaaaaaaaaaaaaaaaactaacaaaaaaaattcgagtgttcatttttcgtttcgtttcatccgagccccggcttggttcccggccacgcggaggggtctgcgctcccacacacccagacgggaaggggcttctgccctgctgcagaccgaccgccgcatagcgcggcccctgctccccgcggggccctgccctcctggccacaccaaacgaaacttggaaaagttagagagattgttttttaaccagctgtagaaataagccgttccctgagaaccctccgcctgattccctgcagcttccctctgctccctttccagcccgccgggatgcgggatgccaggggaggccgggagagaaattccccaagtttggggtgaggtgggaaccatgtaaatatgtgagatatgtacacactggcggggagaagaaacattttgtgcttggtttttatttttggttttccgggttacccttccttcctaccctaaaggattttgtacactgactaatccgaaaaagatattttaatatgatttccgaatttctgacccatctctatttattttctggatgtgtttggagcttcccccttctccgtttcttcttctgtttgttaaggtttgaatttaaattttgttattttatttttattattttttgaaacaatgtttcggtgcattctctttgtatctttattgaaaaaaaaataatgtagactgggaagttccctttatatttatgttatagtaaatattttattactc

SEQ ID NO: 75181 - DNA, 2923 bp, Homo sapiens
  misc_feature (2)..(2): n is a, c, g, or t
  misc_feature (4)..(4): n is a, c, g, or t
  misc_feature (24)..(24): n is a, c, g, or t
  misc_feature (26)..(26): n is a, c, g, or t
  misc_feature (28)..(28): n is a, c, g, or t
gnancggcggcggcggcgcgggcngngngcggggcggcatggccaccaccgcgcagtacctgccgcggggccccggtggcggagccgggggcaccgggccgcttatgcacccggacgccgcggcggcggcggcggcggcggccggagcgattgcatgcaggggccgcgtaccgcgaagtgcagaagctgatgcaccacgagtggctgggcgcgggcgcgggccaccccgtgggcctagcgcacccccagtggctacccacgggaggaggcggcggcggcgattgggccggcgcgcacctagaacacggcaaggcaggaggcggcggcaccggccgagccgacgacggcggcggcggcggaggtttccacgcgcgcctggtgcaccagggggcggcccacgcgggcgcggcatgggcgcagggcagcacagcgcaccacttgggcccggccatgtcgccctcgcccggggccagcgggggccaccagccccagccgctcgggctgtacgcgcaggcggcctacccggggggcggcggcggcggcctggccgggatgctggcggcgggcggtggcggcgcggggccgggcctgcaccacgcgctgcacgaggatggccacgaggcgcagctggagccgtcgccgccgccgcatctgggcgcccacggacacgcacacggacatgcacacgcgggcggcctgcacgcggcggcggcgcacctgcacccgggcgcgggcggcggcggctcatcggtgggcgagcactcggacgaggatgcgcccagctcggacgacctggagcagttcgccaagcagttcaagcagcggcgcatcaagctgggctttacgcaggccgacgtggggctggcgctgggcacgctctacggtaacgtgttctcgcagaccaccatctgccgcttcgaggccctgcagctgagcttcaagaacatgtgcaagctcaagccgctgctcaacaagtggctggaggagaccgactcgtccagcggcagccccaccaacctggacaagatcgcggcgcagggccgcaagcgcaagaagcgcacgtccatcgaggtgggggtcaaaggcgcgctcgagagccactttctcaagtgccccaagccctcggcgcacgagatcaccggcttggcagacagcctgcagctggagaaggaggtggtgcgcgtctggttctgcaaccggcggcagaaggagaagcgcatgacccctgcggccggcgcgggccacccgcccatggacgatgtatacgcgcctggggagctagggcctggcgggggcggcgcatcgccaccctccgcgcccccaccgcccccgccggcggcgctgcaccaccaccaccaccacacactgcccggctcagtgcagtgaccccgcgggccgggcccccgccggcgcgctgcagggcgggcgcgcagcccgccgcgcggcctggactctttttgttcggttgctttggattttacaaaaaaaaaaaaaaagcccagaaactttcgaacaaaaccaaacacccggacgaccctctccggtgagcggcgaagacagcccggtaggctgcgtcgcccgagccccgggagagaggagcgaagatccggaactcgccaactcaccccgggcatcctgcccgccgcctgctctctgcccccatcccctcgacgacccccgcccctgcccccccgggctgttcggggccggatcccggcagcggcctccccaaagcgacaggtaacgcagtgcggggttagggattccccgggagagaggacgaagcgaggagagttctccatcccctctccccgcgtggactcctgagcctgcgggtccagggtggggggctgtcactttattcgctacacgcctcttctctcctataaggatgcgccccaccccgctttcccctttctccgggcttggttttttacggtttttatttattcgtggagcctctcggctcctggggtccttctaactccgcccgcgcccttaatttaaatcgcagtatactgtatttatcggggccccggaggggaggtcgcgagagccgcgtctgtgtataaaagcaggaaatagccaaagctttaatctagcctaatttatttttccccttatatttccctaccctaccctccccccaaaaaaaagcaaaaaaaaaaaaaaaaactaacaaaaaaaattcgagtgttcatttttcgtttcgtttcatccgagccccggcttggttcccggccacgcggaggggtctgcgctcccacacacccagacgggaaggggcttctgccctgctgcagaccgaccgccgcatagcgcggcccctgctccccgcggggccctgccctcctggccacaccaaacgaaacttggaaaagttagagagattgttttttaaccagctgtagaaataagccgttccctgagaaccctccgcctgattccctgcagcttccctctgctccctttccagcccgccgggatgcgggatgccaggggaggccgggagagaaattccccaagtttggggtgaggtgggaaccatgtaaatatgtgagatatgtacacactggcggggagaagaaacattttgtgcttggtttttatttttggttttccgggttacccttccttcctaccctaaaggattttgtacactgactaatccgaaaaagatattttaatatgatttccgaatttctgacccatctctatttattttctggatgtgtttggagcttcccccttctccgtttcttcttctgtttgttaaggtttgaatttaaattttgttattttatttttattattttttgaaacaatgtttcggtgcattctctttgtatctttattgaaaaaaaaataatgtagactgggaagttccctttatatttatgttatagtaaatattttattactc

SEQ ID NO: 75182 - DNA, 1708 bp, Homo sapiens
cacagatctgcaagtgatatttggactgcttacagccttcgctggatcaggaatatcttcacgtaatcactagacagaagctttctcagaacttctttgtgctgtgtgcattcaactcacagatttgaagctttctttagatagagcaggtttgaaacactctttttgtataatctgcaagtggacatttggagggctttaagccctacggtggaaaaggaaatatcttccaataaaaactagacagaagcattctcacaaacatctttgtgatgtttgccttcaactcacagagttgaacataccttatgatagagagttttggaattcccggagcgattgcatgcaggggccgcgtaccgcgaagtgcagaagctgatgcaccacgagtggctgggcgcgggcgcgggccaccccgtgggcctagcgcacccccagtggctacccacgggaggaggcggcggcggcgattgggccggcgcgcacctagaacacggcaaggcaggaggcggcggcaccggccgagccgacgacggcggcggcggcggaggtttccacgcgcgcctggtgcaccagggggcggcccacgcgggcgcggcatgggcgcagggcagcacagcgcaccacttgggcccggccatgtcgccctcgcccggggccagcgggggccaccagccccagccgctcgggctgtacgcgcaggcggcctacccggggggcggcggcggcggcctggccgggatgctggcggcgggcggtggcggcgcggggccgggcctgcaccacgcgctgcacgaggatggccacgaggcgcagctggagccgtcgccgccgccgcatctgggcgcccacggacacgcacacggacatgcacacgcgggcggcctgcacgcggcggcggcgcacctgcacccgggcgcgggcggcggcggctcatcggtgggcgagcactcggacgaggatgcgcccagctcggacgacctggagcagttcgccaagcagttcaagcagcggcgcatcaagctgggctttacgcaggccgacgtggggctggcgctgggcacgctctacggtaacgtgttctcgcagaccaccatctgccgcttcgaggccctgcagctgagcttcaagaacatgtgcaagctcaagccgctgctcaacaagtggctggaggagaccgactcgtccagcggcagccccaccaacctggacaagatcgcggcgcagggccgcaagcgcaagaagcgcacgtccatcgaggtgggggtcaaaggcgcgctcgagagccactttctcaagtgccccaagccctcggcgcacgagatcaccggcttggcagacagcctgcagctggagaaggaggtggtgcgcgtctggttctgcaaccggcggcagaaggagaagcgcatgacccctgctaccaaggtaactagcactaaccctgtactgattgtactgaaagctatacgacgtctttggtgacataatacaactcgaggggatgccgacaatcggttagctcactccgagcgccagcgacttgctccaccaccacgcggccagcttgacatactacacagcctaccaacacacacacgtggacaggcgtctagctgaagttacccacgagggccgcgcccccgccgcgcgtatgcaggcgcggcgcgcagcccgcccgtaagcctgactcttttcctttgtctcccct

SEQ ID NO: 75183 - DNA, 318 bp, Homo sapiens
cggcacgagattaaccgagagagacaatacagaaaaggttccagctattcaagtccttctcctcactctcataaaaagaaatatcactgttctctaagtttgtccaaaaatttactggtggaaacctgaattaactgtatttttttcctttaattttccacaccatttttcctgagcagagataatatgaaagcttacctttcaatgccaaaggacattttcttttctttctatgctacagagcaagcatctcctactgtgaacagcagttggaattgtgtgatctgaaagttgaataagaagtgtcatagaataaaa

SEQ ID NO: 75184 - DNA, 341 bp, Homo sapiens
ttttgagacggagtctcgctctgtcgcccagcccggactgcggactgcagtggcacaatctcagctcactgcaagctccgcttcccgggttcacgccattctccagcctcagcctcccgagtagctgggactacaggcgcccgccaccgcgccttgctaattttttgtatttttagtagagacggggtttcaccttgttagccaggatggtctcgatctcctgacctcatgatccacccgcctcggcctcccaaagtgctgggattacaggcgtgagccaccgcacccggcccatttcctctatttttaaatgtgttttatagttttagatcccatgttta

SEQ ID NO: 75185 - DNA, 712 bp, Homo sapiens
aggagatgaaaaaacacattgcaaagatgtttttcagaatgttcctatctagtatttatgtgaagatatttccttttccaccataggcatcaaagtgctccaaatgtccacttgcaacttctactaaaggagggtttcaaaactactcaatcaaaagaatgttttaactctgtgagatgaatgcacacatcataaagaagtatctcagattgtttctttctagattttatgtgaaaatatttccttttctaacttaggctgcaaagtcctccaaatgtccacttgcagattctacaaaaagagtgtttccaaactgctcaatcaaaagaaacattcacctctgtgagatgaacgcacacatcacaaagatgtttctcagagttcttctatctagtttttatgtgaagatatttccttttccaccattgtcctcaaagcactccaaatgtccacttgcagactctacaaaaagagagtttcaaaagtgctcaatcaaatcaaaggtttaactctgtgaggtgaatgctcacgtcacaaagaagtttctcagattgcttctgtctagattttatgtgacaatatttccttgtctaccatagtccgcagagaacacaaaatgtcctcttgcagattctactaaaagagtctttccaaactgttcaaccaaaggaaaggttaaactatgtgagatgaatgctcacatcactaagaa

SEQ ID NO: 75186 - DNA, 269 bp, Homo sapiens
cagaatcacatgtaatgatcttgcaggactaaattatctctttaataactgactttatatgcctttggcagtcagtgctaagcagcctgtgttctcttgcagtgctgtctccatttaagtaacaagtctagtcacgtagacggaaaagaaattgcaatataatagatcatttggatcagaagagtttgtaagagtcactaggaagcagtaagactgaatttaactgtgtgctatctgctgggaagcttcatgttcaaagtaaaatataa

SEQ ID NO: 75187 - DNA, 392 bp, Homo sapiens
gatgcacgacagctgcgtggacagttgtaccatgttcagaacacctcggaggctcatgcagtgaagacaggtaacagatttcaaatcaacactttgctcggttccacacagggaggatacagggctgctgcatttgctaaactaggaagctggaggtcctgctgtgcctgagcccgggggctgagggacacgtggaggctggtctggagacggctcagatgttgaagtcagcatccgaaggcaggggaatggagtctgtctattgaaaagccctccctttgggccatcacccctccccaatgctaacctgcatgaagagtcatgataggatgggtggctgagccactagcctggataaatgcaaagttcaggcctctttctgggagcaaatg

SEQ ID NO: 75188 - DNA, 796 bp, Homo sapiens
agaggaaagatgtcatcaggcttcctgtggctttgtccttcagcagtggggctcggcttgctttcacctgccttaggaagatttctggcttccgagctctgatatggggagaagataagggctgggatctttgagtctgcccctagctgggtatgtgcgtccggtgtgcgggccttggagtttttggtaatgactcacttgtgctctttctgggatctgtctccctcccacatgaccccgtggggtccctgaatgactgttttagagtacccatgtgggttccctgagtcacagcaggggatgtttaataaggaggttagcactgagcttggggacgtgctgtcacaccagcaggacgctgcaggaaggagcaggctacttcctttcttgacgtgcaaataactcgtataggctaatcaacaggcttataagttaaaagggctaccgctcggccccttggggattccatcccctcctctgtaacttggagatgtttgtttctgctgcagactcagagggttgcgatgaagagtggtgggactgagttgagaagcttatcccttcgctgggtgggaggtttctaattgccccgttctttgggggatccttaagtccagcttccaggtgggggcagcgataggaccaagttctcctagtagtctctgggaagccacttgagggaagctgccggtcatcccatgcacccattggtcttctccagcaggccctgtaggtcgtccatgttccatgccttctgggttcttgggggagaaggaagctgttgaaaaaaaaaaaa

SEQ ID NO: 75189 - DNA, 365 bp, Homo sapiens
ggagcccagcagcgtgaatatggctcaatgcagccttgacctcctagcctcaagtggtcctcccacctcagcctcccatggaactgggaccacaggctctcatcaccatacctggctaatttatatattttttttgtagagatagggccttaccatcttacccaggctggtctcgaacctctggctcaagcaatcctcccatcttggcctcccaaagtgctgggattacaggcgtgaaccactatgccacagttgagtttagaatgtttatttaaaatcttgtgacactgaactcaatgactagttctcggaaaacttactttttaatagtgtattgtggtgtaaggcctgaaattaggattcat

SEQ ID NO: 75190 - DNA, 440 bp, Homo sapiens
taaaaaaaattttttttgagatggagtcttactctgtcacccaggccactgtgcctggctaatttttgtattattattttttagtagttctggtcttgaacctctgatctcaagtaatcccctaccctcagcctcccaaagtgctgagccatcgtgcccagccttctgccacattttgtttttttagacagagtttcgctcttgttgcccaggctggagtgcaatggcgtgacctcggttcactgcaacctctgccttccgggttcaggcaattctcctgcctctgcctcctgagtaggtgggattacaggcatgtgccaccacgcctggctaattttgtacttttagtagagatggggttttgccatgttggtcagactggtctcgaactcctgacttcaggtgatccacccacctcggccttccaaagtgctgggatt

SEQ ID NO: 75191 - DNA, 874 bp, Homo sapiens
atgtggatctgcctccagagcaggtacaaggtgagtgagtctatgctgttacctaattagatccccatttctaccctttgtttttacttctctatctactgataggtttttaccctccttcacctcatagggttgcagtgaagagcaagatgaatttttatttatgttgcataaattttaaaagctaaaaaatatatatgtaatgttgggaagtcccagtgtacaaatggctattgtaaatttggaacatgaacttgcttttttccattgtaaaaatgaaatcattataaattgcggtcaagttactaggtcagcccacacagagtttacccagtaatatgcgtaaatgttttgcctttgcatcaacaacaaggaaaaacagtactataaaaaaatgttcctggaagccggatgtatcaaagcacttctgaaatagctatatagcctatagacatgaccagttggtttctgagtctgttgacattggccaaaggagaagctcagtgtagaacatgtttggagtctccttttgcagaaatacattggaggctggagtggggaaccaatttttcagaaaggtggtgaagtagttacatagccactcttttaaagacagtcaaaagatagaaactaaggccaggttcaagcgattctcctacctcagcctctcaagtagctgggattacaggcacccaccaccatgcctggctaatttttgtatttttggaagagacggggtttcaccatgttctccaggctggtctcaaactcctgaactcaggtgatccaaatgaaaaaagatctcaaagtgctgggattacaggcgtgacctaccgcgcccggcccattttgagtttaaatcaaaggagacaga

SEQ ID NO: 75192 - DNA, 844 bp, Homo sapiens
cgctcagtcctgcgtccgggccccgaggcacagccagggcaccaggtggagcaccagctacgcgtggcgcagcgcagcgtccctagcaccgagcctcccgcagccgccgagatgctgcgaacagagagctgccgccccaggtcgcccgccggacaggtggccgcggcgtccccgctcctgctgctgctgctgctgctcgcctggtgcgcgggcgcctgccgaggtgctccaatattacctcaaggattacagcctgaacaacagctacagttgtggaatgagatagatgatacttgttcgtcttttctgtccattgattctcagcctcaggcatccaacgcactggaggagctttgctttatgattatgggaatgctaccaaagcctcaggaacaagatgaaaaagataatactaaaaggttcttatttcattattcgaagacacagaagttgggcaagtcaaatgttgtgtcgtcagttgtgcatccgttgctgcagctcgttcctcacctgcatgagagaagaatgaagagattcagagtggacgaagaattccaaagtccctttgcaagtcaaagtcgaggatattttttattcaggccacggaatggaagaaggtcagcagggttcatttaaaatggatgccagctaattttccacagagcaatgctatggaatacaaaatgtactgacattttgttttcttctgaaaaaaatccttgctaaatgtactctgttgaaaatccctgtgttgtcaatgttctcagttgtaacaatgttgtaaatgttcaatttgttgaaaattaaaaaatctaaaaataaaaaactggcctcgttggcctca

SEQ ID NO: 75193 - DNA, 593 bp, Homo sapiens
ccagcttacacagctacacgtagtggaatgagatagatatacttgtccgtctattctgtccattgattctcagcctctggcatcctacgcacgtgaggagctttgctacgtcatgattggaatgctaccaaagcctcaggaacaagatgaaaaagataatactaaaaggttcttatttcattattcgaagacacagaagttgggcaagtcaaatgttgtgtcgtcagttgtgcatccgttgctgcagctcgttcctcacctgcatgagagaagaatgaagagattcagagtggacgaagaattccaaagtccctttgcaagtcaaagtcgaggatattttttattcaggccacggaatggaagaaggtcagcagggttcatttaaaatggatgccagctaattttccacagagcaatgctatggaatacaaaatgtactgacattttgttttcttctgaaaaaaatccttgctaaatgtactctgttgaaaatccctgtgttgtcaatgttctcagttgtaacaatgttgtaaatgttcaatttgttgaaaattaaaaaatctaaaaataaaaaactggcctcgttggcctca

SEQ ID NO: 75194 - DNA, 769 bp, Homo sapiens
cgctcagtcctgcgtccgggccccgaggcacagccagggcaccaggtggagcaccagctacgcgtggcgcagcgcagcgtccctagcaccgagcctcccgcagccgccgagatgctgcgaacagagagctgccgccccaggtcgcccgccggacaggtggccgcggcgtccccgctcctgctgctgctgctgctgctcgcctggtgcgcgggcgcctgccgaggtgctccaatattacctcaaggattacagcctgaacaacagctacagttgtggaatgagatagatgatacttgttcgtcttttctgtccattgattctcagcctcaggcatccaacgcactggaggagctttgctttatgattatgggaatgctaccaaagcctcaggaacaagatgaaaaagataatactaaaaggttcttatttcattattcgaagacacagaagttgggcaagtcaaatgttgtggaagaattccaaagtccctttgcaagtcaaagtcgaggatattttttattcaggccacggaatggaagaaggtcagcagggttcatttaaaatggatgccagctaattttccacagagcaatgctatggaatacaaaatgtactgacattttgttttcttctgaaaaaaatccttgctaaatgtactctgttgaaaatccctgtgttgtcaatgttctcagttgtaacaatgttgtaaatgttcaatttgttgaaaattaaaaaatctaaaaataaaaaactggcctcgttggcctca

SEQ ID NO: 75195 - DNA, 286 bp, Homo sapiens
cttggactcctcctagagcgtgccgcctactacctactatacgagctgctgagaagacgacatgaagggttcatttaaaatggatgccagctaattttccacagagcaatgctatggaatacaaaatgtactgacattttgttttcttctgaaaaaaatccttgctaaatgtactctgttgaaaatccctgtgttgtcaatgttctcagttgtaacaatgttgtaaatgttcaatttgttgaaaattaaaaaatctaaaaataaaaaactggcctcgttggcctca

SEQ ID NO: 75196 - DNA, 621 bp, Homo sapiens
ctaccaaattttatcccacctcttggtttattctccacagttcttcgaattgctcccaaagacctgttttaggtgacatctttaattttctgttttgtctgggacaagtttagtgggtaaaaacaaaaacaaataggaaaccgtcttgatggccactgctgagaagccatgcacttattcacgtgtgtgttcatgtcctctcagtcgtcagttgtgcatccgttgctgcagctcgttcctcacctgcatgagagaagaatgaagagattcagagtggacgtatgtaatacaaactgcatgctggctttgccattccgtgtggggcagccctttctgttaattcccagctgtggtagttcatcaaatgctgctcttcaggataagcccacactaatacccagttagccaatgtaagagcatctgtttgcagactagaagagaattgttcaagccgcccttccatggccccctgcaatattgtgtcccttctagctgaagctgtggacattgaggaaagctggaattatactgttttccaaaagccatggcttttggtgagaaaatctattcttggtttaagaaaggacactgcttttgtccagtccttaggtaggtatgata

SEQ ID NO: 75197 - DNA, 763 bp, Homo sapiens
cgctcagtcctgcgtccgggccccgaggcacagccagggcaccaggtggagcaccagctacgcgtggcgcagcgcagcgtccctagcaccgagcctcccgcagccgccgagatgctgcgaacagagagctgccgccccaggtcgcccgccggacaggtggccgcggcgtccccgctcctgctgctgctgctgctgctcgcctggtgcgcgggcgcctgccgaggtgctccaatattacctcaaggattacagcctgaacaacagctacagttgtggaatgagatagatgatacttgttcgtcttttctgtccattgattctcagcctcaggcatccaacgcactggaggagctttgctttatgattatgggaatgctaccaaagcctcagtcgtcagttgtgcatccgttgctgcagctcgttcctcacctgcatgagagaagaatgaagagattcagagtggacgaagaattccaaagtccctttgcaagtcaaagtcgaggatattttttattcaggccacggaatggaagaaggtcagcagggttcatttaaaatggatgccagctaattttccacagagcaatgctatggaatacaaaatgtactgacattttgttttcttctgaaaaaaatccttgctaaatgtactctgttgaaaatccctgtgttgtcaatgttctcagttgtaacaatgttgtaaatgttcaatttgttgaaaattaaaaaatctaaaaataaaaaactggcctcgttggcctca

SEQ ID NO: 75198 - DNA, 683 bp, Homo sapiens
gaataaaaattgagtcaacttcattttctgctcttcttagtagtgaaacgcctcctgatgatttctcatccttaacttttctttgctattatgaaggggctgacatcaaataagtgattagcaattttgtagagctggggaaaattactactgaggatatttcaaggtccttgtgataggctgttttctgaagataggtcttcactttgaaacatttcctagcaaagccagtgctcctgcatgccaagttagtatgacaatgtatttcttattgcattgtcgttactgcttagcattaaaatacaaacgtcatggcaggacacattatataatagaactctaatcagattctcttttcctttatgaaacacatctcacttatgatatattctccaaagtaattatgttttttcctgtgacttgtgaaaatctgaaaagatgaaaatttctcccatgagcaattggattatgctttgctaaatgaaacatttaataatcaaactgttctttctgtacatttttagaaaaattggattacaattagtgaaaacaagagagagaaaaaaaggccaaactgcaggcattcagcatgaccatgtgctcaggtttctccctgagactttagctctgtaaataatgttttttgtttttgttgttggagacagtctcactctgtcatctag

SEQ ID NO: 75199 - DNA, 656 bp, Homo sapiens
actgcaaactgcctcccgggttcagatgaccctacctcagcctcttgagtagctgtgagtacaggtgcatgacaccatgcctggttaatatttgtattttctgcagagacggttcgccatgtctccatttgtctacaaatctcaaattcttgggctaaagcaatccgtccgcctcgacttcccaaattgctgggattacaggagtgagctactgcacctggccaacattttctagtctcatagggcatgtttaaatctatggcataaacaaattggtttcgtgaaaattactatatagtacattaagttttccctcatcatttaaatagatttttgtgtctattttcctttaaaattttaatgtacttgatctagcttgatctagattattctgtaatagaagtagttgtaaatctctaaaagtaagtcttttgatttctgtagaccatggattttttaaccttggcactactgacattttgggcagatagttctttgttgagtggctctcctgtgcattgtgggatgtttagcaacatccctgacctctaccaaaatatgcaggtagcactgcagagccccagcgcatgtccccactatctcttcttgctgggatggcatcaactaaaaatgtccccagtactgccatatgtttg

SEQ ID NO: 75200 - DNA, 669 bp, Homo sapiens
ggcacgagcccagaaacaaagacttcacggacaaagtcccttggaaccagagtaagtgtcacttgtcttttctgtcttatctgttactgtggagggcagtgttgttcaaagacatgcatgcagctaggggctcctcaaaggtagggggaattctttgagtaggctgggcaaatgtctaagtagcccatggatgcatctccaaggcaattaatactgtagcaatactgagaatggtggatttataaagctgggtgctcagatgaaatataggcttttttgctaaaaaggaagcttacttgaaggattggcttttggttactgattaagaaagtcagtcagtactaagggacaaaaggtgttttctgtggaaacctattcaataagaaattacttggcggggcgcagtggctcacggctgtaatcccagcactttgggagaccgaggcaggtggatcatgaggtcaagagatggagacaatcctggccatatggtgaaaccctgtctctactaaaaataaaaattagccgggcatggtggcgcatgcctgtagtcccagctactcaagaggctgaggcaggagaatcactcgaatccgggaggtggaggttgcagtgagctgagattgcaccactacactccagcctggcgacagagcaagagtctgtctg

SEQ ID NO: 75201 - DNA, 554 bp, Homo sapiens
gacgggagtgcaaggcaaataaggaaaaggattagaaataataataataataaggcctgctgtgtaagctgacagtatttgtagctgatagggggttgggaggaaagtgtctactaggagggtggggtgagattctgtgttgatgtaggaggccgagaaggcccttaactcaaagtagcttatttatccaaaatgttctggatgcatcatctccaaccaaggaccccttatttatcatgcctttgttctcttttccctcagatgtatatttctttaaaaataattttcctaataacaaaacttatttctaaaacagcttaaaaattcaaagaaaaaccccaaacactgacattacctacacttccactacccaaagacaaaatgtgcccactgtgtgcttttgagtgtattttcttttagtttgttttttgttgggtgcatatttatgataataacaatgatggacttcaattgtactcactgttctattgttggttttaattagcagcaagttgtgatcactttcccaggtgaataaatcatttcaaagcatt

SEQ ID NO: 75202 - DNA, 2667 bp, Homo sapiens
ggcacgagcccagaaacaaagacttcacggacaaagtcccttggaaccagagagaagccgggatggaaactccaaacaccacagaggactatgacacgaccacagagtttgactatggggatgcaactccgtgccagaaggtgaacgagagggcctttggggcccaactgctgccccctctgtactccttggtatttgtcattggcctggttggaaacatcctggtggtcctggtccttgtgcaatacaagaggctaaaaaacatgaccagcatctacctcctgaacctggccatttctgacctgctcttcctgttcacgcttcccttctggatcgactacaagttgaaggatgactgggtttttggtgatgccatgtgtaagatcctctctgggttttattacacaggcttgtacagcgagatctttttcatcatcctgctgacgattgacaggtacctggccatcgtccacgccgtgtttgccttgcgggcacggaccgtcacttttggtgtcatcaccagcatcatcatttgggccctggccatcttggcttccatgccaggcttatacttttccaagacccaatgggaattcactcaccacacctgcagccttcactttcctcacgaaagcctacgagagtggaagctgtttcaggctctgaaactgaacctctttgggctggtattgcctttgttggtcatgatcatctgctacacagggattataaagattctgctaagacgaccaaatgagaagaaatccaaagctgtccgtttgatttttgtcatcatgatcatcttttttctcttttggaccccctacaatttgactatacttatttctgttttccaagacttcctgttcacccatgagtgtgagcagagcagacatttggacctggctgtgcaagtgacggaggtgatcgcctacacgcactgctgtgtcaacccagtgatctacgccttcgttggtgagaggttccggaagtacctgcggcagttgttccacaggcgtgtggctgtgcacctggttaaatggctccccttcctctccgtggacaggctggagagggtcagctccacatctccctccacaggggagcatgaactctctgctgggttctgactcagaccataggaggccaacccaaaataagcaggcgtgacctgccaggcacactgagccagcagcctggctctcccagccaggttctgactcttggcacagcatggagtcacagccacttgggatagagagggaatgtaatggtggcctggggcttctgaggcttctggggcttcagtcttttccatgaacttctcccctggtagaaagaagatgaatgagcaaaaccaaatattccagagactgggactaagtgtaccagagaagggcttggactcaagcaagatttcagatttgtgaccattagcatttgtcaacaaagtcacccacttcccactattgcttgcacaaaccaattaaacccagtagtggtgactgtgggctccattcaaagtgagctcctaagccatgggagacactgatgtatgaggaatttctgttcttccatcacctccccccccccgccaccctcccactgccaaagaacttggaaatagtgatttccacagtgactccactctgagtcccagagccaatcagtagccagcatctgcctccccttcactcccaccgcaggatttgggctcttggaatcctggggaacatagaactcatgacggaagagttgagacctaacgagaaatagaaatggggaactactgctggcagtggaactaagaaagcccttaggaagaatttttatatccactaaaatcaaacaattcagggagtgggctaagcacgggccatatgaataacatggtgtgcttcttaaaatagccataaaggggagggactcatcatttccatttacccttcttttctgactatttttcagaatctctcttcttttcaagttgggtgatatgttggtagattctaatggctttattgcagcgattaataacaggcaaaaggaagcagggttggtttcccttctttttgttcttcatctaagccttctggttttatgggtcagagttccgactgccatcttggacttgtcagcaaaaaaaaaaaataataataataataaggcctgctgtgtaagctgacagtatttgtagctgatagggggttgggaggaaagtgtctactaggagggtggggtgagattctgtgttgatgtaggaggccgagaaggcccttaactcaaagtagcttatttatccaaaatgttctggatgcatcatctccaaccaaggaccccttatttatcatgcctttgttctcttttccctcagatgtatatttctttaaaaataattttcctaataacaaaacttatttctaaaacagcttaaaaattcaaagaaaaaccccaaacactgacattacctacacttccactacccaaagacaaaatgtgcccactgtgtgcttttgagtgtattttcttttagtttgttttttgttgggtgcatatttatgataataacaatgatggacttcaattgtactcactgttctattgttggttttaattagcagcaagttgtgatcactttcccaggtgaataaatcatttcaaagcatt

SEQ ID NO: 75203 - DNA, 398 bp, Homo sapiens
atttattttaataactacccagatattttaacatccttttcatactgttcttagtttcttaaagacaaacttgtagcactgcattttgtgttttaaaaaatatagatgtaatgtatatggcaactatagcaccaaaggatagacgggaggtaagcagaactttagtgttgcaagatttatatatgtaaaaccaaggttaattcgcaaatagttttcattgtgataaattaaatacacatattatagtccctatagtaatcattataagaagaatgcaaagaaatgtagctttaaaaagacaacagaattaaaatggtaaaataaacatttaacgtaaaagaaatcaggaaaagaaggactgaggaacaagcaatatatgagaaaaatagaaaacaaac

SEQ ID NO: 75204 - DNA, 483 bp, Homo sapiens
gaatctcactcttctctaatacgttattagaggggctcctcaaaagcaatcctgttcatattcttcatacttttacaaacttcttaacctatttctccattatcacctcctgccagttcccacccctgtggtccagacttgtagaatcactgccagttcctcaatgctagttcccatgcctttgcacattccatttcctctgcctagagtaccctaagcagactgctactctttcagatgctgttcaagctttcccttcccttagaaagccctctgaaccatgtactgtgagttagagacctctcatctgtgatgcctgcctccttccccactttcttcctttcccaccccaggactttaagctctttgagagcaggagggggagaatgggttttatttgaagatcttcagaaccaagacctagtgtatatagtaggacctcaatatttattgaaccaaacattacagaaaatttggaaaatg

SEQ ID NO: 75205 - DNA, 2364 bp, Homo sapiens
atgaatgtgatagaccacgtgcgggacatggcggccgcggggctgcactccaacgtgcggctcctcagcagcttgttacttacaatgagtaataacaaccctgagttattctccccacctcagaagtaccagcttttggtgtatcatgcagattctctctttcatgataaggaatatcggaatgctgtgagtaagtataccatggctttacagcagaagaaagcgctaagtaaaacttcaaaagtgagaccttcaactggaaattctgcatctactccacaaagtcagtgtcttccatctgaaattgaagtgaaatacaaaatggctgaatgttatacaatgctaaaacaagataaagatgccattgctatacttgatgggatcccttcaagacaaagaactcccaaaataaacatgatgctggcaaacctgtacaagaaggctggtcgggagcgcccttcagtcaccagctataaggaggtgctgaggcagtgcccattagcccttgatgccattctaggcttgttgtccctttctgtaaaaggggcagaggtggcatccatgacaatgaatgtgatccaaaccgtgcctaacttggactggctctctgtgtggatcaaagcgtatgcttttgtgcacactggtgacaactcaagagcaatcagtaccatctgttcactagagaaaaaatccttattgcgagataacgtggacctattgggaagcttggcagatctgtacttcagagctggagacaataaaaactctgtcctcaagtttgaacaggcacagatgttggatccttatctgataaaaggaatggatgtatatggctacctactggcacgagaagggcggctagaggatgttgagaaccttggatgccgccttttcaatatctctgatcagcatgcagaaccgtgggtggtttctggctgtcacagcttctatagcaaacgctactcccgggccctctatttaggagccaaggccattcagctgaacagtaatagtgttcaagctctgctacttaagggagcagcacttaggaacatgggcagagtccaagaagcaataatccactttcgggaggccatacggctcgcaccttgtcgcttagattgttatgaaggtcttatcgaatgttacttagcctccaacagtattcgagaagcaatggtaatggctaacaacgtttacaaaactctgggagcaaatgcacagacccttacccttttagccaccgtttgtcttgaagacccagtgacacaggagaaagccaaaacattattagataaagccctgacccaaaggccagattacattaaggctgtggtgaaaaaagcagaactacttagcagagaacagaaatatgaagatggaattgctttgctgaggaacgcactggctaatcagagtgactgtgtcctgcatcggatcctaggagatttccttgtagctgtcaatgagtatcaggaggcaatggaccagtatagtatagcactaagtttggaccccaatgaccagaagtctctagaggggatgcagaagatggagaaggaggagagtcccacggatgccactcaggaggaggatgtggacgacatggaagggagtggggaagaaggggacctggagggcagcgacagtgaggcggcccagtgggctgaccaggagcagtggttcggcatgcagtgagggggcggcagctccatggccgcagtggcctgccctgctctgagcacttccgtggactgaaggaaccgtaggagcctgctctcagaaggacaatgattcagcatgtgattgcagcaggggtctctgccccctcgctcccaattcctagtcgtgacttcatttctaaaacagagcctgaccaaccttccatgtatctccatcctcccctgctccagccagggaggactgagggagtgccccgagacccacgcacatgttggggcttctgggccaagagtactttttatataactaatttctaaatccaaaagctcaaggaatagacagtgttctgtgacatggattggtttgaaggagttacccaccatcccagcacgataatgtcatctcccaagttggatggcagcacgatctggccctagggagcttcctgttcccagaagtcattgtcctgggctatccagatgtccctagtaaatcttgcttccttctgcaatgttagtaatgccttaagctgacagttgctattttgcagaacagttttcctctttgcttagctagtaacttgcctctgagcctgggctgatctgagaaacaggtgtgacaagagcatgaaccagaggtgcacctggggcagttccctaataaaactggtttgtacagtca

SEQ ID NO: 75206 - DNA, 1836 bp, Homo sapiens
ggtggctcatgcctgtagtcctagcactttgggaggctgaggcgggtggaacacctgacgtcaggagttcgagaccagcctagccaacatggtgaactaccatctctactaaaaatagaaacaaatttagccaggcatggtggtgcacgcctgtagtcccagctacttgggaggctgaggcaggagaattgcttgaacccaggagacatgggttgcagtgagccgagatgtcaccactgccctccagcctgggtgacagagcgagactccatttcaaaaaaaaaaaaaaaaaatagttagagttaggtaatttctggttaagtaaccatagtgtgtggaagggtgtgcatgaatgttataaatgctgctagggtggaggagtatgcagagaaaatctgccaaggattgtgtgggtttggggttttaagctgtttttttgttttgatgagcactttgtgccaaaaagttattcctctgttctcctcaacttactggcatgaagagttgagagttgactcttctcaaggtggcctcctcatagggcgtctcgctgtgggtgtggaaagaggcaagggctgccagttgcagtctgtttggtgcatgggtcttatcgaatgttacttagcctccaacagtattcgagaagcaatggtaatggctaacaacgtttacaaaactctgggagcaaatgcacagacccttacccttttagccaccgtttgtcttgaagacccagtgacacaggagaaagccaaaacattattagataaagccctgacccaaaggccagattacattaaggctgtggtgaaaaaagcagaactacttagcagagaacagaaatatgaagatggaattgctttgctgaggaacgcactggctaatcagagtgactgtgtcctgcatcggatcctaggagatttccttgtagctgtcaatgagtatcaggaggcaatggaccagtatagtatagcactaagtttggaccccaatgaccagaagtctctagaggggatgcagaagatggagaaggaggagagtcccacggatgccactcaggaggaggatgtggacgacatggaagggagtggggaagaaggggacctggagggcagcgacagtgaggcggcccagtgggctgaccaggagcagtggttcggcatgcagtgagggggcggcagctccatggccgcagtggcctgccctgctctgagcacttccgtggactgaaggaaccgtaggagcctgctctcagaaggacaatgattcagcatgtgattgcagcaggggtctctgccccctcgctcccaattcctagtcgtgacttcatttctaaaacagagcctgaccaaccttccatgtatctccatcctcccctgctccagccagggaggactgagggagtgccccgagacccacgcacatgttggggcttctgggccaagagtactttttatataactaatttctaaatccaaaagctcaaggaatagacagtgttctgtgacatggattggtttgaaggagttacccaccatcccagcacgataatgtcatctcccaagttggatggcagcacgatctggccctagggagcttcctgttcccagaagtcattgtcctgggctatccagatgtccctagtaaatcttgcttccttctgcaatgttagtaatgccttaagctgacagttgctattttgcagaacagttttcctctttgcttagctagtaacttgcctctgagcctgggctgatctgagaaacaggtgtgacaagagcatgaaccagaggtgcacctggggcagttccctaataaaactggtttgtacagtca

SEQ ID NO: 75207 - DNA, 1673 bp, Homo sapiens
atgaatgtgatagaccacgtgcgggacatggcggccgcggggctgcactccaacgtgcggctcctcagcagcttgttacttacaatgagtaataacaaccctgagttattctccccacctcagaagtaccagcttttggtgtatcatgcagattctctctttcatgataaggaatatcggaatgctgtgagtaagtataccatggctttacagcagaagaaagcgctaagtaaaacttcaaaagtgagaccttcaactggaaattctgcatctactccacaaagtcagtgtcttccatctgaaattgaagtgaaatacaaaatggctgaatgttatacaatgctaaaacaagataaagatgccattgctatacttgatgggatcccttcaagacaaagaactcccaaaataaacatgatgctggcaaacctgtacaagaaggctggtcgggagcgcccttcagtcaccagctataaggaggtgctgaggcagtgcccattagcccttgatgccattctaggcttgttgtccctttctgtaaaaggggcagaggtggcatccatgacaatgaatgtgatccaaaccgtgcctaacttggactggctctctgtgtggatcaaagcgtatgcttttgtgcacactggtgacaactcaagagcaatcagtaccatctgttcactagagaaaaaatccttattgcgagataacgtggacctattgggaagcttggcagatctgtacttcagagctggagacaataaaaactctgtcctcaagtttgaacaggcacagatgttggatccttatctgataaaaggaatggatgtatatggctacctactggcacgagaagggcggctagaggatgttgagaaccttggatgccgccttttcaatatctctgatcagcatgcagaaccgtgggtggtttctggctgtcacagcttctatagcaaacgctactcccgggccctctatttaggagccaaggccattcagctgaacagtaatagtgttcaagctctgctacttaagggagcagcacttaggaacatgggcagagtccaagaagcaataatccactttcgggaggccatacggctcgcaccttgtcgcttagattgttatgaaggtcttatcgaatgttacttagcctccaacagtattcgagaagcaatggtaatggctaacaacgtttacaaaactctgggagcaaatgcacagacccttacccttttagccaccgtttgtcttgaagacccagtgacacaggagaaagccaaaacattattagataaagccctgacccaaaggccagattacattaaggctgtggtgaaaaaagcagaactacttagcagagaacagaaatatgaagatggaattgctttgctgaggaacgcactggctaatcagagtgactgtgtcctgcatcggatcctaggagatttccttgtagctgtcaatgagtatcaggaggcaatggaccagtatagtatagcactaagtttggaccccaatgaccagaagtctctagaggggatgcagaagatggagaaggaggagagtcccacggatgccactcaggaggaggatgtggacgacatggaagggatttgggcaaaaaaagaatctctctttaaactaaatttcctaggactgggggaagtatt

SEQ ID NO: 75208 - DNA, 721 bp, Homo sapiens
  misc_feature (280)..(280): n is a, c, g, or t
  misc_feature (283)..(283): n is a, c, g, or t
  misc_feature (368)..(368): n is a, c, g, or t
ccagcctgggcaacgagagtgaaactctgtcgcaaaaaaaataaataataaaataaagaccctaggagtcttccatcttaaacctagccctacaggtgaccgaatgcagctggagaataactgcttgttaagaggcagcaaaaccttgggttttgttgggaacatcatctctcactactttgatctcttggccatatgacagactaatcattagtgtcgcatttattcttccagtggtcagatggggtgctcacatgctgcaggttccttacatgtgctngtntccttccctaaactgaaggtgcctttgaaggcagtctttttctacatccatcaagttctctggggaagagcacttcttagctatnccatcaacactcttgccagtctaatctcaccatcagtttcccgtggcctgccctttgtctgaaactttgaaggtcttatcgaatgttacttagcctccaacagtattcgagaagcaatggtaatggctaacaacgtttacaaaactctgggagcaaatgcacagacccttacccttttagccaccgtttgtcttgaagacccagtgacacaggagaaagccaaaacattattagataaagccctgacccaaaggccagattacattaaggctgtggtgaaaaaagcagaactacttagtaagtgtgtcttattttctgtcctgttcatcattaatttttataaaaccccatcc

SEQ ID NO: 75209 - DNA, 245 bp, Homo sapiens
caggacctttcgagtggcgggcacttactggcatgaagagttgagagttgactcttctcaaggtggcctcctcatagggcgtctcgctgtgggtgtggaaagaggcaagggctgccagttgcagtctgtttggtgcatgaagtactgttcatctcgtttagggaagccctcagcaagtgccttttgagacagctgttacgtttcaaataaaagagtctttctccctaagttgcccgccaatcgaa

SEQ ID NO: 75210 - DNA, 2942 bp, Homo sapiens
atgaatgtgatagaccacgtgcgggacatggcggccgcggggctgcactccaacgtgcggctcctcagcagcttgttacttacaatgagtaataacaaccctgagttattctccccacctcagaagtaccagcttttggtgtatcatgcagattctctctttcatgataaggaatatcggaatgctgtgagtaagtataccatggctttacagcagaagaaagcgctaagtaaaacttcaaaagtgagaccttcaactggaaattctgcatctactccacaaagtcagtgtcttccatctgaaattgaagtgaaatacaaaatggctgaatgttatacaatgctaaaacaagataaagatgccattgctatacttgatgggatcccttcaagacaaagaactcccaaaataaacatgatgctggcaaacctgtacaagaaggctggtcgggagcgcccttcagtcaccagctataaggaggtgctgaggcagtgcccattagcccttgatgccattctaggcttgttgtccctttctgtaaaaggggcagaggtggcatccatgacaatgaatgtgatccaaaccgtgcctaacttggactggctctctgtgtggatcaaagcgtatgcttttgtgcacactggtgacaactcaagagcaatcagtaccatctgttcactagagaaaaaatccttattgcgagataacgtggacctattgggaagcttggcagatctgtacttcagagctggagacaataaaaactctgtcctcaagtttgaacaggcacagatgttggatccttatctgataaaaggaatggatgtatatggctacctactggcacgagaagggcggctagaggatgttgagaaccttggatgccgccttttcaatatctctgatcagcatgcagaaccgtgggtggtttctggctgtcacagcttctatagcaaacgctactcccgggccctctatttaggagccaaggccattcagctgaacagtaatagtgttcaagctctgctacttaagggagcagcacttaggaacatgggcagagtccaagaagcaataatccactttcgggaggccatacggctcgcaccttgtcgcttagattgttatgaaggtcttatcgaatgttacttagcctccaacagtattcgagaagcaatggtaatggctaacaacgtttacaaaactctgggagcaaatgcacagacccttacccttttagccaccgtttgtcttgaagacccagtgacacaggagaaagccaaaacattattagataaagccctgacccaaaggccagattacattaaggctgtggtgaaaaaagcagaactacttagcagagaacagaaatatgaagatggaattgctttgctgaggaacgcactggctaatcagagtgactgtgtcctgcatcggatcctaggagatttccttgtagctgtcaatgagtatcaggaggcaatggaccagtatagtatagcactaagtttggaccccaatgaccagaagtctctagaggggatgcagaagatggagaaggaggagagtcccacggatgccactcaggaggaggatgtggacgacatggaagggagtggggaagaaggggacctggagggcagcgacagtgaggcggcccagtgggctgaccaggagcagtggttcggcatgcagtgagggggcggcagctccatggccgcagtggcctgccctgctctgagcacttccgtggactgaaggaaccgtaggagcctgctctcagaaggacaatgattcagcatgtgattgcagcaggggtctctgccccctcgctcccaattcctagtcgtgacttcatttctaaaacagagcctgaccaaccttccatgtatctccatcctcccctgctccagccagggaggactgagggagtgccccgagacccacgcacatgttggggcttctgggccaagagtactttttatataactaatttctaaatccaaaagctcaaggaatagacagtgttctgtgacatggattggtttgaaggagttacccaccatcccagcacgataatgtcatctcccaagttggatggcagcacgatctggccctagggagcttcctgttcccagaagtcattgtcctgggctatccagatgtccctagtaaatcttgcttccttctgcaatgttagtaatgccttaagctgacagttgctattttgcagaacagttttcctctttgcttagctagtaacttgcctctgagcctgggctgatctgagaaacaggtgtgacaagagcatgaaccagaggtgcacctggggcagttccctaataaaactggtttgtacagtcatggtgttggggtgatcagaatggaagcccttttcaaaatagactcttagtatttttgtcttattcgcaatgcattgattcagccccagaattatttgccagaaatagactttcttcccctggtgttgggagccaggagggttggaaagctcaggaaccctgagctggttcatctgtttgcatattgggtaggttaatttccctggagcctgagagtctttggccagatttcagctgcgtctgcctggctcttttgctgcagctgtgagattggggtctggttccagcagtctgtcactggtcagcctgagtatcacaccctgagctctggggctgggagtttcttcccacaccctctcccttgtgccttaagttgcgatggctctgagtatacaattaatcggaggtgaggggtgggtgtcacagctaatcccaaattcaaaaattagtccaaggtgctgcaaaatataaatttgatgtcagtagaaagtcgtatcctaaaatgtaaaaactgtaagtgtacagtagttaatgagctcagaacatctgataactgcaatttaaaatgggcaaaaagtt

SEQ ID NO: 75211 - DNA, 1759 bp, Homo sapiens
  misc_feature (280)..(280): n is a, c, g, or t
  misc_feature (283)..(283): n is a, c, g, or t
  misc_feature (368)..(368): n is a, c, g, or t
ccagcctgggcaacgagagtgaaactctgtcgcaaaaaaaataaataataaaataaagaccctaggagtcttccatcttaaacctagccctacaggtgaccgaatgcagctggagaataactgcttgttaagaggcagcaaaaccttgggttttgttgggaacatcatctctcactactttgatctcttggccatatgacagactaatcattagtgtcgcatttattcttccagtggtcagatggggtgctcacatgctgcaggttccttacatgtgctngtntccttccctaaactgaaggtgcctttgaaggcagtctttttctacatccatcaagttctctggggaagagcacttcttagctatnccatcaacactcttgccagtctaatctcaccatcagtttcccgtggcctgccctttgtctgaaactttgaaggttagcaatttggagagctgtcagagtggaagcatgggttggaatggtaatggcattgaatgtcttcacgtgttttacttttttcaggtcttatcgaatgttacttagcctccaacagtattcgagaagcaatggtaatggctaacaacgtttacaaaactctgggagcaaatgcacagacccttacccttttagccaccgtttgtcttgaagacccagtgacacaggagaaagccaaaacattattagataaagccctgacccaaaggccagattacattaaggctgtggtgaaaaaagcagaactacttagcagagaacagaaatatgaagatggaattgctttgctgaggaacgcactggctaatcagagtgactgtgtcctgcatcggatcctaggagatttccttgtagctgtcaatgagtatcaggaggcaatggaccagtatagtatagcactaagtttggaccccaatgaccagaagtctctagaggggatgcagaagatggagaaggaggagagtcccacggatgccactcaggaggaggatgtggacgacatggaagggagtggggaagaaggggacctggagggcagcgacagtgaggcggcccagtgggctgaccaggagcagtggttcggcatgcagtgagggggcggcagctccatggccgcagtggcctgccctgctctgagcacttccgtggactgaaggaaccgtaggagcctgctctcagaaggacaatgattcagcatgtgattgcagcaggggtctctgccccctcgctcccaattcctagtcgtgacttcatttctaaaacagagcctgaccaaccttccatgtatctccatcctcccctgctccagccagggaggactgagggagtgccccgagacccacgcacatgttggggcttctgggccaagagtactttttatataactaatttctaaatccaaaagctcaaggaatagacagtgttctgtgacatggattggtttgaaggagttacccaccatcccagcacgataatgtcatctcccaagttggatggcagcacgatctggccctagggagcttcctgttcccagaagtcattgtcctgggctatccagatgtccctagtaaatcttgcttccttctgcaatgttagtaatgccttaagctgacagttgctattttgcagaacagttttcctctttgcttagctagtaacttgcctctgagcctgggctgatctgagaaacaggtgtgacaagagcatgaaccagaggtgcacctggggcagttccctaataaaactggtttgtacagtca

SEQ ID NO: 75212 - DNA, 1672 bp, Homo sapiens
  misc_feature (280)..(280): n is a, c, g, or t
  misc_feature (283)..(283): n is a, c, g, or t
  misc_feature (368)..(368): n is a, c, g, or t
ccagcctgggcaacgagagtgaaactctgtcgcaaaaaaaataaataataaaataaagaccctaggagtcttccatcttaaacctagccctacaggtgaccgaatgcagctggagaataactgcttgttaagaggcagcaaaaccttgggttttgttgggaacatcatctctcactactttgatctcttggccatatgacagactaatcattagtgtcgcatttattcttccagtggtcagatggggtgctcacatgctgcaggttccttacatgtgctngtntccttccctaaactgaaggtgcctttgaaggcagtctttttctacatccatcaagttctctggggaagagcacttcttagctatnccatcaacactcttgccagtctaatctcaccatcagtttcccgtggcctgccctttgtctgaaactttgaaggtcttatcgaatgttacttagcctccaacagtattcgagaagcaatggtaatggctaacaacgtttacaaaactctgggagcaaatgcacagacccttacccttttagccaccgtttgtcttgaagacccagtgacacaggagaaagccaaaacattattagataaagccctgacccaaaggccagattacattaaggctgtggtgaaaaaagcagaactacttagcagagaacagaaatatgaagatggaattgctttgctgaggaacgcactggctaatcagagtgactgtgtcctgcatcggatcctaggagatttccttgtagctgtcaatgagtatcaggaggcaatggaccagtatagtatagcactaagtttggaccccaatgaccagaagtctctagaggggatgcagaagatggagaaggaggagagtcccacggatgccactcaggaggaggatgtggacgacatggaagggagtggggaagaaggggacctggagggcagcgacagtgaggcggcccagtgggctgaccaggagcagtggttcggcatgcagtgagggggcggcagctccatggccgcagtggcctgccctgctctgagcacttccgtggactgaaggaaccgtaggagcctgctctcagaaggacaatgattcagcatgtgattgcagcaggggtctctgccccctcgctcccaattcctagtcgtgacttcatttctaaaacagagcctgaccaaccttccatgtatctccatcctcccctgctccagccagggaggactgagggagtgccccgagacccacgcacatgttggggcttctgggccaagagtactttttatataactaatttctaaatccaaaagctcaaggaatagacagtgttctgtgacatggattggtttgaaggagttacccaccatcccagcacgataatgtcatctcccaagttggatggcagcacgatctggccctagggagcttcctgttcccagaagtcattgtcctgggctatccagatgtccctagtaaatcttgcttccttctgcaatgttagtaatgccttaagctgacagttgctattttgcagaacagttttcctctttgcttagctagtaacttgcctctgagcctgggctgatctgagaaacaggtgtgacaagagcatgaaccagaggtgcacctggggcagttccctaataaaactggtttgtacagtca

SEQ ID NO: 75213 - DNA, 1283 bp, Homo sapiens
ccacaccatatgatagtaggcatacggctcgcacctgtcgctagattgttggtcttatcgaatgttacttagcctccaacagtattcgagaagcaatggtaatggctaacaacgtttacaaaactctgggagcaaatgcacagacccttacccttttagccaccgtttgtcttgaagacccagtgacacaggagaaagccaaaacattattagataaagccctgacccaaaggccagattacattaaggctgtggtgaaaaaagcagaactacttagcagagaacagaaatatgaagatggaattgctttgctgaggaacgcactggctaatcagagtgactgtgtcctgcatcggatcctaggagatttccttgtagctgtcaatgagtatcaggaggcaatggaccagtatagtatagcactaagtttggaccccaatgaccagaagtctctagaggggatgcagaagatggagaaggaggagagtcccacggatgccactcaggaggaggatgtggacgacatggaagggagtggggaagaaggggacctggagggcagcgacagtgaggcggcccagtgggctgaccaggagcagtggttcggcatgcagtgagggggcggcagctccatggccgcagtggcctgccctgctctgagcacttccgtggactgaaggaaccgtaggagcctgctctcagaaggacaatgattcagcatgtgattgcagcaggggtctctgccccctcgctcccaattcctagtcgtgacttcatttctaaaacagagcctgaccaaccttccatgtatctccatcctcccctgctccagccagggaggactgagggagtgccccgagacccacgcacatgttggggcttctgggccaagagtactttttatataactaatttctaaatccaaaagctcaaggaatagacagtgttctgtgacatggattggtttgaaggagttacccaccatcccagcacgataatgtcatctcccaagttggatggcagcacgatctggccctagggagcttcctgttcccagaagtcattgtcctgggctatccagatgtccctagtaaatcttgcttccttctgcaatgttagtaatgccttaagctgacagttgctattttgcagaacagttttcctctttgcttagctagtaacttgcctctgagcctgggctgatctgagaaacaggtgtgacaagagcatgaaccagaggtgcacctggggcagttccctaataaaactggtttgtacagtca

SEQ ID NO: 75214 - DNA, 1135 bp, Homo sapiens
cggacgcgtgggtcgacccacgcgtccggacccagtgacacaggagaaagccaaaacattattagataaagccctgacccaaaggccagattacattaaggctgtggtgaaaaaagcagaactacttagcagagaacagaaatatgaagatggaattgctttgctgaggaacgcactggctaatcagagtgactgtgtcctgcatcggatcctaggagatttccttgtagctgtcaatgagtatcaggaggcaatggaccagtatagtatagcactaagtttggaccccaatgaccagaagtctctagaggggatgcagaagatggagaaggaggagagtcccacggatgccactcaggaggaggatgtggacgacatggaagggagtggggaagaaggggacctggagggcagcgacagtgaggcggcccagtgggctgaccaggagcagtggttcggcatgcagtgagggggcggcagctccatggccgcagtggcctgccctgctctgagcacttccgtggactgaaggaaccgtaggagcctgctctcagaaggacaatgattcagcatgtgattgcagcaggggtctctgccccctcgctcccaattcctagtcgtgacttcatttctaaaacagagcctgaccaaccttccatgtatctccatcctcccctgctccagccagggaggactgagggagtgccccgagacccacgcacatgttggggcttctgggccaagagtactttttatataactaatttctaaatccaaaagctcaaggaatagacagtgttctgtgacatggattggtttgaaggagttacccaccatcccagcacgataatgtcatctcccaagttggatggcagcacgatctggccctagggagcttcctgttcccagaagtcattgtcctgggctatccagatgtccctagtaaatcttgcttccttctgcaatgttagtaatgccttaagctgacagttgctattttgcagaacagttttcctctttgcttagctagtaacttgcctctgagcctgggctgatctgagaaacaggtgtgacaagagcatgaaccagaggtgcacctggggcagttccctaataaaactggtttgtacagtca

SEQ ID NO: 75215 - DNA, 2068 bp, Homo sapiens
atgaatgtgatagaccacgtgcgggacatggcggccgcggggctgcactccaacgtgcggctcctcagcagcttgttacttacaatgagtaataacaaccctgagttattctccccacctcagaagtaccagcttttggtgtatcatgcagattctctctttcatgataaggaatatcggaatgctgtgagtaagtataccatggctttacagcagaagaaagcgctaagtaaaacttcaaaagtgagaccttcaactggaaattctgcatctactccacaaagtcagtgtcttccatctgaaattgaagtgaaatacaaaatggctgaatgttatacaatgctaaaacaagataaagatgccattgctatacttgatgggatcccttcaagacaaagaactcccaaaataaacatgatgctggcaaacctgtacaagaaggctggtcgggagcgcccttcagtcaccagctataaggaggtgctgaggcagtgcccattagcccttgatgccattctaggcttgttgtccctttctgtaaaaggggcagaggtggcatccatgacaatgaatgtgatccaaaccgtgcctaacttggactggctctctgtgtggatcaaagcgtatgcttttgtgcacactggtgacaactcaagagcaatcagtaccatctgttcactagagaaaaaatccttattgcgagataacgtggacctattgggaagcttggcagatctgtacttcagagctggagacaataaaaactctgtcctcaagtttgaacaggcacagatgttggatccttatctgataaaaggaatggatgtatatggctacctactggcacgagaagggcggctagaggatgttgagaaccttggatgccgccttttcaatatctctgatcagcatgcagaaccgtgggtggtttctggctgtcacagcttctatagcaaacgctactcccgggccctctatttaggagccaaggccattcagctgaacagtaatagtgttcaagctctgctacttaagggagcagcacttaggaacatgggcagagtccaagaagcaataatccactttcgggaggccatacggctcgcaccttgtcgcttagattgttatgaaggtcttatcgaatgttacttagcctccaacagtattcgagaagcaatggtaatggctaacaacgtttacaaaactctgggagcaaatgcacagacccttacccttttagccaccgtttgtcttgaagacccagtgacacaggagaaagccaaaacattattagataaagccctgacccaaaggccagattacattaaggctgtggtgaaaaaagcagaactacttagcagagaacagaaatatgaagatggaattgctttgctgaggaacgcactggctaatcagagtgactgtgtcctgcatcggatcctaggagatttccttgtagctgtcaatgagtatcaggaggcaatggaccagtatagtatagcactaaggtaggcactagcctcccttgggggaaggccactgaggagggtagaggaggcagtgagctgtgtcacaggagttatggaaacacacacacactttgtgtccatggttgaaagcagaataataatagtaatggtagaagagttatttgtgaattcatgacttctaaaaattttttcttaaaatatattaacaacattagagaactgtttcactcataaccatcccacaccactataacatctgtgttcatttgtatagctcatcttctgtccttgcccacacacacatatttttatagggctgtacctagtatatattttatattcttctttttcaaatcaaagtattgtaagtactttcccatgtttctatctactgtagtcattaagaacttgaggtctgaagttttgaatactaccttcaccacctgtgatcttgggcaagttactaacacatttccttgtctatatctagctaccttattagatattaaatgatcgaatgagggttaaatgattatttcatgtaaagctcttagctctgtgcctgctacatatttata

SEQ ID NO: 75216 - DNA, 322 bp, Homo sapiens
aatgagatgggccctcagggttaacaggagccacagcaagggttggcctggtggtttatgttggtctgtggggcaagagctgcccgaatgcccctctggggcacctagccccatacagctgagggttcctagcctgagatggaagctgttttccacccaactggtctttctgtcttatacgtgcggcgagatggcatggatctgtttttatcaaatacacaattaaaaagtcacactattaggaaactctgcagtgtgaacatatgggcttctcccaagacttagaatttttcagagccactcggagtgttgggggtcacgg

SEQ ID NO: 75217 - DNA, 516 bp, Homo sapiens
aaaaatgacattcaaaattcataattttttgtgtactataagttctttattataagcacacattagtgctagattataatgtgtcacctgtttagaatggcattgtgaatttagaattctgatcataaatatgaatttttaaaataataatttatgtcactgccattaatgaaggttatgctctctgtatcaacaaagcttgggcattttcaagtatcacttccaaagagtccttggataattagtaaatgtccttctttgtaaatcatcattggcagcaaaatggagaaaagttaaaactgaaacttcaggtggaccggtagcactgtcgtacaaggtggaccattggctttgttgcacagattggatatatgagaatgttctaaaatgtttaggagtaccattataccacttttgtgatgcccgtgccgtaggttgcctctgcagaattggtttacatttagatgtgatgcagcatcttttttcctccctatatccactcaaaatgtaaataat

SEQ ID NO: 75218 - DNA, 650 bp, Homo sapiens
ctagttataaaatcaaacaaataaatgaagaaaaaaacaggagccaagagttcccaagaaagtaagtaattaggcagaacctatccgctatacatcagataaagattctaaccactagagtttaaaatatttggatttaattcatgaaaaacaatgaaaatcctttcctttcccttagagctacatttattgtgcaatcattgtgcttcagggcttcatttagtttttatgcattgtatttaaattatgtgctacttaaatttgtggcatatgtagtttaaattttgttttgaaaagttaattggtgattattgcaaggactgcagttttctgacccaaaaggtctatttttctctcttcctcctccccaccccaaaaataaaaaataaaaaaagccttcaattttttttagttatcagattgctgagtgttcagggaaactgaacactgtcccacaagacaaattattcctttaaagtattcgagataatctttgctagtgatttgtttagggtcagtcatgtgtcccagttctagccaatttaaggggaagtactgagagttatgggaaagagagatccataatgagaagtgaccctttctttctgcctttgacccctagaatggtgacagccaacttctagtcagga

SEQ ID NO: 75219 - DNA, 572 bp, Homo sapiens
ttttttttggcaataaaaaaattcccaaactaccattttttaacctttatatacttttttcttttgtcacctttttcctgcagtatctgataccgtacttttactataccttttctatatttaggtatgtttagatacacaaatacttaccattgtgttagaattgactataatattcagcacagtaatatgctaacaccatgtagtacatggtttagtcagaggctacaccatatagcctaggcatatagaaggctacacaatctaggtttgtgtaactatactctatggtgtttgcacaatgatgaagtcacctaacaacacatttctcagaacgtatccctgacattaagcatcacatgtctgtatttcagagaggtccctaatatctcagtatacacactcacataacagctgaggaagggaaaagggaactttttagaatacacgaaactagcttaaagactcgacataagccgggtatggtggcacacgcctgtagtgtcagctacttgggagctaaagcaggagaatcacttgaacacgggaggcggaggttgcagtgagccgag

SEQ ID NO: 75220 - DNA, 143 bp, Homo sapiens
tatcatttgtggtgttctatagtgttgctcaccagtgtttctggttgttttcccttctggatacatggctgaatcgtattccccttctcttaatactattgcattgggggttattaaattttggggggatgacccatggggga

SEQ ID NO: 75221 - DNA, 336 bp, Homo sapiens
tggggccaagaaaatatataatatgattagccaataagcaaagtaacttgaattgacacttaacaatcattgtttttatctttgtagtaagttaataacttgatatttctaataattggtcttcttagttgtagatgttggcaaatggttctgggtaaagaattgccagtaaggcaacacattctcagaaaacatctgagcccaagatttctccaagcctcgttaattcattgagcattttaaaaatgccttctgttagccagacactgtgctagattctggtatggaaagaagagcaaaacaaaaattcctgccttagagagctcatattcaggg

SEQ ID NO: 75222 - DNA, 458 bp, Homo sapiens
aacatgtaactaataatgtaattgccactctaaattgtcatgattaaatgagattataccttgccactccaattgtcacgattaaatgaggttaccgtgatttgatgataatttcatgtgtgttaccctaattttctaaaaaggattgcaaacttcctggcgaaatccatgtctaatatttagcacaatgataggtactaagtagataataaacactgattcatttatttcgacacaatgttgtagaaaaaaaggactagactggaaaagaagaaacaaggcttattttttcccctagatagccaccaaaaatctgtgatcttgaaaaagtccctgacctttctaggttttaatgtcctcactgataaaaatagagcaagtctaaatttgtaagatttgtatacgtagcaagtcaagtcatctatgagaactaaataggtgacagtttacatacaggg

SEQ ID NO: 75223 - DNA, 466 bp, Homo sapiens
aaggtagttcaagactgtgaatggtaggattgggggagggaagattaaatcaaagttaggaatttagaattgaaacaatctgtgtctattagttttgtataatgattggattattaatagtgcagaacattagtagctgcttggtcattgctttatacattgaaatacaagaagacagtaaggtaaagatccaaaattagaaaatgaagtgatcttggccaggcacggtggctcacgcctttcatcccagcactttgggaggctgatgcagcagaatcacccaggagtttgagatcagcctgggcaaagtagtgagaccttgtatctactaaaaataaataaatacaaataaaataaattagctgggtgtggtgctgcatgcctgtggtctcagccagttgggaggctgaggtgggagctgtccgggaagtcgaggctgcagtgagcgttgattgtgccacagcat

SEQ ID NO: 75224 - DNA, 258 bp, Homo sapiens
atacccattaaataataacttcccattttctgcctgcccctaaccccttcctaatttctgtttcataaatttgactactgaaagaagcaaatgcctggaggaggaagactgtggttttctgattctatcgctgacttagaaaagccagaagtttggggcctgggatctgattattccccagtaattcacaggtgtaatgtgggtgtggagtccaggccatatggctgatgggaagtggggaatgtctgcatcccacca

SEQ ID NO: 75225 - DNA, 381 bp, Homo sapiens
atataaaagttatgttggctgggtttggtggcttacaccgataattccagcactgtaggaggctgaggcaggaggattgcttgagcctaggagtttgagatcagcctgggcaagatggcaagactatatttctacaataaattttttaaaaaattagttgggtgtgaccatatctctacaaaaaaattttcaaaaattaggcatgtgcttatattcccagctacttgggaggttgagacatgaagataccttgagcctaggagtttgaggtggcagtgagctatgattccaccactgaactccagcctgggtgacgaagtgagaccttgtctcttaaaaaaaagttacactatactgtggtctattaagtgtgcaattgca

SEQ ID NO: 75226 - DNA, 449 bp, Homo sapiens
agctgagatgattgcagagtcataaactcttaagtctatttgccactggacatttgcagagatgatcatatttacttccctcctcccaccactcttcctctcagtttcctttttactttatttttttctccctttcctggtaaaagtattagtatgtttaacatagtgttaggtggcagataggctgggaagagctagtattgtaaaggaacactgatgtgtactggagcctactagctctcaatccattgccccagacttggggagagagagcacattctctatccagagaaataagaatatgcagtttatggttgtcctgtggacattaactgactgtgaaggtaaggtatatccaaaggcagtgatatgcaggtgatagattcaccaggagatgatatgtgacttttcttgtattttaaagctctgcttcttttttagaaaaaaaa

SEQ ID NO: 75227 - DNA, 419 bp, Homo sapiens
ttttggctcctcctgcttgggtttcccagccatcaatccacccatctggcacaggattgactcctggtggaacccaactcagtgatctgtgcagtgtggtgttttccaaactggccaaggtgtctgcagggccctcagaattttccaagcaagaaaagatttggctacttggagaaacttcatccttctggaggcatcacctccagaatctacttgaagtggatgacactgacttccatgaactgttttccttttgctgagggtgatggcttccaactccatccatgtccctgcagaggagatgatctcattcctttttatggctgtatagtattccatggttgtctgttcactctgatgatggttccgtttgctgtgtggaagctcttaagttggattaaattccagtcgtcaatttc

SEQ ID NO: 75228 - DNA, 479 bp, Homo sapiens
caatatagttaattttgttatgtatatattatcacaattaataaaatatcatttgtgtcttaaaaaaagtattacttgtattatctagacattaaaatagaatgagaatacttagtgtttattgaacaaagctaccctgacaactatagtaaaatgaagatgcaaaagagcataagggaagccattcatggggcatgtattggtgaaaagctgtgccctcaaatacttcactccttgcaattcctttttataggcatcacctccagaatctacttgaagtggatgacactgacttccatgaactgttttccttttgctgagggtgatggcttccaactccatccatgtccctgcagaggagatgatctcattcctttttatggctgtatagtattccatggttgtctgttcactctgatgatggttccgtttgctgtgtggaagctcttaagttggattaaattccagtcgtcaatttc

SEQ ID NO: 75229 - DNA, 226 bp, Homo sapiens
gtttatttctcattgatcatctctaatcttcacaagtgctccacaagtgagtttggaggtctgttttgtagctttcttgcatttacagcacatagtttagtagtgacacaaaataactgtttaagtaaatgttagtgctatcatcatcatcatcatcatcatccctgcagtggttcttttagaaaccacttcagaaaaagggagaggaggcactttttattatcag

SEQ ID NO: 75230 - DNA, 350 bp, Homo sapiens
tagcctcgacctcctgggctcaggcagtcctcctacgtcagcgtccacccaagtagctgaaactatgggcacacaccaccatgcctggctaatttttgtattttttagtaaagacgggatttcactgtgttacccaggctggtctcaaactcctgggctcaagcgatctacctacctcagcctcccaaagtgctgggattacaggcatgagccactgcaccaggcctggtacagtactattaattgagggagggaatgacacttccctaagtgtatcttcttgtattattttgacttctggtagcatatttgtgtcttacatatattaaaaaattcaattaggataagaa

SEQ ID NO: 75231 - DNA, 1263 bp, Homo sapiens
tcgagctcggtccccgatgagtaacctggctaattttgtatttttagtagagacggggtttctccatgttggtcaggctggtcttgaacgcctgacctcaggtgatctgcctgcctcggcctcccaaagtgctgggattacaggcatgagccatcacgcccggccaaagttttagaatttaagttattccaaaaaaaattttttttttcaaaaatacagactgcatccaattaaattctatgttaactggtaatgactaggtctaaaatgttaggtatttaccaataaatgacataaaataactcaacaacaaagggatttttttttttaagagatagggtctcactttatcactcaggtttggctgagggcagtggtgtgatcacagctcactgaagcctccaactcctgggctcaagtgatcctcccgcctcagtctaccagagtatattcttgaaagtaaaattacaaatgaaattcagcagtgttaaaaataagcccacttgcagacaattatcatttttcttcctttctttcctcactatctgtacttggcatatttcctacagtggctgtcttaaagaaaaaaaggaatccttcacaaatagtgtagccaaaaaagttggactaatatacaatgctatcagtaaagtattatatataaaatttataagtgctaaagtgtaattttgaaagacacttaagatactccttttttttttgagacagggtctcagccctgtcgcccaggctggagtgcactagcacaacatcagcccactgcactccagcctggtgacagtgagactctgtcacacacacacaaaaagataaagaatgacaaaatctgtgcctacattcagagtgacaagaatattaatgttctgcttgtagaaaagactattggttcagaatatgttaaatgcaataatattttgtataatatatataaattacatatgcataaaaagagtatctatattagaatcttttgagacagggtcttgctctgtcaaccatgagggagtgcagtggcactaccacagctcactgcagccttgacttcccgagctcaagccatcctctcgcctcagcctcccgaatagctgggactgcaggtggtgccaccaaggctggctaagtttttatatttttttatagaaacaagcttttgccacgttgcccaggctggtctcaaacttctcaaagctcaagcaatctggccgccttgaactcccaagtgcttgagttacaggcatgagt

SEQ ID NO: 75232 - DNA, 2105 bp, Homo sapiens
  misc_feature (1)..(5): n is a, c, g, or t
  misc_feature (595)..(595): n is a, c, g, or t
  misc_feature (610)..(610): n is a, c, g, or t
nnnnnttaattaacttttctctttgtgcttgcacacttgctttgctttgctttcaatctatagttattttatgggtggcttggcacctcaaccagatgggaattaagtggaaggcagaagttggcttgcacacacaacctctaaataaatgcaggcctgggaaggatgattcatgctttacctgtattctttcagctgcagtcagtgtttttccaatcttggtaggcaccagcatcacctggaaaattgttaaagcaaaacatgctttgacttgactccagacatactggggcttaaatctctgtatttatttgccaagtggttcaaaatttagtagttgggggaatgggatcaccaaccattatggtttgccaaggaacgaaggatttcctgagctgtgtgctaaagcctgaatacttctgagtaaattgagacatttagttaccctatttagggttgaagatgagggccaaaatagtgcatgcatctgtctgctttccatctttccatcctaattattctaaaaaaccatacaacccccacttttatgggtataaaatagttatgttacttatctatttttatttttgcatantttttagttattgcntggtttattacatataatgagagcaacaatctcataacattggttttagaattaaatgagataaaatatgtaaagcacttaatgtaatgcctgatactaagtgttcaatgaatgttacatattatttctctttaggtccaaaggtatttattttcttcttggcttcctggaatactaatctttggtaaaggaagtttctcactggtctcctaagccggcagtggtctgaggcatgccaccatttctttgagctgtgatgtgttatatcatcttcttccaagacaggccctcttagctagtgtgctaactggactttctctctctgactcaaaggggctgtgcctcagaagctttgtggaggtagaaaggcttatccacacttcccatgataggagagggattctacccaccttctttctggattcttctatggactgtaatgatttcttcctcagtagtgtctattcccagacccagcaactgctttttgaaatttgcttgcagacatcaaccctgcaactctctatctagttctcagcacttcaacttaaggctaatattagaccaagacccacttcctctagaaataaatccttttctcccccatactttcttggtcaaataaggttacagacttatttggcacttacttaagtagttttttttttcatccttaggatggttctcaatttgttgactgatgaaatcataaaacgtaacgtaaccctctaggtagcagaggatgtgctttgtaacatcatccagcactccttgttgcattatcctacagtctcagtaatctgcattgtctcacagatcaagccatttgctcattcagtctgttctgtgccaaacatattgataacacatacactgaaggactgctggcattgcccctccccagaataagcaaacaagtcatctttaaaagcaagttgtttcagccactttgatagaaattaagtcgcatacaaggtcacaaagtacatcagtgaactaactggaaacacaacccaacaaggcccactcccaagcctgagcactttactggatcacgcttccttcctcggtgaaaggcttcccacggcaggaagaaccggagagcaagcctctaaattatacatgactgtttgtctcattttcactccgtggctaattgaagacacaggggagtgctgcttttttggcttcatctctcatcgcatctcatttgtctcacacgtgtcggggagtgcactctgcaggttagctttatgaagggttgaatggaatttggtgagctttgaggagtcccaggattacaagttctttgtcttggttcacaacaagctgtgcagtccccttttgtttgtttcctcatttgccattttaaaataaagtaaatacctaatgctagatgacgagttagtgggtgcagtgcaccagcatggcacatgtatacatatgtaactaacctgcacaatgtgcacatgtaccctaaaacttaaagtataat

SEQ ID NO: 75233 - DNA, 571 bp, Homo sapiens
gtctgatttaaagaatatttatgaaaaaaatccaatctattttcttgagtttctaaagcaatctaatagctagctgagaagacctgttttataagtaagcattgtaattagtatgtaaagtgtatgcaatagtattgctaaaagttctctaaaatagtatgttttcttaaggaggctaaacatctgtcctacaattttagttattctaccaatttgcttagcaaactatttttaccacaaagaatgaattggttcagctctgttaacaatatattatttttcaattaggtccagatacatgagcttttactccccttattgccagtttctaaagatgcaaacaaatatggaatggaatggtacttttttgctattcaaaatataaccaagaggataaaatttgtgttatcattgatgtctccactgatacaatttaaaaagaaaaaaaaaaagctacaagaacaattgtaggaattcagtaggcctaagtaaacaccactattttgtacattgcttgttcaatttattcttaaatttcacaatctggaaagcaatcctaattacacacaaa

SEQ ID NO: 75234 - DNA, 696 bp, Homo sapiens
gggccacaaagtatccagggtgctggggcaccaagtcaggaaatgctctcaaaaggctcgggggagaaatgctgtgtgtctgcaatgtttctgtaaggttgagagattgtttttccaggaaaaagcaacatcatcctcatcccagccctgtgctgttactcccactccacaggcaggcgagtggaaccacaggtgcttcccgtcctggtcacaaagtcagagtggctgggccaagtgtcctgagaagagtcacctcctgggatcccatcagcctggccatagcagaacacccagacaggggcccatccccgaggctcaactcaacgcatgcagccactgtagaaaagtctggaaagtagttcttcaaccgactagacatggtgagcccaaaacccagccatgacactcctaggcatctgccccagaggaatgaaagcatccatcccctgcaaactcatccttacacagcagcgtgactcaagacggccaaaggcggaaacaccccaaacgtccatcagtggacaaacgggcagatgcaatgcactgtctgtaccgtgggatgtcactcagccatatgaaggaaagactccagtggcgaatgagccctggaaccacggtgctgcgtgatcccgtaacacatggccagaacagacacggcccggaacctgaggccgggaggatgcgtgcaggtggcgg

SEQ ID NO: 75235 - DNA, 625 bp, Homo sapiens
gcacgctggggagatggtccctgcgggaagactccgaggcagtctcctgcagctccttccggcgaatccggttcaggaagtaaaaccagccctgtgtagaggcaggcgagtggaaccacaggtgcttcccgtcctggtcacaaagtcagagtggctgggccaagtgtcctgagaagagtcacctcctgggatcccatcagcctggccatagcagaacacccagacaggggcccatccccgaggctcaactcaacgcatgcagccactgtagaaaagtctggaaagtagttcttcaaccgactagacatggtgagcccaaaacccagccatgacactcctaggcatctgccccagaggaatgaaagcatccatcccctgcaaactcatccttacacagcagcgtgactcaagacggccaaaggcggaaacaccccaaacgtccatcagtggacaaacgggcagatgcaatgcactgtctgtaccgtgggatgtcactcagccatatgaaggaaagactccagtggcgaatgagccctggaaccacggtgctgcgtgatcccgtaacacatggccagaacagacacggcccggaacctgaggccgggaggatgcgtgcaggtggcgg

SEQ ID NO: 75236 - DNA, 676 bp, Homo sapiens
gcaacggggaactgaacgctgcatgaagtacatctccaagttgttctttaagaaggcttagggtccctggaagaccctcgcccacacccagcgtggagcgttgttgctcacgtggccacacctctcgggatggccgtgggtctccgtgatgggcaggcgagtggaaccacaggtgcttcccgtcctggtcacaaagtcagagtggctgggccaagtgtcctgagaagagtcacctcctgggatcccatcagcctggccatagcagaacacccagacaggggcccatccccgaggctcaactcaacgcatgcagccactgtagaaaagtctggaaagtagttcttcaaccgactagacatggtgagcccaaaacccagccatgacactcctaggcatctgccccagaggaatgaaagcatccatcccctgcaaactcatccttacacagcagcgtgactcaagacggccaaaggcggaaacaccccaaacgtccatcagtggacaaacgggcagatgcaatgcactgtctgtaccgtgggatgtcactcagccatatgaaggaaagactccagtggcgaatgagccctggaaccacggtgctgcgtgatcccgtaacacatggccagaacagacacggcccggaacctgaggccgggaggatgcgtgcaggtggcgg

SEQ ID NO: 75237 - DNA, 575 bp, Homo sapiens
gaggatggaagttagagaagcagcaagaaaaaggaagaaagggctgattgtgcaggcactgtctgcacagctgccatgtgcccacgtgggatgcgtgcggggcggggcggcgatgcccccggggactgatggtggaagggctggtctgctgcctgctctgtgcgtcgatgccatgtgacagctcccccccatggcccagcctatgtgatctctctgccctgcactgagtctgcactgcattcacggtgccagcatttcagtcagtgcaccacatgtgcctgtctatgggcccggcagccacgtgcagggcgggtggtgaaggaatgaagactgcctcagctcgggggagcctgggcatttatgaaatttacctggcctagattttctcttaggtccgtttcctgttctatgagtagtaaagtttaaattcaggttgagatcatcagtgtggtctaatgaaatatatatgtatatataaaactttattatgccatatgtgcacatctactttcataacattttgtattttatagaacacaaaataaatactactgaattactcaaaaattaaaaaa

SEQ ID NO: 75238 - DNA, 3986 bp, Homo sapiens
atggacttggcaccttattttacttctgagccgctctctgctgtccagaaacttggtggacctgtagtactgcattgttctgctcaacctgtgaccactcgtatctcatggctgcataacggaaaaacattggatggaaacctggaacatattaagattcatcaggggactctgacaattctttctctcaactcctctcttttgggttactaccagtgccttgccaacaatagcatcggtgccattgtgagtggccctgcgacagtatctgtggcagttcttggtgattttggttcatccacaaagcatgttattacagcagaagaaaaaagtgctggtttcattggctgcagggtaccggagagtaaccccaaagctgaggtgcgctataaaatccggggaaaatggctggaacattccacagagaattacttaatccttccatcaggaaatcttcagattttgaatgtatccttagaggacaagggatcatacaaatgtgcagcttataatcctgtcacacatcaattaaaagttgaacctattggccgaaagctccttgtgagtcgtccttcttcagatgatgttcacattcttcaccccacccattcacaggcattagctgttctttctcgtagccctgtaaccttggagtgtgtggtgagtggggtcccggctcctcaagtgtattggctaaaggacgggcaggacattgcaccaggaagcaactggagaaggttgtattctcatcttgccactgatagcgttgacccggcggactccggaaactattcctgcatggcgggaaacaagtctggagatgtagaatatgtgacttacatggttaatgtacttgaacatgcttccatttctaaaggactacaggatcagatagtgtctctgggtgccacagtacactttacctgcgacgttcatgggaacccagcccccaactgtacctggtttcacaatgcacagcctattcatccttctgcacgacatctaactgcaggaaacggactgaaaatcagtggggttactgtggaagatgttgggatgtatcagtgtgtagcagataatgggattggatttatgcactctactggaagacttgaaattgaaaatgacggtggattcaagccagttataattacggcaccagtaagtgcaaaggttgcagacggagactttgttactctgtcctgcaatgccagtgggctgccggttccggtcattcgttggtatgacagccatggattgataaccagccatccatctcaagtcctgagatcgaaatcccgaaaatcacagttatcaagacctgagggcttgaacctggagcctgtgtacttcgtcctgtcccaagctggtgcaagctctctccatattcaggctgtgactcaggaacatgcggggaaatacatctgcgaagctgcaaatgaacatggtaccacacaggcagaagcatctctcatggttgttccttttgaaacaaatacaaaagcagagacagtcacacttcctgatgctgctcagaatgatgacagaagtaagagagatggttcagaaactgggttactgagctcatttccggtgaaggtccatcccagtgcagtggaatcagcaccagagaaaaacgccagcggcatctctgttcctgatgcccccatcatactgagccccccacagacccacacaccagacacgtacaacctggtgtggagggcaggcaaggatggtgggctgcccatcaatgcttactttgtgaagtatcgaaagctggatgatggggttggcatgctgggaagctggcacacggttcgagtcccaggaagtgaaaatgagctccatttagctgagctggagccatctagtctttatgaagtcttgatggtagcaagaagcgcagcaggtgaaggccaacctgccatgattaccttccgaaccagcaaagaaaaaacagcgtcatcaaaaaacacccaggcatcctctccacccgtgggcatccctaagtatcccgttgtttcagaggctgcaaacaacaattttggagtggtacttacagattcctctaggcacagtggagttccagaggcaccagatcggcctaccatctccactgcatcagagacatcagtctatgtcacttggattcctcgggcaaacgggggttctccaatcactgccttcaaagtcgaatataaacggatgaggaccagcaattggctggtggcagctgaagacatccctccttccaaactttcagtggaagttcgtagtttagaaccaggttcaacatacaaatttagggtcattgccatcaaccattatggtgagagttttcggagttcagcatctcgtccttatcaagtggttgggttccccaatcgcttttccagccgtccaataactggacctcacattgcatacacagaggctgtcagcgatactcagatcatgctaaagtggacgtacattccatcaagtaacaataacactcccattcaaggattttatatctattaccgaccaacagatagtgacaatgacagtgattacaagagggatgttgtagaaggttcaaagcagtggcacatgattggccacctgcagccagaaacctcctatgacattaaaatgcaatgcttcaatgaaggaggagaaagtgaatttagcaatgtgatgatctgcgagactaaagtgaaacgtgttcctggagcttctgaatatcctgtcaaagacttgagtacccctccaaattctttgggaagtggaggaaatgtggggcctgcaaccagccctgccagaagcagtgacatgttatatctgatcgttggctgtgtgctgggcgtcatggtcctcattctgatggttttcattgcaatgtgcctgtggaagaatcgccagcagaataccatacaaaaatatgacccaccaggatatctctaccaaggatcagatatgaacgggcagatggtggactacaccactctctcaggagcaagtcagataaatggaaatgttcacggaggcttcctaaccaatggcggtctcagcagtggctattcccaccttcaccataaggtccccaatgcagtcaatggaattgtgaatgggagcctaaatggagggctttactccgggcacagcaactctctaaccaggacacacgtggattttgaacatcctcatcatctagtgaatggtggtggaatgtacacggccgtgcctcagattgaccctctggagtgtgttaactgccgaaattgtcgaaacaacaataggtgtttcaccaaaaccaacagcactttcagcagcagccctcctcctgtggtccctgtggtagcaccttatcctcaggatggtttggaaatgaagcccctcagtcacgtgaaggtgcctgtatgcctgacttccgcagtccctgattgtggccagttgccggaggagagcgtcaaggacaatgtggaaccagtccctactcagcgtacctgctgtcaggacattgtaaatgacgtcagctctgatggctcagaagatccagcagagttcagcagaggagacagctgtgcccattcagaaacagagatcaacattgtaagttggaatgctcttattttgccacctgtccccgagggctgtgctgagaagacaatgtggtctccacctggcattcctttagacagcccgacagaggtccttcagcagccccgggaaacctgaggacatgcaaacaaccagtcatgttccaacttcaagccggtaactgcacacaacaggcctgggagcgaactgtgtgaaggaccttaattcaaatcagagaaaatcattatttatttttttgtagtagtaatgtcatatgaatgtatcttaaaacgtgtgcccttttatattatttatgccttaaatgttttcttccccattccttcctccccctcggtaggaaacaaccttgttttgcatagtattcagtcacctggagggca

SEQ ID NO: 75239 - DNA, 434 bp, Homo sapiens
ccagtactctgatagtttcagcttgcccaatatattcattctcttttgagtaatttctccctaggtgatttttcttcccgttaacagaatcataattaactcagagttcacagctatctctacactctatggaaaataatagcagtaactttattaaagcatgtcttacaagtaggctttaagtgaacattttaaaaatgtttttattttagtctatttgtagtttcgtaggggttttatctgtaagaccttctcagcaagaagattgtcctttttagtgtcttactgtgtgcgtgtgtgcgtgtgtgcgtatgtgcatgtgtgcatgcgtgtgtgcgtatgtgcatgtgtgcgtgcgtgtgtgtgtgtgcgtgtgtgtcttttttgttctcttttaacagaatatgacccaccaggatatctctaccaaggat

SEQ ID NO: 75240 - DNA, 473 bp, Homo sapiens
ccaactggtatcacatgaaattcttccctgactgccaagaaagggaaaatgaatggaggctataacatataatgtattttgagcccactagatttgaagggaagtgactaaacttttcccttcatttatttacctttgtctagtacagaaatacgtaggaaaacatggcagtgaagtttttggaatacagttaaatctaatgcagaactctcattcactcctttgtgaatatgggtcagtgatattcacaatgacgttgctctgggagttggttagaatatactgtgtgcccatttatggttgacatggctcatgtgtatttgtgattatttggctactggtctgtgagtaccttcagcattccttcttcttttctttttctctgacactccttcctgtccagggtggtggaatgtacacggccgtgcctcagattgaccctctggagtgtgttaactgccgaaattgtcgaa

SEQ ID NO: 75241 - DNA, 594 bp, Homo sapiens
tgtagttcaacaaaaaacaacatgtttatatacatttggaaactgcaatgataggaaacatttggaagaaagggattttgccctagaataacacataaggaaagcagagaattagagtatattgttactgaatgttccagagacttctagtgattttaacacttattaagtatagcatgttgatggggagatttgtttctctaaagatcactttgttttattaaatcctaatagaaaatacccttgaaaatcctatctcatttattcctgtaacaaatttattgagcacctacctactatatgccaagaaatgtattagccatcaggcaggagagctgttcaaatggtagatatgatctgtgctcctgtgaaacttctagtggggagagccaaacaataaacaatattcctttttaactctaggttaatgcagaaatgggataaagcccatgttgcttttggggagaggtgagttgtgtctctggaatcacatggcatttcatagggggggaaaaatgccccaaatactaaggagtagctcttagcctatgtccgttcgcctcagcttaagttgttttccctcccactggctgg

SEQ ID NO: 75242 - DNA, 501 bp, Homo sapiens
aattctggcatttgtggatatgaaataaatgccaaattgactaaggtgttgtggatgctgaaacaaagcctaattaaatagtatgaaacactgtaggtaatgtgcagctgttgtgaggttagggaaggcagccttttcagaatttttattaagagaaggaaggattagaattaagcattactaaggactcagattttacgaaaacttgttttttaaaaaatgtacatatgaagcttaaagtgtcttttacagaaaaaaggaatggcatccaaaatgggattgaaatggctttgaacgttttccttgaatgcaacatcagatccttttcgggactgaagaggaagggaggcattgggaaagaagtgaagtggggatcagtgaggcaggacttaggaagctcactggaagagtggaggcacctgtgtctctgcctctgggtctcatcttcaccccagctgagacttgcagtggaaagtatttttgaaaataagctttaattta

SEQ ID NO: 75243 - DNA, 858 bp, Homo sapiens
accagaataaagaatagcaattgattacaaaacattaaataaaataaaaatacatgaattcatactgatataaatgaatatatagactggggagactaagaaggaataatgaaatataaccacttagtaaccatcatactaataactctttctagtgagaatcatcaatgggtattaaaactattatgtaaaggtttaataagaaataaaatatttacataatctgaaagtatctcccaataaggcacttagtaatttaaaaaggaaaaacagtatatttaccattgagaaaactaaaatataccacttttaccaagatataaaagttaacctttccagaaatgttcacagcagcctcattcttaatagtcaaaagtgaaaacaacccaaatgtctattaattgacaaatagatttttaaaatatggtatattgagataatggaatattattcagtcataacaaaaacaatgaagcactgatatatggtataatacagacgaactctggaaaaaaaaaatcacaataagtgaaagaagccacacacaggaggccatgtttgtacaattccatacatacaaaatatccagattagacaaatccatagagagagagaaattaaattagtggttgccagaagatggagatagagagaatagacaggtatggggtttcttttggggctgatggaaatattctggaactagtggtaatagttgcacaatattatgaatatactgaaaaccactaaattgtactgttttaaatgatcaaaattaagaagtttatgttatgacttttatctcaataaaaaaggttttttcacaaaaatttaacttcaccagccatgggagaagaa

SEQ ID NO: 75244 - DNA, 815 bp, Homo sapiens
ggaaaggggctgatctagaagtctatggaatgtattagttctccacggtgactgcctctgtgaatctgccgctaagggtctgagggtgggcttgccatcactgctggtcagcagggtcggggagagctagatacagagcagggaagatggaggacaaactggaagctgctggcccctctgtgtctggccacccctcactgcttctaaccaatgatgaccttcagagtgtaacggctgctgcttcccatgagcctccctggtcttgcacaacctcattttggggcaactctaacctaggaacatacaggaaaaggaggtctgagaaatgtggttcccagcataaccaagttgtcaacagaataatccggtagatgtagtctctgtactcaaagaacaggaaaaaagagcagagaggccaaaagagggtactggggcagttttgctgtgtgatgagtgatgtcatccctcccttcatatctccacctcatcttcaataaaatccacagcccttggccatactgtttaagttggatttatttcttccactttcctcccttcctcctccctccatcccttcctcctcccatcctctccccctctcttccttccctcccttctcccttctagatgtcctgggtctggtctgaacttggcacggggaagaacaaggcctgcaaaggtggtccaaacacatacagtttccactttactgaaaggagacatgggtttccaatgttgagaaatcataatctagccaaccctcttttttatgttaacttcgtctcctttctatgaatgaggcaatgcagaagtac

SEQ ID NO: 75245 - DNA, 1176 bp, Homo sapiens
gtgctgttttgcttttttataaaacatcaaataattattgtttttatttagcaactggtgtgtcatttgtaacatagacctttaaataaaaacttaattaaaacttggtaaggtagcatggaaaatgacaattggttatttccttttttctcttagtttattctttggtactataaatacagtcaagtagccaaggcagcaggcttagcgttattttgacacattgatttttcaaattaatgagtagcgtaagcagttgtaagtcaaatataagtggacttaattctctctatatattaaaatatatataaattgttttctttctatttaaaagacacatttttaattttaggtaaagaatagattgaataaaatgttttttaaaataaatgattatgaatttaataaaaattacatggtttttgtttcataaaactcaagaatttttaaagtatttaatttcaaatgaagttgtaaaacaagattaatggtaataccattgatcttagaaaatacaaatgaacagtgaagaaggacacataacttgtagaacccagcttggaaacagattagccaatttatgaattatagcgtggcataagatttccttgttggaaccagtcattaaagtaaatgaaagtatttctgaatttcattaactgcatttggctttctttcaccacttacccacttcacagctggaaaatccttttaacccgtatttcttatgaaatagtagcattattcaagtactcagtgcttggttaatcctaatgtttgcaccaaataaaatacagcattatgttatgaatctttattctcccctcttcatttagctagaacatttataagttcgagattaagtttcaataagctgatagttggccggacgcagtggctcacacctgtaatcccagcactttgggaggctcaggcgggtggatcgcctgaagtgaggagttcgagaccagcctggccaacatggtgaaaccccatctctactaaaagtacaaaaattagccgggtgtagtgggtgtgcgcctgtagtcccagctacttgggaggctgaggcaaaaaaattgcttgaaccgggaggtggaggttgcagtgggccgaaaccgtacctctgtactctagcctggcaacagagtgagactttatctcaaaaaaaaaaaa

SEQ ID NO: 75246 - DNA, 369 bp, Homo sapiens
gagtagattttaagtactttcactgcaaataaataaatatgtgaggtaaacaaaatgaaacaaagagtactccaaagcctggactaagtagcattggagatcaaaagatgtaaatgattgtttgaagaattaataaagtaggattttgttgatggttgagggagagaggaagcagaagaaaagtcgggaggggatattactttgctttctgtgccattttcatgataaggaacatgaaggaggccaggcacggtggctcacgcctgtaatcccagcactttgggaggctgaggcaggcggatcacctgagctcaggagttcgagaccaccctgagcaacacggtaaaatcccatctccactaaaatacc

SEQ ID NO: 75247 - DNA, 607 bp, Homo sapiens
catgtttgagggaaaaagggtccatagctttgatcagattcttaaagggattgctgaccccaaaaaaggtcacaaatccccaattttgatggattttgtgtcccttcaaaacatatttaatctgtctctccacccccttttccccttgctccaaatgcctgaaaggtttaacatttaaacactacttttttccctaatgtatcccacatttatctttatatgccactttttagtaatttggataaattgtcttttttaagaagttaaatgaaaattcccttcattagttcttcgatggacttggtgatatctgtacgaccacagggtttagaataaagtcgcttgtaaaaagtattattttatgccacatagccatgatctctgaatgtattttttgtgactttctgattgtaaaccattaacatatacgaaacaagacattctgtttagttaagaacgttagctttctgaggtcaaggatctgtttctctgttgttggtaactgctatccaacagtcccggaacataataggtgcggaatgaaaataggtgcagagcaaatgaaaaggccttcagtgtttaaagaaaataaacctaatttttaaaa

SEQ ID NO: 75248 - DNA, 366 bp, Homo sapiens
gttttagatatagatcttattatgtcacccaggctgcagtacagtggtgtgatcatagctcacttgcaacctcaaactcctgggctcaagccatcctcccacttcaatctcccgagtagctaggcatgcaccaccccacctagctaacttttaaaaaaatgtctgtagagacagtgtctcatcatgtctcaaattcctggcctcaagtgatcctcctcctttggcttcccaaagtgctaggattaagggtgtgaatcattggacccagactggtttttttcttaattgaaaatgcaactatatgaaataattataaaactattgttgagcttataaaatataaagatgtgacgtagataactataa

SEQ ID NO: 75249 - DNA, 582 bp, Homo sapiens
gtgtgtactagtgcacataataaactcaaaagcaaagatggctagaaaatgatggttattatgtattggctgacttatttgacactcttaattatttgtcctgtggggtcatggttaagggtgaggtgctcagtcttactgtctgagtttcaatcacggctcagcctctccccagatctgaggtccagagcgagtcacagaaccctgtaaacttcaggctccttatttgaaaaatggccgtgacaaaagtagttccatgtaggatgttaaacgtgttgcttggcacatggttagttattggtaaaggctataaattagtttaaattaaaaaatttattataagtcaatgtatttaaattaatttacagctatttaacaatagctaattagcacagcattataattgcagtaccagagaaaaacaacatgaaggaatacaagtatttattccctacattgctaaaataccaacactgattatcaatattttctatggaaaggtattcagaatgcctaacattttaaaattcagctaaaatattagacatttcaaataaaaagtaaatattagaagcattaagt

SEQ ID NO: 75250 - DNA, 1049 bp, Homo sapiens
ggcgcgcgagagccaccgggggggacctggaggagcagcagcacgcggagggaagcccggagccaggactccagcagccccgaccccggaatctttcaccgtccacttcctgccgctcaattctgctcagactctccaccacaagagctgctacaacggccgattccagctcctctatgtggcctgtggtatggtccatcttctcatccctgagcttggggcctgtgtggcacccggagggaacttgattgtggaattagcccggtacctggtggacgtgcggcaggagcagctgcagggattcaacacccgggtcagggagctagctcaggcagctggatttgctccacagaccggggccaggccttcagagaccttcgcacgtttctgcaagtcccaggaatcagctctgggcaacactgtcccagctgtggaacccggaactccgccccttgacatcctggcccagcctcttgaagccagcaacccagcccttgagggcctgacccagcctctgcagggtgggaccccacactgtgagccctgccagctgccctctgagtctccaggttcactctcagaggttctggctcagcctcagggggccttggctccgcccaactgtgagtcagactccaaaactggagtctgacccaacccctagacaccccttatctccaacttccaaagtcaggttgtaggatgagaacccgctgataccattctaagtccgctgctagagtcctcaattttattctaatcattcccactcagtacccgccacccccaccccgggagtgttggtagactttcaaattccatttctgagattctatggtctattcctagaattctagattgttctctcagaattccaaattccacttctgaggctctaagcccagcctaggatctgacactgagtctcaggcccttgactttggcccccttgttcccaggcaccctgtggctgactaggggctggggtgtctcctcaccagggcctggtcagcacccagatggttcaagtaaagcaagttgtgtccacc

SEQ ID NO: 75251 - DNA, 683 bp, Homo sapiens
tgggggtgtcttgaggtcccctccaccgtcgtctccgaatccccctccatgatccttccttgctccatctcaccctggcagaaaaaatctaagatctccgcctcgagaaaattgcagctgaagactctgctgctgcagattgcaaagcaagagctggagcgagaggcggaggagcggcgcggagagaaggggcgcgctctgagcacccgctgccagccgctggagttggccgggctgggcttcgcggagctgcaggacttgtgccgacagctccacgcccgtgtggacaaggtggatgaagagagatacgacatagaggcaaaagtcaccaagaacatcacggagattgcagatctgactcagaagatctttgaccttcgaggcaagtttaagcggcccaccctgcggagagtgaggatctctgcagatgccatgatgcaggcgctgctgggggcccgggctaaggagtccctggacctgcgggcccacctcaagcaggtgaagaaggaggacaccgagaaggaaaaccgggaggtgggagactggcgcaagaacatcgatgcactgagtggaatggagggccgcaagaaaaagtttgagagctgagccttcctgcctactgcccctgccctgaggagggccctgaggaataaagcttctctctgagctgaaaaaaaaaaatg

SEQ ID NO: 75252 - DNA, 538 bp, Homo sapiens
agaggtgaggctggagcatatgaggagggggattcagttccaggattagaagcctagactgggagcctaagccgggaagagactggtaaggcctcggtactggaagacgagataaggagaataaaaaaggagtgtaggatggaggagttgggtgtgcgggaaatggaaggagaagtacccaccccctcgtttgcccccagattgcagatctgactcagaagatctttgaccttcgaggcaagtttaagcggcccaccctgcggagagtgaggatctctgcagatgccatgatgcaggcgctgctgggggcccgggctaaggagtccctggacctgcgggcccacctcaagcaggtgaagaaggaggacaccgagaaggaaaaccgggaggtgggagactggcgcaagaacatcgatgcactgagtggaatggagggccgcaagaaaaagtttgagagctgagccttcctgcctactgcccctgccctgaggagggccctgaggaataaagcttctctctgagctgaaaaaaaaaaatg

SEQ ID NO: 75253 - DNA, 1378 bp, Homo sapiens
ggcgcgcgagagccaccgggggggacctggaggagcagcagcacgcggagggaagcccggagccaggactccagcagccccgaccccggaatctttcaccgtccacttcctgccgctcaattctgctcagactctccaccacaagagctgctacaacggccgattccagctcctctatgtggcctgtggtatggtccatcttctcatccctgagcttggggcctgtgtggcacccggagggaacttgattgtggaattagcccggtacctggtggacgtgcggcaggagcagctgcagggattcaacacccgggtcagggagctagctcaggcagctggatttgctccacagaccggggccaggccttcagagaccttcgcacgtttctgcaagtcccaggaatcagctctgggcaacactgtcccagctgtggaacccggaactccgccccttgacatcctggcccagcctcttgaagccagcaacccagcccttgagggcctgacccagcctctgcagggtgggatgtcctcggggagtctcaagcagcccggaggagactgacggtccctgggaccctgaaggtcacccgggcggccccctcactgaccctccaaacgcccctgtcctcgccctgcctcctgccattcccggcctgagtctcagcatggcggatgggagcagcgatgcggctagggaacctcgccctgcaccagccccaatcagacgccgctcctccaactaccgcgcttatgccacggagccgcacgccaagaaaaaatctaagatctccgcctcgagaaaattgcagctgaagactctgctgctgcagattgcaaagcaagagctggagcgagaggcggaggagcggcgcggagagaaggggcgcgctctgagcacccgctgccagccgctggagttggccgggctgggcttcgcggagctgcaggacttgtgccgacagctccacgcccgtgtggacaaggtggatgaagagagatacgacatagaggcaaaagtcaccaagaacatcacggagattgcagatctgactcagaagatctttgaccttcgaggcaagtttaagcggcccaccctgcggagagtgaggatctctgcagatgccatgatgcaggcgctgctgggggcccgggctaaggagtccctggacctgcgggcccacctcaagcaggtgaagaaggaggacaccgagaaggaaaaccgggaggtgggagactggcgcaagaacatcgatgcactgagtggaatggagggccgcaagaaaaagtttgagagctgagccttcctgcctactgcccctgccctgaggagggccctgaggaataaagcttctctctgagctgaaaaaaaaaaatg

SEQ ID NO: 75254 - DNA, 1227 bp, Homo sapiens
  misc_feature (1)..(1): n is a, c, g, or t
ntcgttgggtgactgactctcttgttaaccgcgcacagtatggtccatcttctcatccctgagcttggggcctgtgtggcacccggagggaacttgattgtggaattagcccggtacctggtggacgtgcggcaggagcagctgcagggattcaacacccgggtcagggagctagctcaggcagctggatttgctccacagaccggggccaggccttcagagaccttcgcacgtttctgcaagtcccaggaatcagctctgggcaacactgtcccagctgtggaacccggaactccgccccttgacatcctggcccagcctcttgaagccagcaacccagcccttgagggcctgacccagcctctgcagggtgggatgtcctcggggagtctcaagcagcccggaggagactgacggtccctgggaccctgaaggtcacccgggcggccccctcactgaccctccaaacgcccctgtcctcgccctgcctcctgccattcccggcctgagtctcagcatggcggatgggagcagcgatgcggctagggaacctcgccctgcaccagccccaatcagacgccgctcctccaactaccgcgcttatgccacggagccgcacgccaagaaaaaatctaagatctccgcctcgagaaaattgcagctgaagactctgctgctgcagattgcaaagcaagagctggagcgagaggcggaggagcggcgcggagagaaggggcgcgctctgagcacccgctgccagccgctggagttggccgggctgggcttcgcggagctgcaggacttgtgccgacagctccacgcccgtgtggacaaggtggatgaagagagatacgacatagaggcaaaagtcaccaagaacatcacggagattgcagatctgactcagaagatctttgaccttcgaggcaagtttaagcggcccaccctgcggagagtgaggatctctgcagatgccatgatgcaggcgctgctgggggcccgggctaaggagtccctggacctgcgggcccacctcaagcaggtgaagaaggaggacaccgagaaggaaaaccgggaggtgggagactggcgcaagaacatcgatgcactgagtggaatggagggccgcaagaaaaagtttgagagctgagccttcctgcctactgcccctgccctgaggagggccctgaggaataaagcttctctctgagctgaaaaaaaaaaatg

SEQ ID NO: 75255 - DNA, 898 bp, Homo sapiens
  misc_feature (1)..(1): n is a, c, g, or t
ntcgttgggtgactgactctcttgttaaccgcgcacagtatggtccatcttctcatccctgagcttggggcctgtgtggcacccggagggaacttgattgtggaattagcccggtacctggtggacgtgcggcaggagcagctgcagggattcaacacccgggtcagggagctagctcaggcagctggatttgctccacagaccggggccaggccttcagagaccttcgcacgtttctgcaagtcccaggaatcagctctgggcaacactgtcccagctgtggaacccggaactccgccccttgacatcctggcccagcctcttgaagccagcaacccagcccttgagggcctgacccagcctctgcagggtgggaccccacactgtgagccctgccagctgccctctgagtctccaggttcactctcagaggttctggctcagcctcagggggccttggctccgcccaactgtgagtcagactccaaaactggagtctgacccaacccctagacaccccttatctccaacttccaaagtcaggttgtaggatgagaacccgctgataccattctaagtccgctgctagagtcctcaattttattctaatcattcccactcagtacccgccacccccaccccgggagtgttggtagactttcaaattccatttctgagattctatggtctattcctagaattctagattgttctctcagaattccaaattccacttctgaggctctaagcccagcctaggatctgacactgagtctcaggcccttgactttggcccccttgttcccaggcaccctgtggctgactaggggctggggtgtctcctcaccagggcctggtcagcacccagatggttcaagtaaagcaagttgtgtccacc

SEQ ID NO: 75256 - DNA, 727 bp, Homo sapiens
ggcgcgcgagagccaccgggggggacctggaggagcagcagcacgcggagggaagcccggagccaggactccagcagccccgaccccggaatctttcaccgtccacttcctgccgctcaattctgctcagactctccaccacaagagctgctacaacggccgattccagctcctctatgtggcctgtgggacccagactccagttttgccacccctcctccctcattgtctgggatcccagagccccatcctccctccggatttggagctgaatctcagcctgtcctccgtcctctctgcagttatggtccatcttctcatccctgagcttggggcctgtgtggcacccggagggaacttgattgtggaattagcccggtacctggtggacgtgcggcaggagcagctgcagggattcaacacccgggtcagggagctagctcaggcagctggatttgctccacagaccggggccaggccttcagagaccttcgcacgtttctgcaagtcccaggaatcagctctgggcaacactgtcccagctgtggaacccggaactccgccccttgacatcctggcccagcctcttgaagccagcaacccagcccttgagggcctgacccagcctctgcagggtgggacctgtggctgactaggggctggggtgtctcctcaccagggcctggtcagcacccagatggttcaagtaaagcaagttgtgtccacc

SEQ ID NO: 75257 - DNA, 681 bp, Homo sapiens
ggcgcgcgagagccaccgggggggacctggaggagcagcagcacgcggagggaagcccggagccaggactccagcagccccgaccccggaatctttcaccgtccacttcctgccgctcaattctgctcagactctccaccacaagagctgctacaacggccgattccagctcctctatgtggcctgtgggacccagactccagttttgccacccctcctccctcattgtctgggatcccagagccccatcctccctccggatttggagctgaatctcagcctgtcctccgtcctctctgcagttatggtccatcttctcatccctgagcttggggcctgtgtggcacccggagggaacttgattgtggaattagcccggtacctggtggacgtgcggcaggagcagctgcagggattcaacacccgggagtgttggtagactttcaaattccatttctgagattctatggtctattcctagaattctagattgttctctcagaattccaaattccacttctgaggctctaagcccagcctaggatctgacactgagtctcaggcccttgactttggcccccttgttcccaggcaccctgtggctgactaggggctggggtgtctcctcaccagggcctggtcagcacccagatggttcaagtaaagcaagttgtgtccacc

SEQ ID NO: 75258 - DNA, 700 bp, Homo sapiens
gagtactgctcggggtgggacggggccttggaacagtggagaccaaactggagggtttagaagggcagaggcggttccccacgcctggtctttatcctgaagccccgggtgggctgcgcttccctcccacccctctgcagactctgctgctgcagattgcaaagcaagagctggagcgagaggcggaggagcggcgcggagagaaggggcgcgctctgagcacccgctgccagccgctggagttggccgggctgggcttcgcggagctgcaggacttgtgccgacagctccacgcccgtgtggacaaggtggatgaagagagatacgacatagaggcaaaagtcaccaagaacatcacggagattgcagatctgactcagaagatctttgaccttcgaggcaagtttaagcggcccaccctgcggagagtgaggatctctgcagatgccatgatgcaggcgctgctgggggcccgggctaaggagtccctggacctgcgggcccacctcaagcaggtgaagaaggaggacaccgagaaggaaaaccgggaggtgggagactggcgcaagaacatcgatgcactgagtggaatggagggccgcaagaaaaagtttgagagctgagccttcctgcctactgcccctgccctgaggagggccctgaggaataaagcttctctctgagctgaaaaaaaaaaatg

SEQ ID NO: 75259 - DNA, 1492 bp, Homo sapiens
ggcgcgcgagagccaccgggggggacctggaggagcagcagcacgcggagggaagcccggagccaggactccagcagccccgaccccggaatctttcaccgtccacttcctgccgctcaattctgctcagactctccaccacaagagctgctacaacggccgattccagctcctctatgtggcctgtgggacccagactccagttttgccacccctcctccctcattgtctgggatcccagagccccatcctccctccggatttggagctgaatctcagcctgtcctccgtcctctctgcagttatggtccatcttctcatccctgagcttggggcctgtgtggcacccggagggaacttgattgtggaattagcccggtacctggtggacgtgcggcaggagcagctgcagggattcaacacccgggtcagggagctagctcaggcagctggatttgctccacagaccggggccaggccttcagagaccttcgcacgtttctgcaagtcccaggaatcagctctgggcaacactgtcccagctgtggaacccggaactccgccccttgacatcctggcccagcctcttgaagccagcaacccagcccttgagggcctgacccagcctctgcagggtgggatgtcctcggggagtctcaagcagcccggaggagactgacggtccctgggaccctgaaggtcacccgggcggccccctcactgaccctccaaacgcccctgtcctcgccctgcctcctgccattcccggcctgagtctcagcatggcggatgggagcagcgatgcggctagggaacctcgccctgcaccagccccaatcagacgccgctcctccaactaccgcgcttatgccacggagccgcacgccaagaaaaaatctaagatctccgcctcgagaaaattgcagctgaagactctgctgctgcagattgcaaagcaagagctggagcgagaggcggaggagcggcgcggagagaaggggcgcgctctgagcacccgctgccagccgctggagttggccgggctgggcttcgcggagctgcaggacttgtgccgacagctccacgcccgtgtggacaaggtggatgaagagagatacgacatagaggcaaaagtcaccaagaacatcacggagattgcagatctgactcagaagatctttgaccttcgaggcaagtttaagcggcccaccctgcggagagtgaggatctctgcagatgccatgatgcaggcgctgctgggggcccgggctaaggagtccctggacctgcgggcccacctcaagcaggtgaagaaggaggacaccgagaaggaaaaccgggaggtgggagactggcgcaagaacatcgatgcactgagtggaatggagggccgcaagaaaaagtttgagagctgagccttcctgcctactgcccctgccctgaggagggccctgaggaataaagcttctctctgagctgaaaaaaaaaaatg

SEQ ID NO: 75260 - DNA, 990 bp, Homo sapiens
tcccttctttccccaggacccagactccagttttgccacccctcctccctcattgtctgggatcccagagccccatcctccctccggatttggagctgaatctcagcctgtcctccgtcctctctgcagttatggtccatcttctcatccctgagcttggggcctgtgtggcacccggagggaacttgattgtggaattagcccggtacctggtggacgtgcggcaggagcagctgcagggattcaacacccgggtcagggagctagctcaggcagctggatttgctccacagaccggggccaggccttcagagaccttcgcacgtttctgcaagtcccaggaatcagctctgggcaacactgtcccagctgtggaacccggaactccgccccttgacatcctggcccagcctcttgaagccagcaacccagcccttgagggcctgacccagcctctgcagggtgggaccccacactgtgagccctgccagctgccctctgagtctccaggttcactctcagaggttctggctcagcctcagggggccttggctccgcccaactgtgagtcagactccaaaactggagtctgacccaacccctagacaccccttatctccaacttccaaagtcaggttgtaggatgagaacccgctgataccattctaagtccgctgctagagtcctcaattttattctaatcattcccactcagtacccgccacccccaccccgggagtgttggtagactttcaaattccatttctgagattctatggtctattcctagaattctagattgttctctcagaattccaaattccacttctgaggctctaagcccagcctaggatctgacactgagtctcaggcccttgactttggcccccttgttcccaggcaccctgtggctgactaggggctggggtgtctcctcaccagggcctggtcagcacccagatggttcaagtaaagcaagttgtgtccacc

SEQ ID NO: 75261 - DNA, 612 bp, Homo sapiens
ggcgcgcgagagccaccgggggggacctggaggagcagcagcacgcggagggaagcccggagccaggactccagcagccccgaccccggaatctttcaccgtccacttcctgccgctcaattctgctcagactctccaccacaagagctgctacaacggccgattccagctcctctatgtggcctgtgggacccagactccagttttgccacccctcctccctcattgtctgggatcccagagccccatcctccctccggatttggagctgaatctcagcctgtcctccgtcctctctgcagtagtcctcaattttattctaatcattcccactcagtacccgccacccccaccccgggagtgttggtagactttcaaattccatttctgagattctatggtctattcctagaattctagattgttctctcagaattccaaattccacttctgaggctctaagcccagcctaggatctgacactgagtctcaggcccttgactttggcccccttgttcccaggcaccctgtggctgactaggggctggggtgtctcctcaccagggcctggtcagcacccagatggttcaagtaaagcaagttgtgtccacc

SEQ ID NO: 75262 - DNA, 1117 bp, Homo sapiens
aggctcccgtgggtcaaatccctgtggcttctttatatatttctcaaatggagggtgattatatatgtgatggactaaaccaggacacttttgagaatgaacatgggtgctattggtaatcacaccgagacacagcaacgtccgggaccaactcaaccctcagtccgctcatggggcacaggtttcctggtccttccctaccctgacttctcttcttctgatgtttggtggtctgcatccttttaaaccactgtgctcccagaactgattcccatatgtgtctgccatactggaaaataccaaataggcaaggagatcgtttcaatactgtctgctgaacaccttaatagaggcaagagagaacgcagaggaagaaacaatggactctttctgagagagtggaagatggcttcgcagaggagctgctgtctgagacggatagcatgagtaggagtttccccaggcagggaaggtgttgttgtttctcctcagggtagaggggagagcagggttccccgtgtgtctgttgctgaatgtgactcatgctgttttcctgctttgagcctgctctagggtgttatgggcaggatggacttgtcctgcgtgcttgttgttccgccgtgtttctgatcttcagatttatcgtaaggaagaacagccgatgtacaggcagaacttgacaaatgaggcaacaagcaacttgatctgggatccatcgtcctctagaccccagtaggagtctaagcaccagcgtggtggccaccccagcagccttggacccctgaagccttgagcaccaaagcacacacagcctcctctggctgagttctgtggtcgcctgcaccccctccacctgcttcccccggaggatggatcatgaagagtggaattgcttttcctcttggggcaggcacaccaacagtgtatgtgaggcccctgctcccactccccaggctggccagtactttgggccaatctgctagacccaaaaatgttaatctcactgagatttaatttgcattcccctgactaccggtgaagttgagcatcttttcatatgtttattgacaatttgcatttcttattcagtaaattacctgctcgtatcctagaaaaa

SEQ ID NO: 75263 - DNA, 544 bp, Homo sapiens
cctggctactggtgctataacttgtgtatgctgctctaagggatgaagaaaagacatgacacttaaacaaacccaaaataaatatcaagggcagcacctgggtctttgacatctccctaatggcagaaatcttccctgttgtcaaatttacacactctcataaaccatacattgcacacaccaccaccaccaccacctccgcctccaccacaactgccaccaccattttatccagctcatcattggcagaaaagagggaaatttatggataatttggaaagtaagaaagaatgataggccttattttatcacaatgtaggcatcgtgtttttctgctttggaaatgggaagtatataagttaggaattctttactattacagcaaaaataatgcaagacaaaaatgtaattaagcatgaaaggaatttatgtattagaagactattggatagttctcatcatctctaggaggcccagaagttggaaacctcctcccaaatcctgctgcgaaactgtcccacaaattggcatcaccaccaccgct

SEQ ID NO: 75264 - DNA, 570 bp, Homo sapiens
tggcactccccagtgagatgaacccagtacctcagttggaaatgcaaaaatcacccgtcttctgcatcgctcacgctgggagctgtagactggagctgttcctattcggccatcttggctccactgctgaattcgcatatagtacttttaaatgagaaataaatagccatgaataaacaattctgtcatacaaaagggggaagaaacttttttgtaatttgactttgcagaaaataaaaccccagtgtcagagcctgtcactgtgatctagttctaggaaggtattctgggtttattttccattcttgtctcttggtgaatactgtatttcaaccactatgccttctttgctctctaaatgtaccctgtaatttctgtctctctactctagctcaggggtctctgagctctggatctgtatgtgtatctgtcaatgaacatctatatctggatatcttccaggcacctctggtctaaaacacctaaagcctaactctttaatgtccccatttctactttaatctttatccaggttcctgcgccatcatataactagttgcttaagacaaa

SEQ ID NO: 75265 - DNA, 414 bp, Homo sapiens
aatcatagcttactgtggcctcgatgtcctgagctcaggcgatcctctccttatagcctccagagtagctgggactataggtgcgtgccaccacaccctgctaattttatgttttgaagagaccgggtctcactttgttgcccaggctggtgtcagactcctgggctcaagctaaatcacccaccttggcttcccaaagtgtcgggattacaggtgtgagccactgcgcccagctctgatttttgtatttcttacttaaggcgacatacttagtagctgtgcgtcttggggcagatacctcccaaagccccagttctgtcatctataaataatgtaacaacagggccccgctcgcagggttgctgtgtgcacatatgtgtgtgtacgtacccatgtgcctgtacgagaagggct

SEQ ID NO: 75266 - DNA, 342 bp, Homo sapiens
ctttttccagctgttttcccatgagtgccctctgttccgtcaggtggccgaagacggataactttggcaaagggcttggcacaaatggccaagtttacactggatcactatactccgtgttatcttgtttccccgatggtcattgccacacaagaaagtacttcctctgtgggctttgcccaccctcttctcttgacagagacctctgggcctagataaatgtataaactgcattgcaggaatgaagccgtttccattaagaactggggtctatgtcctgggatccagttcttctcccccttttagtactgaaagctgcttcccatctgaaagctgtctggg

SEQ ID NO: 75267 - DNA, 980 bp, Homo sapiens
  misc_feature (1)..(1): n is a, c, g, or t
  misc_feature (10)..(11): n is a, c, g, or t
ntgaccaagnntgtgcagttctagcaatagaattttgcacaataatgaaggtaaagaatgataaacatctcaagaacatctataaggaggcttatcgcattggtactcttttccacctaaccaaacacaagacagatgaaatggaagataaaatagcagaagtgagaagaaagttcaagggtagagaagaattcctgaaaaaactcactcaaggtgaagtggctgctggaatggtgcttcagaaaaaactatattccatttacgaagtccaggcacttgagcggaaagagcttataaaaaatagagcaatatgtgccatgtcactggcagaactacaggaacctctgcttcaactagaagatgaagctgaaagaatcagaagtctcaacaaagaacattctgttatgcttaataatataattgatcagaaagatcttattagaagaaaggtgggaaaagtaaagaaaaaattacgaaaaaaggggaagaaaacccttgatgcattaatagaaactgagagtaaacgctcagcaatttttaaagacctagaagcaactaaaagtaagacaatgattttttatgcaaaaataaatgaattgaatgaggaattaaaagcaaaagaagaagaaaagaaaagttttgatcagacacttgaaatattaaagaacaaatttataactatgagatttaaaagggaacatgcacaaactgtgtttgatcattatatgcaagagaaaaaagactgtgaagagagaatctttgaggaagatcagagatttagagtgctccttgctgtaagacaaaaaactcttcaagatacccaaaaaataatagctgattcacttgaagaaaatctgcgtttagctcaagagtatcaacagctacagattacattcttaaaagaaaaggacaattatttcaatatatatgataaacagctatcacttgatacttcaattagagataagaaacaggtattg

SEQ ID NO: 75268 - DNA, 431 bp, Homo sapiens
gaaaacctccttaactaagcaacttagtgctactagaaaatagtggtatcctaaaccagatttctaacaagaaaaatgaacaacagtcttttgatcattataaaccaggatcttcagaaaccttgctaggagaagttaatgaaaatagagtatcaatagcattgaaaaaaacctctgaaatccttcacgatattgactgtcttctatcaaactctaaaaagtgaaaaatggaattattacaacatattattaaagtttaaggatgttgtttcaagtgactggtataaaattactagtaagccaagatattgtacgtattaccccggcacaatgattgtgaaagaactgacatttaactttgaaggtatttttaacttgtacatttttaaaatatgtatttatatcttaataataaatatttcgaagttttg

SEQ ID NO: 75269 - DNA, 1076 bp, Homo sapiens
  misc_feature (17)..(17): n is a, c, g, or t
actttctttaagccatnactatcgtatatgctgctggaaaatggtacctgggataaatgatagcaatatactgcctttggttttgaaagagtcactcatacccagtgtgggaagatttcttgcctactctgatgacaaagtacatgctatctttttagatggcattactctaaccctaaattggaatttcagctctcctattgagaagagacaggtaaatcaaggtcttaacttaggttggtgtaagttaacttttcctgatggacaagagcagttaattcagattgaacaccctgaaccatatgaaagatatgtgacaacagtaacatcatggtgcaggagactgacccagactagtcccagagagatgcccactcattcgtcatcttctgttctccaagaaaattggtctgttgcttctgaacttgaaaagatacagaagtttaacttgctactagaaaatagtggtatcctaaaccagatttctaacaagaaaaatgaacaacagtcttttgatcattataaaccaggatcttcagaaaccttgctaggagaagttaatgaaaatagagtatcaatagcattgaaaaaaacctctgaaatccttcacgatattgactgtcttctatcaaactctaaaaagtgaaaaatggaattattacaacatattattaaagtttaaggatgttgtttcaagtgactggtataaaattactagtaagccaagatattgtacgtattaccccggcacaatgattgtgaaagaactgacatttaactttgaaggtatttttaacttgtacatttttaaaatatgtatttatatcttaataataaatatttcgaagttttgcaaaaaaaacacaaaaaaaaaaaaaaaaaaaaaaaaagagaggccgagcacaaacataagagagtatacccagagggggccaccaaattaggggcacaccccacttgcgttcacacagtgggcccacaagggggagcccatttaaacgccagacatggccgcacgtacacgcccccccccccggcgcaccaggccccccccgcgccccctcggcgggacgcat

SEQ ID NO: 75270 - DNA, 853 bp, Homo sapiens
  misc_feature (17)..(17): n is a, c, g, or t
actttctttaagccatnactatcgtatatgctgctggaaaatggtacctgggataaatgatagcaatatactgcctttggttttgaaagagtcactcatacccagtgtgggaagatttcttgcctactctgatgacaaagtacatgctatctttttagatggcattactctaaccctaaattggaatttcagctctcctattgagaagagacaggtaaatcaaggtcttaacttaggttggtgtaagttaacttttcctgatggacaagagcagttaattcagattgaacaccctgaaccatatgaaagatatgtgacaacagtaacatcatggtgcaggagactgacccagactagtcccagagagatgcccactcattcgtcatcttctgttctccaagaaaattggtctgttgcttctgaacttgaaaagatacagaagtttaacttgctactagaaaatagtggtatcctaaaccagatttctaacaagaaaaatgaacaacagtcttttgatcattataaaccaggatcttcagaaaccttgctaggagaagttaatgaaaatagagtatcaatagcattgaaaaaaacctctgaaatccttcacgatattgactgtcttctatcaaactctaaaaagtgaaaaatggaattattacaacatattattaaagtttaaggatgttgtttcaagtgactggtataaaattactagtaagccaagatattgtacgtattaccccggcacaatgattgtgaaagaactgacatttaactttgaaggtatttttaacttgtacatttttaaaatatgtatttatatcttaataataaatatttcgaagttttg

SEQ ID NO: 75271 - DNA, 440 bp, Homo sapiens
tttaacttaactaagcaatacttttgcatggttccaaattcaaattgtgcacagtggaatagacaatgaccagccttcctcccacctcttttctctggccaccacattttctttcctggaggaaataggtgttatctgattctttttcatctttccagagatatattatgcaatcaaaagcataatgaagctatttttgctgtctaaaaatattttcagttttttgggggtaaaaattaatatattaatatgttctagtattcttctgatatttgcagtgactgtatttgtcccagtaatgtggttcctctctttatttctgtaggtaaattgctagaatgagatgttggactgttttttaaaattaaaaatacatgaaagaacatagtggccagatttagcaagtatgaataaagaataccaagtggaatttgaattga

SEQ ID NO: 75272 - DNA, 1097 bp, Homo sapiens
tgtaactttcaaagtttttaacgtaattaaactttatggcttcttcatttcctgcatgtcccccttacgaaggacgtttctgccacaagatagtagaaattgctctgtattatatatagatatctatatacataaatgtacattcatatattcatacctaaatatctatgtatagacatatatgttggtagatatgtatatgcatctatatatctataccggtgtatatcttttataaatctatatatctgtctctattcccatatcttccaatgagtaattgaataaacccattaggcatatactctttgagttaccagcttaacctaatcttgattgagagagttagtgatctgtttaatcttccagctttgaaagatatgaacaagttttacatacctctggttcttacctctgcagtttgaagttaactcaaaattctgctcattgcaatcatgtgtcagttctgcctacactagatttctttttcttttttattgattaatgctttccccttgaattctgattaacttcaagaactggggaagtggaaaattgacaaataaaatccagaatgatttcttttcaagtaactcttagttgattgagacatatagtatgattattccacatacttccaagctcagatttaatcatagttttcaaatattttgtaaaaatgaatctttaaggcggtcattaatatgaagtggcctgagtctttgtattggtcaattgatttgtattgtttttggtaaaacatcctggtggtcactttatgaacttccagagtaatagaaaaaggatgatttacggccaggcacggtggctcacgcctgtaatcccagcactttgggaagccgaggtggacggatcacttgaggtcaggagatccagatcagcctggccaacatggtgaaaccccgtctctcctaaaaaaatacaaaaattagccaggtgtggtggcatatgtctctaatcccagctacttgggaggctgaggccagagaatcggttgaacctgggcggtataggttgcagtgagctgagatcatgccactgcactccagcctgggcaacagagtgagactccatct

SEQ ID NO: 75273 - DNA, 409 bp, Homo sapiens
gcgatacagattgcctctgttgccaggagaaaacattcccacagcagtgtgaaaaaagaaaagttaattcaggccagggtgggaacagcagagacggggatgcacaagaatgaggggagacaggacagactgagtccaggatgataatacttgccctgtcggcctcatggggtttgagggagtctgtaacgcatcccacagacacaagcgagaaagtggatgggagactctccacggccaagttgaggcatgagtcagctccgtgttccctggagcagctataattggccctgtcgaaagcaccctcagccatgtgatgaagggattccagcacgaaggagaatctggtggccagacagtccagcctccttgcgacaggccagcccgcccagggcactacccggcaccg

SEQ ID NO: 75274 - DNA, 260 bp, Homo sapiens
taagggcataatagttaccagcattagagtatccatggtggaatttactaaatatttaaaaaattcttaagatttagtgaagaccaggtcagggaaaggagagcgcagcctgacctggcaggagcgcaccctggaggctttgctgtcagtctccatgcctggctttcagcaaagtgctccttccaagaaaggctttgagctccctccagaggttggtaatagtacacattttgaatgaaaaaatcttgacagttacagtg

SEQ ID NO: 75275 - DNA, 564 bp, Homo sapiens
cggggcatgacgggcacctcggctggcacgtactccaccctccggggctcggggcctgaggagcagaaggtggccctgggcagatgctctgcgtgcgggaggctgcgctttcagtcattatttggatttcgttttccacatgaaaatatttagagatccagctcttggaagccaaggagaaactggcttttaagtaccatggctactgtgacgtatcctgactaatgccgacagcacagggagcctttgcctgccggaggaagcggtgaggaagaggtggtgcgtcgtgcacttcctgttgctgttttaggacagcttggacgtagtttgttccagggaagtgctgctgaaccaggtaaacccagcccccccatctccaggagcagaggctgcaaggacaggaagacaatgaggcaatggtgtgctgggggaatcgtgctaaagtgaaagcatccttcgatcatttttaagtcattctaggatcttcagggcatcaaagttttgcctgtgagcctcaattggtctaatacaaaaatacagactgtggttaatcatctgagcttt

SEQ ID NO: 75276 - DNA, 2008 bp, Homo sapiens
tgaggaaacgtgtgacaagatactcctagagaacagctcttaattttctgcaggttctttttgagaaactggcgatagagacctacttgctgaatgtctctcccggggggctgacctacattgccgagtggcgaggggggattctggaccacaagatggggcacctggcctgtttctccgggggcatgatcgcccttggcgccgaggatgccaaggaagaaaagagggcccactaccgagagctcgcagcccagatcaccaagacgtgtcacgagtcatacgcccgctcagacaccaaacttgggcctgaggccttctggtttaactccggcagagaggccgtggccacccagctgagcgagagctactacatcctccggccagaggtggtggagagctacatgtacctgtggcgacagacccacaaccccatctacagggagtggggctgggaggtggtgctggccttggagaaatactgtcggacagaagccggtttctctgggatccaagacgtgtacagtagcacccccaaccacgacaacaagcagcagagcttctttctagcggagacactaaagtatctctatcttctgttctctgaagatgacttgctctccctggaagactgggtgttcaacaccgaggcccacccactcccggtgaaccactcagacagctccggcagagcctggggcagacactgaccccatctcctgccgccgccctggggccgccgcagggatgccttgccttttcaggatttgagactgttctcaaagggattgggaacgaaggccccatctcgggcagacccccagcagatgtgtcggacaagcaacttcttttcctctgtgaggagacaagacttggagactcagcgatgtcaggccagggccatggccacactggcccacacattcctttctacagagaatttctatgaagcccactcacttgccattccagggccaaaggaccggaggtttgcatatccgccccttgtatttgatttgcttccttttggtttcttggtttttgtttttgcttgattttgtcttttctctacagtttagttttgtcacaattacacatatagttttcaaaatcatgcactttctaaaatggtgtcatcctgaaaaacaaaacccagtgtttgcacacacacaaaatcttgaccccgttatctatattttaaatgctttttgcccaacactgaccctatgttcaactttgtgtcatttaccttataatttgaggaggggtttccctttgggcctcagtgttacaaattactagtgctattttcattattattgtaatggaaaaatctgtggactagaataaaagagtttattgaataagaaatatgattgggctcattgcacatcagtgactcctagaaaaaccattgcaatgttaccatcagaaataataatcagccagcagttgatttaaggtataatttagtaaacgattccaacttctattacctcccctgaaatcggtcctgatatattcgagaagcatgaggccagcccttcagatgcagttgtttatttatactcaggtttagattgggaagaggcccagggaggagcagcaacttgcctgaggtcacacagcccaaaaaaggcaaaggagagtctcgcccctgccgtctcctggccaccccagttgagtgtccgtctgttccatcattcagcagatgcttggtgagtgcctgcaacggaccagacactgggctagaggccagggacaccgctgagagtgagacagtcataagccctgcagtcaaggggtcaagaggggagaaagcgatggtaagggaaactgacaagtaagtgaagtgactgcaggtcataggaaatgctacaaaggagatagatagacagctgaggacctaccctacggggtcagggagggcctctctgggcaggtgaccttcaagccaagacccagaagataaaaaggagcagccgaaagactatctggcagaagaatgaac

SEQ ID NO: 75277 - DNA, 2512 bp, Homo sapiens
tagcaattaccttactaaagaaacattttttaaggatagaaatagtgtattaaagcacccagcacggcctttgaaatcataaatagtggctacagaggtggttataattatggccatatgacaagaatgacagaaaattgcctcaaaaccaaacagtgacaatgacagaacccaggctccctcaggccctccttcctcagctccctctgtgggagtaggtgcattcctgggcaatcttccctccatctctacctcagctgttcccaaactctcgaagtttgttctgggaggtgttaaaagcagttttctaagacaaagggtcccaaggagaagcctcatttcacattagcatattaaaggatctgataaatcctgcagatgggagacttattttgtttaaccctcggttccccagatgtgttgaaacccgaaaccctcttggctgaggtctggctaacctcttgcagagctattgcctcaaagtacacagttgtggaaccccgcccaaaccttcacctacccagactgctgagtagctcatttggactctcagagtccaaagctgctcacatttccagtccccgagggtcttgttctgtccagcccaggccaagagggaagctgtgcatctgcccggtgcagccttacacagcagtccaggcaggggcaccccacacccacacacccctgacatcaccctggccgcgggttcaaggcaactgacatctctcctggatcccgaaaagcaggaggtgggaggtctgacctgggccctctgcttggctgtttccccagacaccaaacttgggcctgaggccttctggtttaactccggcagagaggccgtggccacccagctgagcgagagctactacatcctccggccagaggtggtggagagctacatgtacctgtggcgacagacccacaaccccatctacagggagtggggctgggaggtggtgctggccttggagaaatactgtcggacagaagccggtttctctgggatccaagacgtgtacagtagcacccccaaccacgacaacaagcagcagagcttctttctagcggagacactaaagtatctctatcttctgttctctgaagatgacttgctctccctggaagactgggtgttcaacaccgaggcccacccactcccggtgaaccactcagacagctccggcagagcctggggcagacactgaccccatctcctgccgccgccctggggccgccgcagggatgccttgccttttcaggatttgagactgttctcaaagggattgggaacgaaggccccatctcgggcagacccccagcagatgtgtcggacaagcaacttcttttcctctgtgaggagacaagacttggagactcagcgatgtcaggccagggccatggccacactggcccacacattcctttctacagagaatttctatgaagcccactcacttgccattccagggccaaaggaccggaggtttgcatatccgccccttgtatttgatttgcttccttttggtttcttggtttttgtttttgcttgattttgtcttttctctacagtttagttttgtcacaattacacatatagttttcaaaatcatgcactttctaaaatggtgtcatcctgaaaaacaaaacccagtgtttgcacacacacaaaatcttgaccccgttatctatattttaaatgctttttgcccaacactgaccctatgttcaactttgtgtcatttaccttataatttgaggaggggtttccctttgggcctcagtgttacaaattactagtgctattttcattattattgtaatggaaaaatctgtggactagaataaaagagtttattgaataagaaatatgattgggctcattgcacatcagtgactcctagaaaaaccattgcaatgttaccatcagaaataataatcagccagcagttgatttaaggtataatttagtaaacgattccaacttctattacctcccctgaaatcggtcctgatatattcgagaagcatgaggccagcccttcagatgcagttgtttatttatactcaggtttagattgggaagaggcccagggaggagcagcaacttgcctgaggtcacacagcccaaaaaaggcaaaggagagtctcgcccctgccgtctcctggccaccccagttgagtgtccgtctgttccatcattcagcagatgcttggtgagtgcctgcaacggaccagacactgggctagaggccagggacaccgctgagagtgagacagtcataagccctgcagtcaaggggtcaagaggggagaaagcgatggtaagggaaactgacaagtaagtgaagtgactgcaggtcataggaaatgctacaaaggagatagatagacagctgaggacctaccctacggggtcagggagggcctctctgggcaggtgaccttcaagccaagacccagaagataaaaaggagcagccgaaagactatctggcagaagaatgaac

SEQ ID NO: 75278 - DNA, 2143 bp, Homo sapiens
aaggcgcgggccccggcgcggcggggagggctcggccggaggggaggctgcggcgcgcggccggtcgctgcgggcccgggccccaagccgtgccgctccgctcgcccgggcccagccgaggccgctgcgcccccgcctcctcgcgggaggactcgctccaaactccctgaacttcggggacagtcccccgaagcggcgaaactctcagggttggcaaccctgcccagggacccccatcccgggcggcgctccggacgccctcccctcaccgcgcccccgcagacacgtgcctggactccgagggcttctggagccaccggccgggccacgatgctcatgaggaaagtgcccggcttcgtcccggcctccccgtgggggctgcggctgccgcagaagttcctcttcctcctcttcctctcgggcctggtcaccctgtgcttcggggccctcttcctgctgccccactcctctcgcctcaagcgcctcttcctggccccccggacccagcagcctggtctggaagtggtggctgaaatcgccggccatgccccggcccgcgagcaggagccgcctcccaacccggcccccgccgcgccggccccgggcgaggatgaccccagcagctgggccagtccccgccgcaggaaaggggggctgcggcgcacccgccccactggaccccgcgaggaggccacggcggcccggggcaatagcatcccggcctccaggcccggggacgagggcgtccctttccgctttgacttcaacgcattccggagccgtctccgccacccggtcctgggaacgagggccgatgagagtcaggagccccagagccaagtgcgagcccagcgggagaaaatcaaggagatgatgcagtttgcttggcagagctataagcgttatgcaatggggaaaaacgaactccgtccactaacaaaagatggctacgagggtaacatgttcggaggcctcagcggggcaacagtcattgactccctcgataccctctacctcatggagctgaaggaggagttccaggaggccaaggcctgggtgggagagagcttccacctgaacgtgagcggagaagcatccttgtttgaggtgaacatccgctacatcgggggactcctctcagccttctacctgacaggagaagaggtgttccgaataaaggccatcaggctgggagagaagctcctgccggcgttcaacacccccacgggaatcccaaagggcgtggtgagcttcaaaagtgggaactggggctgggccacagccggcagcagcagcatcttggcggagtttggatccctgcacttggaattcttacacctcactgaactctctggcaaccaggtcttcgctgaaaaggtcaggaacatccgcaaggtcctcaggaagatcgaaaagccctttggcctctaccccaacttcctcagcccagtgagtgggaactgggtgcaacaccatgtctcagttggaggactcggggacagtttttatgaatatttgatcaaatcctggttgatgtcgggcaagacagatatggaggctaaaaatatgtactacgaagccttggaggcgatagagacctacttgctgaatgtctctcccggggggctgacctacattgccgagtggcgaggggggattctggaccacaagatggggcacctggcctgtttctccgggggcatgatcgcccttggcgccgaggatgccaaggaagaaaagagggcccactaccgagagctcgcagcccagatcaccaagacgtgtcacgagtcatacgcccgctcaggtaaccctgcaaggggaaggggcagcaggagagactgaggctagacaccaggaagaactggaaagaccggcagcagtgagcgaagggagcacatggccttagggaagcctccccttggaagttaagtagaatttgagagaggtactctccaggctccgagaccataccctgaatgaaagggaaactagtacagacacaggaagcgctttgcatgtacctggtactcttccgcacttgacacaacatcactgaacctcaccacacagatgaggaaactgaggctcagagattacttggccaaggtcccttgagaggggcacagagtaaaggatcctc

SEQ ID NO: 75279 - DNA, 3524 bp, Homo sapiens
aaggcgcgggccccggcgcggcggggagggctcggccggaggggaggctgcggcgcgcggccggtcgctgcgggcccgggccccaagccgtgccgctccgctcgcccgggcccagccgaggccgctgcgcccccgcctcctcgcgggaggactcgctccaaactccctgaacttcggggacagtcccccgaagcggcgaaactctcagggttggcaaccctgcccagggacccccatcccgggcggcgctccggacgccctcccctcaccgcgcccccgcagacacgtgcctggactccgagggcttctggagccaccggccgggccacgatgctcatgaggaaagtgcccggcttcgtcccggcctccccgtgggggctgcggctgccgcagaagttcctcttcctcctcttcctctcgggcctggtcaccctgtgcttcggggccctcttcctgctgccccactcctctcgcctcaagcgcctcttcctggccccccggacccagcagcctggtctggaagtggtggctgaaatcgccggccatgccccggcccgcgagcaggagccgcctcccaacccggcccccgccgcgccggccccgggcgaggatgaccccagcagctgggccagtccccgccgcaggaaaggggggctgcggcgcacccgccccactggaccccgcgaggaggccacggcggcccggggcaatagcatcccggcctccaggcccggggacgagggcgtccctttccgctttgacttcaacgcattccggagccgtctccgccacccggtcctgggaacgagggccgatgagagtcaggagccccagagccaagtgcgagcccagcgggagaaaatcaaggagatgatgcagtttgcttggcagagctataagcgttatgcaatggggaaaaacgaactccgtccactaacaaaagatggctacgagggtaacatgttcggaggcctcagcggggcaacagtcattgactccctcgataccctctacctcatggagctgaaggaggagttccaggaggccaaggcctgggtgggagagagcttccacctgaacgtgagcggagaagcatccttgtttgaggtgaacatccgctacatcgggggactcctctcagccttctacctgacaggagaagaggtgttccgaataaaggccatcaggctgggagagaagctcctgccggcgttcaacacccccacgggaatcccaaagggcgtggtgagcttcaaaagtgggaactggggctgggccacagccggcagcagcagcatcttggcggagtttggatccctgcacttggaattcttacacctcactgaactctctggcaaccaggtcttcgctgaaaaggtcaggaacatccgcaaggtcctcaggaagatcgaaaagccctttggcctctaccccaacttcctcagcccagtgagtgggaactgggtgcaacaccatgtctcagttggaggactcggggacagtttttatgaatatttgatcaaatcctggttgatgtcgggcaagacagatatggaggctaaaaatatgtactacgaagccttggaggcgatagagacctacttgctgaatgtctctcccggggggctgacctacattgccgagtggcgaggggggattctggaccacaagatggggcacctggcctgtttctccgggggcatgatcgcccttggcgccgaggatgccaaggaagaaaagagggcccactaccgagagctcgcagcccagatcaccaagacgtgtcacgagtcatacgcccgctcagacaccaaacttgggcctgaggccttctggtttaactccggcagagaggccgtggccacccagctgagcgagagctactacatcctccggccagaggtggtggagagctacatgtacctgtggcgacagacccacaaccccatctacagggagtggggctgggaggtggtgctggccttggagaaatactgtcggacagaagccggtttctctgggatccaagacgtgtacagtagcacccccaaccacgacaacaagcagcagagcttctttctagcggagacactaaagtatctctatcttctgttctctgaagatgacttgctctccctggaagactgggtgttcaacaccgaggcccacccactcccggtgaaccactcagacagctccggcagagcctggggcagacactgaccccatctcctgccgccgccctggggccgccgcagggatgccttgccttttcaggatttgagactgttctcaaagggattgggaacgaaggccccatctcgggcagacccccagcagatgtgtcggacaagcaacttcttttcctctgtgaggagacaagacttggagactcagcgatgtcaggccagggccatggccacactggcccacacattcctttctacagagaatttctatgaagcccactcacttgccattccagggccaaaggaccggaggtttgcatatccgccccttgtatttgatttgcttccttttggtttcttggtttttgtttttgcttgattttgtcttttctctacagtttagttttgtcacaattacacatatagttttcaaaatcatgcactttctaaaatggtgtcatcctgaaaaacaaaacccagtgtttgcacacacacaaaatcttgaccccgttatctatattttaaatgctttttgcccaacactgaccctatgttcaactttgtgtcatttaccttataatttgaggaggggtttccctttgggcctcagtgttacaaattactagtgctattttcattattattgtaatggaaaaatctgtggactagaataaaagagtttattgaataagaaatatgattgggctcattgcacatcagtgactcctagaaaaaccattgcaatgttaccatcagaaataataatcagccagcagttgatttaaggtataatttagtaaacgattccaacttctattacctcccctgaaatcggtcctgatatattcgagaagcatgaggccagcccttcagatgcagttgtttatttatactcaggtttagattgggaagaggcccagggaggagcagcaacttgcctgaggtcacacagcccaaaaaaggcaaaggagagtctcgcccctgccgtctcctggccaccccagttgagtgtccgtctgttccatcattcagcagatgcttggtgagtgcctgcaacggaccagacactgggctagaggccagggacaccgctgagagtgagacagtcataagccctgcagtcaaggggtcaagaggggagaaagcgatggtaagggaaactgacaagtaagtgaagtgactgcaggtcataggaaatgctacaaaggagatagatagacagctgaggacctaccctacggggtcagggagggcctctctgggcaggtgaccttcaagccaagacccagaagataaaaaggagcagccgaaagactatctggcagaagaatgaac

SEQ ID NO: 75280 - DNA, 2053 bp, Homo sapiens
aaggcgcgggccccggcgcggcggggagggctcggccggaggggaggctgcggcgcgcggccggtcgctgcgggcccgggccccaagccgtgccgctccgctcgcccgggcccagccgaggccgctgcgcccccgcctcctcgcgggaggactcgctccaaactccctgaacttcggggacagtcccccgaagcggcgaaactctcagggttggcaaccctgcccagggacccccatcccgggcggcgctccggacgccctcccctcaccgcgcccccgcagacacgtgcctggactccgagggcttctggagccaccggccgggccacgatgctcatgaggaaagtgcccggcttcgtcccggcctccccgtgggggctgcggctgccgcagaagttcctcttcctcctcttcctctcgggcctggtcaccctgtgcttcggggccctcttcctgctgccccactcctctcgcctcaagcgcctcttcctggccccccggacccagcagcctggtctggaagtggtggctgaaatcgccggccatgccccggcccgcgagcaggagccgcctcccaacccggcccccgccgcgccggccccgggcgaggatgaccccagcagctgggccagtccccgccgcaggaaaggggggctgcggcgcacccgccccactggaccccgcgaggaggccacggcggcccggggcaatagcatcccggcctccaggcccggggacgagggcgtccctttccgctttgacttcaacgcattccggagccgtctccgccacccggtcctgggaacgagggccgatgagagtcaggagccccagagccaagtgcgagcccagcgggagaaaatcaaggagatgatgcagtttgcttggcagagctataagcgttatgcaatggggaaaaacgaactccgtccactaacaaaagatggctacgagggtaacatgttcggaggcctcagcggggcaacagtcattgactccctcgataccctctacctcatggagctgaaggaggagttccaggaggccaaggcctgggtgggagagagcttccacctgaacgtgagcggagaagcatccttgtttgaggtgaacatccgctacatcgggggactcctctcagccttctacctgacaggagaagaggtgttccgaataaaggccatcaggctgggagagaagctcctgccggcgttcaacacccccacgggaatcccaaagggcgtggtgagcttcaaaagtgggaactggggctgggccacagccggcagcagcagcatcttggcggagtttggatccctgcacttggaattcttacacctcactgaactctctggcaaccaggtcttcgctgaaaaggtcaggaacatccgcaaggtcctcaggaagatcgaaaagccctttggcctctaccccaacttcctcagcccagtgagtgggaactgggtgcaacaccatgtctcagttggaggactcggggacagtttttatgaatatttgatcaaatcctggttgatgtcgggcaagacagatatggaggctaaaaatatgtactacgaagccttggaggcgatagagacctacttgctgaatgtctctcccggggggctgacctacattgccgagtggcgaggggggattctggaccacaagatggggcacctggcctgtttctccgggggcatgatcgcccttggcgccgaggatgccaaggaagaaaagagggcccactaccgagagctcgcagcccagatcaccaagacgtgtcacgagtcatacgcccgctcaggtaaccctgcaaggggaaggggcagcaggagagactgaggctagacaccaggaagaactggaaagaccggcagcagtgagcgaagggagcacatggccttagggaagcctccccttggaagttaagtagaatttgagagaggtactctccaggctccgagagggaagagggaagacatggaggaccagatcatggaagatctaacatgtctcagttgacatctcagactcaacatacataccctct

SEQ ID NO: 75281 - DNA, 1918 bp, Homo sapiens
gattggctgactctaataagaagacgccactaggggcggggcgaagaggggcgcaagctcattgcgttttgagtctcgggacccctgttggagagactatggcgctcaacaagaatcactcggagggcggcggagtgatcgtcaataacaccgagagcatcctaatgtcctatgatcacgtggaactcacattcaatgacatgaagaacgtgccagaagccttcaaagggaccaagaaaggcactgtctaccttaccccttaccgggtcatctttctgtccaagggcaaggatgccatgcagtccttcatgatgccattttatctcatgaaagactgtgagatcaagcagcccgtatttggtgcaaactacatcaagggaacagtgaaggcggaagcgggaggtggctgggaaggctctgcttcctacaagttgactttcacggcagggggcgccattgagttcggacagcggatgctccaggtggcatctcaagcctccagaggtgaagtccccagtggagcctatggctactcttacatgcccagcggggcctatgtctatcccccgccagtcgccaatggaatgtacccctgccctcctggctacccctatccaccggccccacctgagttctatccaggaccccccatgatggacggggccatgggatacgtgcagcccccaccaccgccctaccctgggcccatggaacctccggtcagcggccccgatgtcccctccactcctgcagccgaagccaaggccgcagaagcagccgccagcgcctattacaacccaggcaatcctcacaacgtctacatgcccacgagccagccgccgccacctccctactacccaccggaagataagaagacccagtaggccctcctgcctccctgcctcccaccctcatctctctaccctacccctcccatcggggctgtgctggggcttggggaggggagggggcgccttgttctccctccaggtctgatcataaacaattaccaggaactagcattgtgggacattagggcccccggcctcgggagaggtgccgcccagcttcccatgccagcccggagcccacagtgctgcccagcgtacctccctcaccgtctggggctcttctgggagcacggagcatcccctgttcctgtttcactctcagcttctcccctcgaagggactctctggccacctcctccaccgcagtccagctccctcagtctggcacccactgctacactcagcctcatgagccacttcagaccagccaggtgtcttcccgggccctgccagaccctgctcacattccctctgctggtctgtgctggtctcagaaggccaccgcgcccgcattccactcagccagggtccagctgcagcccccgccacccttccttcccttccctgtcctgggtcatgttgttgccaccctgtgtgacttttgaagctgtaaaatgagcttccagggcttgggtggcgtcggggcagggccgccgaggctgggaggaagcccttctgccttttgctggtgtttctggaatttgctttccctcacctctcacttccttctagaaggagcttcctgactggaaccagagaatgcatgtctgtccacttggtggctgctgggtggggccgggaacaagggcccctgaccctgtgtgctggccgggacctgccaccagccccccagcctgcttcttccccttaagctttgtgcccctggatgcgctaacattcactcttgtttgtccctggactggccatgaagtgaggagatggttatttaaagagaattccctatttatttgacaaaaaatccagttaatatattaatgtgaaataaaccctgtttgcacctcgatttgtttgctgaaaatgtgaaatagtaaaaatgaaataactgg

SEQ ID NO: 75282 - DNA, 1874 bp, Homo sapiens
gattggctgactctaataagaagacgccactaggggcggggcgaagaggggcgcaagctcattgcgttttgagtctcgggacccctgttggagagactatggcgctcaacaagaatcactcggagggcggcggagtgatcgtcaataacaccgagagcatcctaatgtcctatgatcacgtggaactcacattcaatgacatgaagaacgtgccagaagccttcaaagggaccaagaaaggcactgtctaccttaccccttaccgggtcatctttctgtccaagggcaaggatgccatgcagtccttcatgatgccattttatctcatgaaagactgtgagatcaagcagcccgtatttggtgcaaactacatcaagggaacagtgaaggcggaagcgggaggtggctgggaaggctctgcttcctacaagttgactttcacggcagggggcgccattgagttcggacagcggatgctccaggtggcatctcaagcctccagaggtgaagtccccagtggagcctatggctactcttacatgcccagcggggcctatgtctatcccccgccagtcgccaatggaatgtacccctgccctcctggctacccctatccaccggccccacctgagttctatccaggaccccccatgatggacggggccatgggatacgtgcagcccccaccaccgccctaccctgggcccatggaacctccggtcagcggccccgatgtcccctccactcctgcagccgaagccaaggccgcagaagcagccgccagcgcctattacaacccaggcaatcctcacaacgtctacatgcccacgagccagccgccgccacctccctactacccaccggaagataagaagacccagtaggccctcctgcctccctgcctcccaccctcatctctctaccctacccctcccatcggggctgtgctggggcttggggaggggagggggcgccttgttctccctccaggtctgatcataaacaattaccaggaactagcattgtgggacattagggcccccggcctcgggagaggtgccgcccagcttcccatgccagcccggagcccacagtgctgcccagcgtacctccctcaccgtctggggctcttctgggagcacggagcatcccctgttcctgtttcactctcagcttctcccctcgaagggactctctggccacctcctccaccgcagtccagctccctcagtctggcacccactgctacactcagcctcatgagccacttcagaccagccaggtgtcttcccgggccctgccagaccctgctcacattccctctgctggtctgtgctggtctcagaaggccaccgcgcccgcattccactcagccagggtccagctgcagcccccgccacccttccttcccttccctgtcctgggtcatgttgttgccaccctgtgtgacttttgaagctgtaaaatgagcttccagggcttgggtggcgtcggggcagggccgccgaggctgggaggaagcccttctgccttttgctggtgtttctggaatttgctttccctcacctctcacttccttctagaaggagcttcctgactggaaccagagaatgcatgtctgtccacttggtggctgctgggtggggccgggaacaagggcccctgaccctgtgtgctggccgggacctgccaccagccccccagcctgcttcttccccttaagctttgtgcccctggatgcgctaacattcactcttgtttgtccctggactggccatgaagtgaggagatggttatttaaagagaattccctatttatttgacaaaaaatccagttaatatattaatgtgaaataaaccctgtttgcacctcg

SEQ ID NO: 75283 - DNA, 1052 bp, Homo sapiens
  misc_feature (811)..(812): n is a, c, g, or t
gattggctgactctaataagaagacgccactaggggcggggcgaagaggggcgcaagctcattgcgttttgagtctcgggacccctgttggagagactatggcgctcaacaagaatcactcggagggcggcggagtgatcgtcaataacaccgagagcatcctaatgtcctatgatcacgtggaactcacattcaatgacatgaagaacgtgccagaagccttcaaagggaccaagaaaggcactgtctaccttaccccttaccgggtcatctttctgtccaagggcaaggatgccatgcagtccttcatgatgccattttatctcatgaaagactgtgagatcaagcagcccgtatttggtgcaaactacatcaagggaacagtgaaggcggaagcgggaggtggctgggaaggctctgcttcctacaagttgactttcacggcagggggcgccattgagttcggacagcggatgctccaggtggcatctcaagcctccagaggtgaagtccccagtggagcctatggctactcttacatgcccagcggggcctatgtctatcccccgccagtcgccaatggaatgtacccctgccctcctggctacccctatccaccggccccacctgagttctatccaggaccccccatgatggacggggccatgggatacgtgcagcccccaccaccgccctaccctgggcccatggaacctccggtcagcggccccgatgtcccctccactcctgcagcgaagcaaggcgagaagcagcgcagggctataaaccaggaactcacaagtaatgccannagcagccgcgcactcccactaaccaccgaggattagaggaccagcaggccgctggccccggactccactcatagatcacctaacaaccaggggggtggggagggaggaaggagaaagaccaagcaggaaagcaacgcacaggaagggaagagcaggagcaagcacacaaccaggacaaaagccgacaagagagaagagcgaggacaaaaaacaagagagcctcagagagacacaaccacc

SEQ ID NO: 75284 - DNA, 980 bp, Homo sapiens
  misc_feature (763)..(764): n is a, c, g, or t
tagctagtagctgggtaatcggcgagggtatggcgctcaacaagaatcactcggagggcggcggagtgatcgtcaataacaccgagagcatcctaatgtcctatgatcacgtggaactcacattcaatgacatgaagaacgtgccagaagccttcaaagggaccaagaaaggcactgtctaccttaccccttaccgggtcatctttctgtccaagggcaaggatgccatgcagtccttcatgatgccattttatctcatgaaagactgtgagatcaagcagcccgtatttggtgcaaactacatcaagggaacagtgaaggcggaagcgggaggtggctgggaaggctctgcttcctacaagttgactttcacggcagggggcgccattgagttcggacagcggatgctccaggtggcatctcaagcctccagaggtgaagtccccagtggagcctatggctactcttacatgcccagcggggcctatgtctatcccccgccagtcgccaatggaatgtacccctgccctcctggctacccctatccaccggccccacctgagttctatccaggaccccccatgatggacggggccatgggatacgtgcagcccccaccaccgccctaccctgggcccatggaacctccggtcagcggccccgatgtcccctccactcctgcagccgaagccaaggccgcagaagcagccgccagcgcctattacaacccaggcaatcctcacaacgtctacatgcccacganncagcgcgccatcctattaccaccggagagaagagaaccagaggcccctgctcccggctcgcacctaagttgaactaccctccacgggcgggtgggctgggagggaggagactggaccccaagggggaaaggaacagaaaggagggaaaggcgcaggaaagggccctaaaaggcacagagagaagcacatgcagacagagggggaccaagggcgaga

SEQ ID NO: 75285 - DNA, 901 bp, Homo sapiens
cggacgcgtgggtcgacccacgcgtctctcgggacccctgttggagagactatggcgctcaacaagaatcactcggagggcggcggagtgatcgtcaataacaccgagagcatcctaatgtcctatgatcacgtggaactcacattcaatgacatgaagaacgtgccagaagccttcaaagggaccaagaaaggcactgtctaccttaccccttaccgggtcatctttctgtccaagggcaaggatgccatgcagtccttcatgatgccattttatctcatgaaagactgtgagatcaagcagcccgtatttggtgcaaactacatcaagggaacagtgaaggcggaagcgggaggtggctgggaaggctctgcttcctacaagttgactttcacggcagggggcgccattgagttcggacagcggatgctccaggtggcatctcaagcctccagaggtgaagtccccagtggagcctatggctactcttacatgcccagcggggcctatgtctatcccccgccagtcgccaatggaatgtacccctgccctcctggctacccctatccaccggccccacctgagtctatcgcaggaccgacccatgatggacgggggcaatgggaatacgtgcaggccacgaagaaacagaccatagccttgaggccatgggaacacacagggtcaaggggcccagagggtacccctacagtacctggaagccgaaagccaagagcagcagaaggcagaggcagagagacctaattacaacccaaggacaatcctccaagaagggtacgagcgtagccaacgaggcaaggcgccgcagaccaccctaagtagcccagcgggaaggataagaaagaccacagtaaggcccaccagggctcactggactcga

SEQ ID NO: 75286 - DNA, 1873 bp, Homo sapiens
  misc_feature (26)..(26): n is a, c, g, or t
gtgctaggtagcgaggctgggtgtgnggtctcgggacccctgttggagagactatggcgctcaacaagaatcactcggagggcggcggagtgatcgtcaataacaccgagagcatcctaatgtcctatgatcacgtggaactcacattcaatgacatgaagaacgtgccagaagccttcaaagggaccaagaaaggcactgtctaccttaccccttaccgggtcatctttctgtccaagggcaaggatgccatgcagtccttcatgatgccattttatctcatgaaagactgtgagatcaagcagcccgtatttggtgcaaactacatcaagggaacagtgaaggcggaagcgggaggtggctgggaaggctctgcttcctacaagttgactttcacggcagggggcgccattgagttcggacagcggatgctccaggtggcatctcaagcctccagaggtgaagtccccagtggagcctatggctactcttacatgcccagcggggcctatgtctatcccccgccagtcgccaatggaatgtacccctgccctcctggctacccctatccaccggccccacctgagttctatccaggaccccccatgatggacggggccatgggatacgtgcagcccccaccaccgccctaccctgggcccatggaacctccggtcagcggccccgatgtcccctccactcctgcagccgaagccaaggccgcagaagcagccgccagcgcctattacaacccaggcaatcctcacaacgtctacatgcccacgagccagccgccgccacctccctactacccaccggaagataagaagacccagtaggccctcctgcctccctgcctcccaccctcatctctctaccctacccctcccatcggggctgtgctggggcttggggaggggagggggcgccttgttctccctccaggtctgatcataaacaattaccaggaactagcattgtgggacattagggcccccggcctcgggagaggtgccgcccagcttcccatgccagcccggagcccacagtgctgcccagcgtacctccctcaccgtctggggctcttctgggagcacggagcatcccctgttcctgtttcactctcagcttctcccctcgaagggactctctggccacctcctccaccgcagtccagctccctcagtctggcacccactgctacactcagcctcatgagccacttcagaccagccaggtgtcttcccgggccctgccagaccctgctcacattccctctgctggtctgtgctggtctcagaaggccaccgcgcccgcattccactcagccagggtccagctgcagcccccgccacccttccttcccttccctgtcctgggtcatgttgttgccaccctgtgtgacttttgaagctgtaaaatgagcttccagggcttgggtggcgtcggggcagggccgccgaggctgggaggaagcccttctgccttttgctggtgtttctggaatttgctttccctcacctctcacttccttctagaaggagcttcctgactggaaccagagaatgcatgtctgtccacttggtggctgctgggtggggccgggaacaagggcccctgaccctgtgtgctggccgggacctgccaccagccccccagcctgcttcttccccttaagctttgtgcccctggatgcgctaacattcactcttgtttgtccctggactggccatgaagtgaggagatggttatttaaagagaattccctatttatttgacaaaaaatccagttaatatattaatgtgaaataaaccctgtttgcacctcgatttgtttgctgaaaatgtgaaatagtaaaaatgaaataactgg

SEQ ID NO: 75287 - DNA, 1879 bp, Homo sapiens
  misc_feature (30)..(30): n is a, c, g, or t
ctaggctaagtagaggctgggttaatcggnagagtctcgggacccctgttggagagactatggcgctcaacaagaatcactcggagggcggcggagtgatcgtcaataacaccgagagcatcctaatgtcctatgatcacgtggaactcacattcaatgacatgaagaacgtgccagaagccttcaaagggaccaagaaaggcactgtctaccttaccccttaccgggtcatctttctgtccaagggcaaggatgccatgcagtccttcatgatgccattttatctcatgaaagactgtgagatcaagcagcccgtatttggtgcaaactacatcaagggaacagtgaaggcggaagcgggaggtggctgggaaggctctgcttcctacaagttgactttcacggcagggggcgccattgagttcggacagcggatgctccaggtggcatctcaagcctccagaggtgaagtccccagtggagcctatggctactcttacatgcccagcggggcctatgtctatcccccgccagtcgccaatggaatgtacccctgccctcctggctacccctatccaccggccccacctgagttctatccaggaccccccatgatggacggggccatgggatacgtgcagcccccaccaccgccctaccctgggcccatggaacctccggtcagcggccccgatgtcccctccactcctgcagccgaagccaaggccgcagaagcagccgccagcgcctattacaacccaggcaatcctcacaacgtctacatgcccacgagccagccgccgccacctccctactacccaccggaagataagaagacccagtaggccctcctgcctccctgcctcccaccctcatctctctaccctacccctcccatcggggctgtgctggggcttggggaggggagggggcgccttgttctccctccaggtctgatcataaacaattaccaggaactagcattgtgggacattagggcccccggcctcgggagaggtgccgcccagcttcccatgccagcccggagcccacagtgctgcccagcgtacctccctcaccgtctggggctcttctgggagcacggagcatcccctgttcctgtttcactctcagcttctcccctcgaagggactctctggccacctcctccaccgcagtccagctccctcagtctggcacccactgctacactcagcctcatgagccacttcagaccagccaggtgtcttcccgggccctgccagaccctgctcacattccctctgctggtctgtgctggtctcagaaggccaccgcgcccgcattccactcagccagggtccagctgcagcccccgccacccttccttcccttccctgtcctgggtcatgttgttgccaccctgtgtgacttttgaagctgtaaaatgagcttccagggcttgggtggcgtcggggcagggccgccgaggctgggaggaagcccttctgccttttgctggtgtttctggaatttgctttccctcacctctcacttccttctagaaggagcttcctgactggaaccagagaatgcatgtctgtccacttggtggctgctgggtggggccgggaacaagggcccctgaccctgtgtgctggccgggacctgccaccagccccccagcctgcttcttccccttaagctttgtgcccctggatgcgctaacattcactcttgtttgtccctggactggccatgaagtgaggagatggttatttaaagagaattccctatttatttgacaaaaaatccagttaatatattaatgtgaaataaaccctgtttgcacctcgatttgtttgctgaaaatgtgaaatagtaaaaatgaaataactgg

SEQ ID NO: 75288 - DNA, 1871 bp, Homo sapiens
cggacgcgtgggtcgacccacgcgtctctcgggacccctgttggagagactatggcgctcaacaagaatcactcggagggcggcggagtgatcgtcaataacaccgagagcatcctaatgtcctatgatcacgtggaactcacattcaatgacatgaagaacgtgccagaagccttcaaagggaccaagaaaggcactgtctaccttaccccttaccgggtcatctttctgtccaagggcaaggatgccatgcagtccttcatgatgccattttatctcatgaaagactgtgagatcaagcagcccgtatttggtgcaaactacatcaagggaacagtgaaggcggaagcgggaggtggctgggaaggctctgcttcctacaagttgactttcacggcagggggcgccattgagttcggacagcggatgctccaggtggcatctcaagcctccagaggtgaagtccccagtggagcctatggctactcttacatgcccagcggggcctatgtctatcccccgccagtcgccaatggaatgtacccctgccctcctggctacccctatccaccggccccacctgagttctatccaggaccccccatgatggacggggccatgggatacgtgcagcccccaccaccgccctaccctgggcccatggaacctccggtcagcggccccgatgtcccctccactcctgcagccgaagccaaggccgcagaagcagccgccagcgcctattacaacccaggcaatcctcacaacgtctacatgcccacgagccagccgccgccacctccctactacccaccggaagataagaagacccagtaggccctcctgcctccctgcctcccaccctcatctctctaccctacccctcccatcggggctgtgctggggcttggggaggggagggggcgccttgttctccctccaggtctgatcataaacaattaccaggaactagcattgtgggacattagggcccccggcctcgggagaggtgccgcccagcttcccatgccagcccggagcccacagtgctgcccagcgtacctccctcaccgtctggggctcttctgggagcacggagcatcccctgttcctgtttcactctcagcttctcccctcgaagggactctctggccacctcctccaccgcagtccagctccctcagtctggcacccactgctacactcagcctcatgagccacttcagaccagccaggtgtcttcccgggccctgccagaccctgctcacattccctctgctggtctgtgctggtctcagaaggccaccgcgcccgcattccactcagccagggtccagctgcagcccccgccacccttccttcccttccctgtcctgggtcatgttgttgccaccctgtgtgacttttgaagctgtaaaatgagcttccagggcttgggtggcgtcggggcagggccgccgaggctgggaggaagcccttctgccttttgctggtgtttctggaatttgctttccctcacctctcacttccttctagaaggagcttcctgactggaaccagagaatgcatgtctgtccacttggtggctgctgggtggggccgggaacaagggcccctgaccctgtgtgctggccgggacctgccaccagccccccagcctgcttcttccccttaagctttgtgcccctggatgcgctaacattcactcttgtttgtccctggactggccatgaagtgaggagatggttatttaaagagaattccctatttatttgacaaaaaatccagttaatatattaatgtgaaataaaccctgtttgcacctcgatttgtttgctgaaaatgtgaaatagtaaaaatgaaataactgg

SEQ ID NO: 75289 - DNA, 1865 bp, Homo sapiens
gattggctgactctaataagaagacgccactaggggcggggcgaagaggggcgcaagctcattgcgttttgagtctcgggacccctgttggagagactatggcgctcaacaagaatcactcggagggcggcggagtgatcgtcaataacaccgagagcatcctaatgtcctatgatcacgtggaactcacattcaatgacatgaagaacgtgccagaagccttcaaagggaccaagaaaggcactgtctaccttaccccttaccgggtcatctttctgtccaagggcaaggatgccatgcagtccttcatgatgccattttatctcatgaaagactgtgagatcaagcagcccgtatttggtgcaaactacatcaagggaacagtgaaggcggaagcgggaggtggctgggaaggctctgcttcctacaagttgactttcacggcagggggcgccattgagttcggacagcggatgctccaggtggcatctcaagcctccagaggtgaagtccccagtggagcctatggctactcttacatgcccagcggggcctatgtctatcccccgccagtcgccaatggaatgtacccctgccctcctggctacccctatccaccggccccacctgagttctatccaggaccccccatgatggacggggccatgggatacgtgcagcccccaccaccgccctaccctgggcccatggaacctccggtcagcggccccgatgtcccctccactcctgcagccgaagccaaggccgcagaagcagccgccagcgcctattacaacccaggcaatcctcacaacgtctacatgcccacgagccagccgccgccacctccctactacccaccggaagataagaagacccagtaggccctcctgcctccctgcctcccaccctcatctctctaccctacccctcccatcggggctgtgctggggcttggggaggggagggggcgccttgttctccctccaggtctgatcataaacaattaccaggaactagcattgtgggacattagggcccccggcctcgggagaggtgccgcccagcttcccatgccagcccggagcccacagtgctgcccagcgtacctccctcaccgtctggggctcttctgggagcacggagcatcccctgttcctgtttcactctcagcttctcccctcgaagggactctctggccacctcctccaccgcagtccagctccctcagtctggcacccactgctacactcagcctcatgagccacttcagaccagccaggtgtcttcccgggccctgccagaccctgctcacattccctctgctggtctgtgctggtctcagaaggccaccgcgcccgcattccactcagccagggtccagctgcagcccccgccacccttccttcccttccctgtcctgggtcatgttgttgccaccctgtgtgacttttgaagctgtaggaagcccttctgccttttgctggtgtttctggaatttgctttccctcacctctcacttccttctagaaggagcttcctgactggaaccagagaatgcatgtctgtccacttggtggctgctgggtggggccgggaacaagggcccctgaccctgtgtgctggccgggacctgccaccagccccccagcctgcttcttccccttaagctttgtgcccctggatgcgctaacattcactcttgtttgtccctggactggccatgaagtgaggagatggttatttaaagagaattccctatttatttgacaaaaaatccagttaatatattaatgtgaaataaaccctgtttgcacctcgatttgtttgctgaaaatgtgaaatagtaaaaatgaaataactgg

SEQ ID NO: 75290 - DNA, 1573 bp, Homo sapiens
gattggctgactctaataagaagacgccactaggggcggggcgaagaggggcgcaagctcattgcgttttgagtctcgggacccctgttggagagactatggcgctcaacaagaatcactcggagggcggcggagtgatcgtcaataacaccgagagcatcctaatgtcctatgatcacgtggaactcacattcaatgacatgaagaacgtgccagaagccttcaaagggaccaagaaaggcactgtctaccttaccccttaccgggtcatctttctgtccaagggcaaggatgccatgcagtccttcatgatgccattttatctcatgaaagactgtgagatcaagcagcccgtatttggtgcaaactacatcaagggaacagtgaaggcggaagcgggaggtggctgggaaggctctgcttcctacaagttgactttcacggcagggggcgccattgagttcggacagcggatgctccaggtggcatctcaagcctccagaggtgaagtccccagtggagcctatggctactcttacatgcccagcggggcctatgtctatcccccgccagtcgccaatggaatgtacccctgccctcctggctacccctatccaccggccccacctgagttctatccaggaccccccatgatggacggggccatgggatacgtgcagcccccaccaccgccctaccctgggcccatggaacctccggtcagcggccccgatgtcccctccactcctgcagccgaagccaaggccgcagaagcagccgccagcgcctattacaacccaggcaatcctcacaacgtctacatgcccacgagccagccgccgccacctccctactacccaccggaagataagaagacccagtaggccctcctgcctccctgcctcccaccctcatctctctaccctacccctcccatcggggctgtgctggggcttggggaggggagggggcgccttgttctccctccaggtctgatcataaacaattaccaggaactagcattgtgggacattagggcccccggcctcgggagaggtgccgcccagcttcccatgccagcccggagcccacagtgctgcccagcgtacctccctcaccgtctggggctcttctgggagcacggagcatcccctgttcctgtttcactctcagcttctcccctcgaagggactctctggccacctcctccaccgcagtccagctccctcagtctggcacccactgctacactcagcctcatgagccacttcagaccagccagaaggagcttcctgactggaaccagagaatgcatgtctgtccacttggtggctgctgggtggggccgggaacaagggcccctgaccctgtgtgctggccgggacctgccaccagccccccagcctgcttcttccccttaagctttgtgcccctggatgcgctaacattcactcttgtttgtccctggactggccatgaagtgaggagatggttatttaaagagaattccctatttatttgacaaaaaatccagttaatatattaatgtgaaataaaccctgtttgcacctcg

SEQ ID NO: 75291 - DNA, 1862 bp, Homo sapiens
actagtggatccgtcgacggccattatggatggatggggagtatggcgctcaacaagaatcactcggagggcggcggagtgatcgtcaataacaccgagagcatcctaatgtcctatgatcacgtggaactcacattcaatgacatgaagaacgtgccagaagccttcaaagggaccaagaaaggcactgtctaccttaccccttaccgggtcatctttctgtccaagggcaaggatgccatgcagtccttcatgatgccattttatctcatgaaagactgtgagatcaagcagcccgtatttggtgcaaactacatcaagggaacagtgaaggcggaagcgggaggtggctgggaaggctctgcttcctacaagttgactttcacggcagggggcgccattgagttcggacagcggatgctccaggtggcatctcaagcctccagaggtgaagtccccagtggagcctatggctactcttacatgcccagcggggcctatgtctatcccccgccagtcgccaatggaatgtacccctgccctcctggctacccctatccaccggccccacctgagttctatccaggaccccccatgatggacggggccatgggatacgtgcagcccccaccaccgccctaccctgggcccatggaacctccggtcagcggccccgatgtcccctccactcctgcagccgaagccaaggccgcagaagcagccgccagcgcctattacaacccaggcaatcctcacaacgtctacatgcccacgagccagccgccgccacctccctactacccaccggaagataagaagacccagtaggccctcctgcctccctgcctcccaccctcatctctctaccctacccctcccatcggggctgtgctggggcttggggaggggagggggcgccttgttctccctccaggtctgatcataaacaattaccaggaactagcattgtgggacattagggcccccggcctcgggagaggtgccgcccagcttcccatgccagcccggagcccacagtgctgcccagcgtacctccctcaccgtctggggctcttctgggagcacggagcatcccctgttcctgtttcactctcagcttctcccctcgaagggactctctggccacctcctccaccgcagtccagctccctcagtctggcacccactgctacactcagcctcatgagccacttcagaccagccaggtgtcttcccgggccctgccagaccctgctcacattccctctgctggtctgtgctggtctcagaaggccaccgcgcccgcattccactcagccagggtccagctgcagcccccgccacccttccttcccttccctgtcctgggtcatgttgttgccaccctgtgtgacttttgaagctgtaaaatgagcttccagggcttgggtggcgtcggggcagggccgccgaggctgggaggaagcccttctgccttttgctggtgtttctggaatttgctttccctcacctctcacttccttctagaaggagcttcctgactggaaccagagaatgcatgtctgtccacttggtggctgctgggtggggccgggaacaagggcccctgaccctgtgtgctggccgggacctgccaccagccccccagcctgcttcttccccttaagctttgtgcccctggatgcgctaacattcactcttgtttgtccctggactggccatgaagtgaggagatggttatttaaagagaattccctatttatttgacaaaaaatccagttaatatattaatgtgaaataaaccctgtttgcacctcgatttgtttgctgaaaatgtgaaatagtaaaaatgaaataactgg

SEQ ID NO: 75292 - DNA, 1864 bp, Homo sapiens
gagataggcagaagagggccgggggttgaatcggcacggaggctatggcgctcaacaagaatcactcggagggcggcggagtgatcgtcaataacaccgagagcatcctaatgtcctatgatcacgtggaactcacattcaatgacatgaagaacgtgccagaagccttcaaagggaccaagaaaggcactgtctaccttaccccttaccgggtcatctttctgtccaagggcaaggatgccatgcagtccttcatgatgccattttatctcatgaaagactgtgagatcaagcagcccgtatttggtgcaaactacatcaagggaacagtgaaggcggaagcgggaggtggctgggaaggctctgcttcctacaagttgactttcacggcagggggcgccattgagttcggacagcggatgctccaggtggcatctcaagcctccagaggtgaagtccccagtggagcctatggctactcttacatgcccagcggggcctatgtctatcccccgccagtcgccaatggaatgtacccctgccctcctggctacccctatccaccggccccacctgagttctatccaggaccccccatgatggacggggccatgggatacgtgcagcccccaccaccgccctaccctgggcccatggaacctccggtcagcggccccgatgtcccctccactcctgcagccgaagccaaggccgcagaagcagccgccagcgcctattacaacccaggcaatcctcacaacgtctacatgcccacgagccagccgccgccacctccctactacccaccggaagataagaagacccagtaggccctcctgcctccctgcctcccaccctcatctctctaccctacccctcccatcggggctgtgctggggcttggggaggggagggggcgccttgttctccctccaggtctgatcataaacaattaccaggaactagcattgtgggacattagggcccccggcctcgggagaggtgccgcccagcttcccatgccagcccggagcccacagtgctgcccagcgtacctccctcaccgtctggggctcttctgggagcacggagcatcccctgttcctgtttcactctcagcttctcccctcgaagggactctctggccacctcctccaccgcagtccagctccctcagtctggcacccactgctacactcagcctcatgagccacttcagaccagccaggtgtcttcccgggccctgccagaccctgctcacattccctctgctggtctgtgctggtctcagaaggccaccgcgcccgcattccactcagccagggtccagctgcagcccccgccacccttccttcccttccctgtcctgggtcatgttgttgccaccctgtgtgacttttgaagctgtaaaatgagcttccagggcttgggtggcgtcggggcagggccgccgaggctgggaggaagcccttctgccttttgctggtgtttctggaatttgctttccctcacctctcacttccttctagaaggagcttcctgactggaaccagagaatgcatgtctgtccacttggtggctgctgggtggggccgggaacaagggcccctgaccctgtgtgctggccgggacctgccaccagccccccagcctgcttcttccccttaagctttgtgcccctggatgcgctaacattcactcttgtttgtccctggactggccatgaagtgaggagatggttatttaaagagaattccctatttatttgacaaaaaatccagttaatatattaatgtgaaataaaccctgtttgcacctcgatttgtttgctgaaaatgtgaaatagtaaaaatgaaataactgg

SEQ ID NO: 75293 - DNA, 1049 bp, Homo sapiens
  misc_feature (832)..(833): n is a, c, g, or t
gattggctgactctaataagaagacgccactaggggcggggcgaagaggggcgcaagctcattgcgttttgagtctcgggacccctgttggagagactatggcgctcaacaagaatcactcggagggcggcggagtgatcgtcaataacaccgagagcatcctaatgtcctatgatcacgtggaactcacattcaatgacatgaagaacgtgccagaagccttcaaagggaccaagaaaggcactgtctaccttaccccttaccgggtcatctttctgtccaagggcaaggatgccatgcagtccttcatgatgccattttatctcatgaaagactgtgagatcaagcagcccgtatttggtgcaaactacatcaagggaacagtgaaggcggaagcgggaggtggctgggaaggctctgcttcctacaagttgactttcacggcagggggcgccattgagttcggacagcggatgctccaggtggcatctcaagcctccagaggtgaagtccccagtggagcctatggctactcttacatgcccagcggggcctatgtctatcccccgccagtcgccaatggaatgtacccctgccctcctggctacccctatccaccggccccacctgagttctatccaggaccccccatgatggacggggccatgggatacgtgcagcccccaccaccgccctaccctgggcccatggaacctccggtcagcggccccgatgtcccctccactcctgcagccgaagccaaggccgcagaagcagccgccagcgcctattacaacccaggcaatcctcacaacgtctacatgcccacganncagcgcgccatcctattaccaccggagagaagagaaccagaggcccctgctcccggctcgcacctaagttgaactaccctccacgggcgggtgggctgggagggaggagactggaccccaagggggaaaggaacagaaaggagggaaaggcgcaggaaagggccctaaaaggcacagagagaagcacatgcagacagagggggaccaagggcgaga

SEQ ID NO: 75294 - DNA, 1856 bp, Homo sapiens
catcagctaggtcgaggccctgcggtgatcggccgtatggcgctcaacaagaatcactcggagggcggcggagtgatcgtcaataacaccgagagcatcctaatgtcctatgatcacgtggaactcacattcaatgacatgaagaacgtgccagaagccttcaaagggaccaagaaaggcactgtctaccttaccccttaccgggtcatctttctgtccaagggcaaggatgccatgcagtccttcatgatgccattttatctcatgaaagactgtgagatcaagcagcccgtatttggtgcaaactacatcaagggaacagtgaaggcggaagcgggaggtggctgggaaggctctgcttcctacaagttgactttcacggcagggggcgccattgagttcggacagcggatgctccaggtggcatctcaagcctccagaggtgaagtccccagtggagcctatggctactcttacatgcccagcggggcctatgtctatcccccgccagtcgccaatggaatgtacccctgccctcctggctacccctatccaccggccccacctgagttctatccaggaccccccatgatggacggggccatgggatacgtgcagcccccaccaccgccctaccctgggcccatggaacctccggtcagcggccccgatgtcccctccactcctgcagccgaagccaaggccgcagaagcagccgccagcgcctattacaacccaggcaatcctcacaacgtctacatgcccacgagccagccgccgccacctccctactacccaccggaagataagaagacccagtaggccctcctgcctccctgcctcccaccctcatctctctaccctacccctcccatcggggctgtgctggggcttggggaggggagggggcgccttgttctccctccaggtctgatcataaacaattaccaggaactagcattgtgggacattagggcccccggcctcgggagaggtgccgcccagcttcccatgccagcccggagcccacagtgctgcccagcgtacctccctcaccgtctggggctcttctgggagcacggagcatcccctgttcctgtttcactctcagcttctcccctcgaagggactctctggccacctcctccaccgcagtccagctccctcagtctggcacccactgctacactcagcctcatgagccacttcagaccagccaggtgtcttcccgggccctgccagaccctgctcacattccctctgctggtctgtgctggtctcagaaggccaccgcgcccgcattccactcagccagggtccagctgcagcccccgccacccttccttcccttccctgtcctgggtcatgttgttgccaccctgtgtgacttttgaagctgtaaaatgagcttccagggcttgggtggcgtcggggcagggccgccgaggctgggaggaagcccttctgccttttgctggtgtttctggaatttgctttccctcacctctcacttccttctagaaggagcttcctgactggaaccagagaatgcatgtctgtccacttggtggctgctgggtggggccgggaacaagggcccctgaccctgtgtgctggccgggacctgccaccagccccccagcctgcttcttccccttaagctttgtgcccctggatgcgctaacattcactcttgtttgtccctggactggccatgaagtgaggagatggttatttaaagagaattccctatttatttgacaaaaaatccagttaatatattaatgtgaaataaaccctgtttgcacctcgatttgtttgctgaaaatgtgaaatagtaaaaatgaaataactgg

SEQ ID NO: 75295 - DNA, 792 bp, Homo sapiens
gattggctgactctaataagaagacgccactaggggcggggcgaagaggggcgcaagctcattgcgttttgagtctcgggacccctgttggagagactatggcgctcaacaagaatcactcggagggcggcggagtgatcgtcaataacaccgagagcatcctaatgtcctatgatcacgtggaactcacattcaatgacatgaagaacgtgccagaagccttcaaagggaccaagaaaggcactgtctaccttaccccttaccgggtcatctttctgtccaagggcaaggatgccatgcagtccttcatgatgccattttatctcatgaaagactgtgagatcaagcagcccgtatttggtgcaaactacatcaagggaacagtgaaggcggaagcgggaggtggctgggaaggctctgcttcctacaagttgactttcacggcagggggcgccattgagttcggacagcggatgctccaggtggcatctcaagcctccagaggtgaagtccccagtggagcctatggctactcttacatgcccagcggggcctatgtctatcccccgccagtcgccaatggaatgtacccctgccctcctggctacccctatccaccggccccacctgagttctatccaggaccccccatgatggacggggccatgggatacgtgcagcccccaccaccgccctaccctgggcccatggaacctccggtcagcggccccgatgtcccctccactcctgcagccgaagccaagccggaggttgaatgccattcacgctgtc

SEQ ID NO: 75296 - DNA, 2103 bp, Homo sapiens
gattggctgactctaataagaagacgccactaggggcggggcgaagaggggcgcaagctcattgcgttttgagtctcgggacccctgttggagagactatggcgctcaacaagaatcactcggagggcggcggagtgatcgtcaataacaccgagagcatcctaatgtcctatgatcacgtggaactcacattcaatgacatgaagaacgtgccagaagccttcaaagggaccaagaaaggcactgtctaccttaccccttaccgggtcatctttctgtccaagggcaaggatgccatgcagtccttcatgatgccattttatctcatgaaagactgtgagatcaagcagcccgtatttggtgcaaactacatcaagggaacagtgaaggcggaagcgggaggtggctgggaaggctctgcttcctacaagttgactttcacggcagggggcgccattgagttcggacagcggatgctccaggtggcatctcaagcctccagaggtgaagtccccagtggagcctatggctactcttacatgcccagcggggcctatgtctatcccccgccagtcgccaatggaatgtacccctgccctcctggctacccctatccaccggccccacctggtgagtgtgtcctttgctgcccccactcccctcatgagcccacctacccaggctccccccaggccagggagactttattccttgagctgcttcaggaccaacgaaggagctggagaggcccccctcacccgggagggggccgcagccgggtgctcaccatgtccttgttactctctcaccgagcaagttctatccaggaccccccatgatggacggggccatgggatacgtgcagcccccaccaccgccctaccctgggcccatggaacctccggtcagcggccccgatgtcccctccactcctgcagccgaagccaaggccgcagaagcagccgccagcgcctattacaacccaggcaatcctcacaacgtctacatgcccacgagccagccgccgccacctccctactacccaccggaagataagaagacccagtaggccctcctgcctccctgcctcccaccctcatctctctaccctacccctcccatcggggctgtgctggggcttggggaggggagggggcgccttgttctccctccaggtctgatcataaacaattaccaggaactagcattgtgggacattagggcccccggcctcgggagaggtgccgcccagcttcccatgccagcccggagcccacagtgctgcccagcgtacctccctcaccgtctggggctcttctgggagcacggagcatcccctgttcctgtttcactctcagcttctcccctcgaagggactctctggccacctcctccaccgcagtccagctccctcagtctggcacccactgctacactcagcctcatgagccacttcagaccagccaggtgtcttcccgggccctgccagaccctgctcacattccctctgctggtctgtgctggtctcagaaggccaccgcgcccgcattccactcagccagggtccagctgcagcccccgccacccttccttcccttccctgtcctgggtcatgttgttgccaccctgtgtgacttttgaagctgtaaaatgagcttccagggcttgggtggcgtcggggcagggccgccgaggctgggaggaagcccttctgccttttgctggtgtttctggaatttgctttccctcacctctcacttccttctagaaggagcttcctgactggaaccagagaatgcatgtctgtccacttggtggctgctgggtggggccgggaacaagggcccctgaccctgtgtgctggccgggacctgccaccagccccccagcctgcttcttccccttaagctttgtgcccctggatgcgctaacattcactcttgtttgtccctggactggccatgaagtgaggagatggttatttaaagagaattccctatttatttgacaaaaaatccagttaatatattaatgtgaaataaaccctgtttgcacctcgatttgtttgctgaaaatgtgaaatagtaaaaatgaaataactgg

SEQ ID NO: 75297 - DNA, 1783 bp, Homo sapiens
gattggctgactctaataagaagacgccactaggggcggggcgaagaggggcgcaagctcattgcgttttgagtctcgggacccctgttggagagactatggcgctcaacaagaatcactcggagggcggcggagtgatcgtcaataacaccgagagcatcctaatgtcctatgatcacgtggaactcacattcaatgacatgaagaacgtgccagaagccttcaaagggaccaagaaaggcactgtctaccttaccccttaccgggtcatctttctgtccaagggcaaggatgccatgcagtccttcatgatgccattttatctcatgaaagactgtgagatcaagcagcccgtatttggtgcaaactacatcaagggaacagtgaaggcggaagcgggaggtggctgggaaggctctgcttcctacaagttgactttcacggcagggggcgccattgagttcggacagcggatgctccaggtggcatctcaagagttctatccaggaccccccatgatggacggggccatgggatacgtgcagcccccaccaccgccctaccctgggcccatggaacctccggtcagcggccccgatgtcccctccactcctgcagccgaagccaaggccgcagaagcagccgccagcgcctattacaacccaggcaatcctcacaacgtctacatgcccacgagccagccgccgccacctccctactacccaccggaagataagaagacccagtaggccctcctgcctccctgcctcccaccctcatctctctaccctacccctcccatcggggctgtgctggggcttggggaggggagggggcgccttgttctccctccaggtctgatcataaacaattaccaggaactagcattgtgggacattagggcccccggcctcgggagaggtgccgcccagcttcccatgccagcccggagcccacagtgctgcccagcgtacctccctcaccgtctggggctcttctgggagcacggagcatcccctgttcctgtttcactctcagcttctcccctcgaagggactctctggccacctcctccaccgcagtccagctccctcagtctggcacccactgctacactcagcctcatgagccacttcagaccagccaggtgtcttcccgggccctgccagaccctgctcacattccctctgctggtctgtgctggtctcagaaggccaccgcgcccgcattccactcagccagggtccagctgcagcccccgccacccttccttcccttccctgtcctgggtcatgttgttgccaccctgtgtgacttttgaagctgtaaaatgagcttccagggcttgggtggcgtcggggcagggccgccgaggctgggaggaagcccttctgccttttgctggtgtttctggaatttgctttccctcacctctcacttccttctagaaggagcttcctgactggaaccagagaatgcatgtctgtccacttggtggctgctgggtggggccgggaacaagggcccctgaccctgtgtgctggccgggacctgccaccagccccccagcctgcttcttccccttaagctttgtgcccctggatgcgctaacattcactcttgtttgtccctggactggccatgaagtgaggagatggttatttaaagagaattccctatttatttgacaaaaaatccagttaatatattaatgtgaaataaaccctgtttgcacctcgatttgtttgctgaaaatgtgaaatagtaaaaatgaaataactgg

SEQ ID NO: 75298 - DNA, 1930 bp, Homo sapiens
cggacgcgtgggtcgacccacgcgtctctcgggacccctgttggagagactatggcgctcaacaagaatcactcggagggcggcggagtgatcgtcaataacaccgagaggtgaaaacactgcggaaggatcctggaggaccaaagttcgggtgtcgaggaagtgggcgcatcctaatgtcctatgatcacgtggaactcacattcaatgacatgaagaacgtgccagaagccttcaaagggaccaagaaaggcactgtctaccttaccccttaccgggtcatctttctgtccaagggcaaggatgccatgcagtccttcatgatgccattttatctcatgaaagactgtgagatcaagcagcccgtatttggtgcaaactacatcaagggaacagtgaaggcggaagcgggaggtggctgggaaggctctgcttcctacaagttgactttcacggcagggggcgccattgagttcggacagcggatgctccaggtggcatctcaagcctccagaggtgaagtccccagtggagcctatggctactcttacatgcccagcggggcctatgtctatcccccgccagtcgccaatggaatgtacccctgccctcctggctacccctatccaccggccccacctgagttctatccaggaccccccatgatggacggggccatgggatacgtgcagcccccaccaccgccctaccctgggcccatggaacctccggtcagcggccccgatgtcccctccactcctgcagccgaagccaaggccgcagaagcagccgccagcgcctattacaacccaggcaatcctcacaacgtctacatgcccacgagccagccgccgccacctccctactacccaccggaagataagaagacccagtaggccctcctgcctccctgcctcccaccctcatctctctaccctacccctcccatcggggctgtgctggggcttggggaggggagggggcgccttgttctccctccaggtctgatcataaacaattaccaggaactagcattgtgggacattagggcccccggcctcgggagaggtgccgcccagcttcccatgccagcccggagcccacagtgctgcccagcgtacctccctcaccgtctggggctcttctgggagcacggagcatcccctgttcctgtttcactctcagcttctcccctcgaagggactctctggccacctcctccaccgcagtccagctccctcagtctggcacccactgctacactcagcctcatgagccacttcagaccagccaggtgtcttcccgggccctgccagaccctgctcacattccctctgctggtctgtgctggtctcagaaggccaccgcgcccgcattccactcagccagggtccagctgcagcccccgccacccttccttcccttccctgtcctgggtcatgttgttgccaccctgtgtgacttttgaagctgtaaaatgagcttccagggcttgggtggcgtcggggcagggccgccgaggctgggaggaagcccttctgccttttgctggtgtttctggaatttgctttccctcacctctcacttccttctagaaggagcttcctgactggaaccagagaatgcatgtctgtccacttggtggctgctgggtggggccgggaacaagggcccctgaccctgtgtgctggccgggacctgccaccagccccccagcctgcttcttccccttaagctttgtgcccctggatgcgctaacattcactcttgtttgtccctggactggccatgaagtgaggagatggttatttaaagagaattccctatttatttgacaaaaaatccagttaatatattaatgtgaaataaaccctgtttgcacctcgatttgtttgctgaaaatgtgaaatagtaaaaatgaaataactgg

SEQ ID NO: 75299 - DNA, 1926 bp, Homo sapiens
gcttgaaaaacaaaccagcaaaaacagaacatctatcacaaggacttaaaagaaaatagaagagttggccgggcgcagtggctcacgcctgtaatccctgcactttgggaggccgaggcaggtggatcacgaagtcaggagatcgagaccatcctggctaacacgcatcctaatgtcctatgatcacgtggaactcacattcaatgacatgaagaacgtgccagaagccttcaaagggaccaagaaaggcactgtctaccttaccccttaccgggtcatctttctgtccaagggcaaggatgccatgcagtccttcatgatgccattttatctcatgaaagactgtgagatcaagcagcccgtatttggtgcaaactacatcaagggaacagtgaaggcggaagcgggaggtggctgggaaggctctgcttcctacaagttgactttcacggcagggggcgccattgagttcggacagcggatgctccaggtggcatctcaagcctccagaggtgaagtccccagtggagcctatggctactcttacatgcccagcggggcctatgtctatcccccgccagtcgccaatggaatgtacccctgccctcctggctacccctatccaccggccccacctgagttctatccaggaccccccatgatggacggggccatgggatacgtgcagcccccaccaccgccctaccctgggcccatggaacctccggtcagcggccccgatgtcccctccactcctgcagccgaagccaaggccgcagaagcagccgccagcgcctattacaacccaggcaatcctcacaacgtctacatgcccacgagccagccgccgccacctccctactacccaccggaagataagaagacccagtaggccctcctgcctccctgcctcccaccctcatctctctaccctacccctcccatcggggctgtgctggggcttggggaggggagggggcgccttgttctccctccaggtctgatcataaacaattaccaggaactagcattgtgggacattagggcccccggcctcgggagaggtgccgcccagcttcccatgccagcccggagcccacagtgctgcccagcgtacctccctcaccgtctggggctcttctgggagcacggagcatcccctgttcctgtttcactctcagcttctcccctcgaagggactctctggccacctcctccaccgcagtccagctccctcagtctggcacccactgctacactcagcctcatgagccacttcagaccagccaggtgtcttcccgggccctgccagaccctgctcacattccctctgctggtctgtgctggtctcagaaggccaccgcgcccgcattccactcagccagggtccagctgcagcccccgccacccttccttcccttccctgtcctgggtcatgttgttgccaccctgtgtgacttttgaagctgtaaaatgagcttccagggcttgggtggcgtcggggcagggccgccgaggctgggaggaagcccttctgccttttgctggtgtttctggaatttgctttccctcacctctcacttccttctagaaggagcttcctgactggaaccagagaatgcatgtctgtccacttggtggctgctgggtggggccgggaacaagggcccctgaccctgtgtgctggccgggacctgccaccagccccccagcctgcttcttccccttaagctttgtgcccctggatgcgctaacattcactcttgtttgtccctggactggccatgaagtgaggagatggttatttaaagagaattccctatttatttgacaaaaaatccagttaatatattaatgtgaaataaaccctgtttgcacctcgatttgtttgctgaaaatgtgaaatagtaaaaatgaaataactgg

SEQ ID NO: 75300 - DNA, 1696 bp, Homo sapiens
gattggctgactctaataagaagacgccactaggggcggggcgaagaggggcgcaagctcattgcgttttgagtctcgggacccctgttggagagactatggcgctcaacaagaatcactcggagggcggcggagtgatcgtcaataacaccgagagcatcctaatgtcctatgatcacgtggaactcacattcaatgacatgaagaacgtgccagaagccttcaaagggaccaagaaaggcactgtctaccttaccccttaccgggtcatctttctgtccaagggcaaggatgccatgcagtccttcatgatgccattttatctcatgaaagactgtgagatcaagcagcccgtatttggtgcaaactacatcaagggaacagtgaaggcggaagcgggaggtggctgggaaggctctgcttcctacaagttgactttcacggcagggggcgccattgagttcggacagcggatgctccaggtggcatctcaagcggtcagcggccccgatgtcccctccactcctgcagccgaagccaaggccgcagaagcagccgccagcgcctattacaacccaggcaatcctcacaacgtctacatgcccacgagccagccgccgccacctccctactacccaccggaagataagaagacccagtaggccctcctgcctccctgcctcccaccctcatctctctaccctacccctcccatcggggctgtgctggggcttggggaggggagggggcgccttgttctccctccaggtctgatcataaacaattaccaggaactagcattgtgggacattagggcccccggcctcgggagaggtgccgcccagcttcccatgccagcccggagcccacagtgctgcccagcgtacctccctcaccgtctggggctcttctgggagcacggagcatcccctgttcctgtttcactctcagcttctcccctcgaagggactctctggccacctcctccaccgcagtccagctccctcagtctggcacccactgctacactcagcctcatgagccacttcagaccagccaggtgtcttcccgggccctgccagaccctgctcacattccctctgctggtctgtgctggtctcagaaggccaccgcgcccgcattccactcagccagggtccagctgcagcccccgccacccttccttcccttccctgtcctgggtcatgttgttgccaccctgtgtgacttttgaagctgtaaaatgagcttccagggcttgggtggcgtcggggcagggccgccgaggctgggaggaagcccttctgccttttgctggtgtttctggaatttgctttccctcacctctcacttccttctagaaggagcttcctgactggaaccagagaatgcatgtctgtccacttggtggctgctgggtggggccgggaacaagggcccctgaccctgtgtgctggccgggacctgccaccagccccccagcctgcttcttccccttaagctttgtgcccctggatgcgctaacattcactcttgtttgtccctggactggccatgaagtgaggagatggttatttaaagagaattccctatttatttgacaaaaaatccagttaatatattaatgtgaaataaaccctgtttgcacctcgatttgtttgctgaaaatgtgaaatagtaaaaatgaaataactgg

SEQ ID NO: 75301 - DNA, 1804 bp, Homo sapiens
tgtggacgtaagacaaacacgtgctcgtcctttaatggagttcaccagcacacttgttaaccagtcctgtttgctttcgtctttttttgtgcgtaataaagtcaactgaccaagtgtccaagaaaggcactgtctaccttaccccttaccgggtcatctttctgtccaagggcaaggatgccatgcagtccttcatgatgccattttatctcatgaaagactgtgagatcaagcagcccgtatttggtgcaaactacatcaagggaacagtgaaggcggaagcgggaggtggctgggaaggctctgcttcctacaagttgactttcacggcagggggcgccattgagttcggacagcggatgctccaggtggcatctcaagcctccagaggtgaagtccccagtggagcctatggctactcttacatgcccagcggggcctatgtctatcccccgccagtcgccaatggaatgtacccctgccctcctggctacccctatccaccggccccacctgagttctatccaggaccccccatgatggacggggccatgggatacgtgcagcccccaccaccgccctaccctgggcccatggaacctccggtcagcggccccgatgtcccctccactcctgcagccgaagccaaggccgcagaagcagccgccagcgcctattacaacccaggcaatcctcacaacgtctacatgcccacgagccagccgccgccacctccctactacccaccggaagataagaagacccagtaggccctcctgcctccctgcctcccaccctcatctctctaccctacccctcccatcggggctgtgctggggcttggggaggggagggggcgccttgttctccctccaggtctgatcataaacaattaccaggaactagcattgtgggacattagggcccccggcctcgggagaggtgccgcccagcttcccatgccagcccggagcccacagtgctgcccagcgtacctccctcaccgtctggggctcttctgggagcacggagcatcccctgttcctgtttcactctcagcttctcccctcgaagggactctctggccacctcctccaccgcagtccagctccctcagtctggcacccactgctacactcagcctcatgagccacttcagaccagccaggtgtcttcccgggccctgccagaccctgctcacattccctctgctggtctgtgctggtctcagaaggccaccgcgcccgcattccactcagccagggtccagctgcagcccccgccacccttccttcccttccctgtcctgggtcatgttgttgccaccctgtgtgacttttgaagctgtaaaatgagcttccagggcttgggtggcgtcggggcagggccgccgaggctgggaggaagcccttctgccttttgctggtgtttctggaatttgctttccctcacctctcacttccttctagaaggagcttcctgactggaaccagagaatgcatgtctgtccacttggtggctgctgggtggggccgggaacaagggcccctgaccctgtgtgctggccgggacctgccaccagccccccagcctgcttcttccccttaagctttgtgcccctggatgcgctaacattcactcttgtttgtccctggactggccatgaagtgaggagatggttatttaaagagaattccctatttatttgacaaaaaatccagttaatatattaatgtgaaataaaccctgtttgcacctcgatttgtttgctgaaaatgtgaaatagtaaaaatgaaataactgg

SEQ ID NO: 75302 - DNA, 1553 bp, Homo sapiens
atagaagatccccgaacgggtgatgcggttgcgggaggtggctgggaaggctctgcttcctacaagttgactttcacggcagggggcgccattgagttcggacagcggatgctccaggtggcatctcaagcctccagaggtgaagtccccagtggagcctatggctactcttacatgcccagcggggcctatgtctatcccccgccagtcgccaatggaatgtacccctgccctcctggctacccctatccaccggccccacctgagttctatccaggaccccccatgatggacggggccatgggatacgtgcagcccccaccaccgccctaccctgggcccatggaacctccggtcagcggccccgatgtcccctccactcctgcagccgaagccaaggccgcagaagcagccgccagcgcctattacaacccaggcaatcctcacaacgtctacatgcccacgagccagccgccgccacctccctactacccaccggaagataagaagacccagtaggccctcctgcctccctgcctcccaccctcatctctctaccctacccctcccatcggggctgtgctggggcttggggaggggagggggcgccttgttctccctccaggtctgatcataaacaattaccaggaactagcattgtgggacattagggcccccggcctcgggagaggtgccgcccagcttcccatgccagcccggagcccacagtgctgcccagcgtacctccctcaccgtctggggctcttctgggagcacggagcatcccctgttcctgtttcactctcagcttctcccctcgaagggactctctggccacctcctccaccgcagtccagctccctcagtctggcacccactgctacactcagcctcatgagccacttcagaccagccaggtgtcttcccgggccctgccagaccctgctcacattccctctgctggtctgtgctggtctcagaaggccaccgcgcccgcattccactcagccagggtccagctgcagcccccgccacccttccttcccttccctgtcctgggtcatgttgttgccaccctgtgtgacttttgaagctgtaaaatgagcttccagggcttgggtggcgtcggggcagggccgccgaggctgggaggaagcccttctgccttttgctggtgtttctggaatttgctttccctcacctctcacttccttctagaaggagcttcctgactggaaccagagaatgcatgtctgtccacttggtggctgctgggtggggccgggaacaagggcccctgaccctgtgtgctggccgggacctgccaccagccccccagcctgcttcttccccttaagctttgtgcccctggatgcgctaacattcactcttgtttgtccctggactggccatgaagtgaggagatggttatttaaagagaattccctatttatttgacaaaaaatccagttaatatattaatgtgaaataaaccctgtttgcacctcgatttgtttgctgaaaatgtgaaatagtaaaaatgaaataactgg

SEQ ID NO: 75303 - DNA, 948 bp, Homo sapiens
gattggctgactctaataagaagacgccactaggggcggggcgaagaggggcgcaagctcattgcgttttgagtctcgggacccctgttggagagactatggcgctcaacaagaatcactcggagggcggcggagtgatcgtcaataacaccgagagcatcctaatgtcctatgatcacgtggaactcacattcaatgacatgaagaacgtgccagaagccttcaaagggaccaagaaaggcactgtctaccttaccccttaccgggtcatctttctgtccaagggcaaggatgccatgcagtccttcatgatgccattttatctcatgaaagactgtgagatcaagcagcccgtatttggtgcaaactacatcaagggaacagtgaaggcggaagcgggaggtggctgggaaggctctgcttcctacaagttgactttcacggcagggggcgccattgagttcggacagcggatgctccaggtggcatctcaagcctccagaggtgaagtccccagtggagcctatggctactcttacatgcccagcggggcctatgtctatcccccgccagtcgccaatggaatgtacccctgccctcctggctacccctatccaccggccccacctgagtctatcgcaggaccgacccatgatggacgggggcaatgggaatacgtgcaggccacgaagaaacagaccatagccttgaggccatgggaacacacagggtcaaggggcccagagggtacccctacagtacctggaagccgaaagccaagagcagcagaaggcagaggcagagagacctaattacaacccaaggacaatcctccaagaagggtacgagcgtagccaacgaggcaaggcgccgcagaccaccctaagtagcccagcgggaaggataagaaagaccacagtaaggcccaccagggctcactggactcga

SEQ ID NO: 75304 - DNA, 1620 bp, Homo sapiens
cccgatgtcgcacagagagcctcagaatggccagagactgctgagagccgcagatgatggatgacccctggactaccccaggggcccagcagggctgtggcctggtggagcggagctagattctggccccacccccatcccttagctatccatgtgccctgggcggggaaggtcaccctgtgtgcctctcgatcctctcatctacactcagctggtcggtcacagtggcacctggggcattggctcaaggattagatgaggtgagacatgcgatgggcctggaaaggaccgtgccagcgcgtggcatgtgctcaggaaacctcacctgctgctctcattggtggaactggacccccagcaccagctgccccgagccatgggggcccggggtctcttagctgagctcagggtggaggagaacttgtcaccgacaccaggtgtgtttgctctcacagccgaagccaaggccgcagaagcagccgccagcgcctattacaacccaggcaatcctcacaacgtctacatgcccacgagccagccgccgccacctccctactacccaccggaagataagaagacccagtaggccctcctgcctccctgcctcccaccctcatctctctaccctacccctcccatcggggctgtgctggggcttggggaggggagggggcgccttgttctccctccaggtctgatcataaacaattaccaggaactagcattgtgggacattagggcccccggcctcgggagaggtgccgcccagcttcccatgccagcccggagcccacagtgctgcccagcgtacctccctcaccgtctggggctcttctgggagcacggagcatcccctgttcctgtttcactctcagcttctcccctcgaagggactctctggccacctcctccaccgcagtccagctccctcagtctggcacccactgctacactcagcctcatgagccacttcagaccagccaggtgtcttcccgggccctgccagaccctgctcacattccctctgctggtctgtgctggtctcagaaggccaccgcgcccgcattccactcagccagggtccagctgcagcccccgccacccttccttcccttccctgtcctgggtcatgttgttgccaccctgtgtgacttttgaagctgtaaaatgagcttccagggcttgggtggcgtcggggcagggccgccgaggctgggaggaagcccttctgccttttgctggtgtttctggaatttgctttccctcacctctcacttccttctagaaggagcttcctgactggaaccagagaatgcatgtctgtccacttggtggctgctgggtggggccgggaacaagggcccctgaccctgtgtgctggccgggacctgccaccagccccccagcctgcttcttccccttaagctttgtgcccctggatgcgctaacattcactcttgtttgtccctggactggccatgaagtgaggagatggttatttaaagagaattccctatttatttgacaaaaaatccagttaatatattaatgtgaaataaaccctgtttgcacctcgatttgtttgctgaaaatgtgaaatagtaaaaatgaaataactgg

SEQ ID NO: 75305 - DNA, 652 bp, Homo sapiens
gattggctgactctaataagaagacgccactaggggcggggcgaagaggggcgcaagctcattgcgttttgagtctcgggacccctgttggagagactatggcgctcaacaagaatcactcggagggcggcggagtgatcgtcaataacaccgagagcatcctaatgtcctatgatcacgtggaactcacattcaatgacatgaagaacgtgccagaagccttcaaagggaccaagaaaggcactgtctaccttaccccttaccgggtcatctttctgtccaagggcaaggatgccatgcagtccttcatgatgccattttatctcatgaaagactgtgagatcaagcagcccgtatttggtgcaaactacatcaagggaacagtgaaggcggaagcgggaggtggctgggaaggctctgcttcctacaagttgactttcacggcagggggcgccattgagttcggacagcggatgctccaggtggcatctcaagcctccagaggtgaagtccccagtggagcctatggctactcttacatgcccagcggggcctatgtctatcccccgccagtcgccaatggaatgtacccctgccctcctgggtagccgtatgcaggcccgggcggcatgatgcagagcgatgataagga

SEQ ID NO: 75306 - DNA, 1067 bp, Homo sapiens
tccgctaccataatcatcgctatagccagccgccgccacctccctactacccaccggaagataagaagacccagtaggccctcctgcctccctgcctcccaccctcatctctctaccctacccctcccatcggggctgtgctggggcttggggaggggagggggcgccttgttctccctccaggtctgatcataaacaattaccaggaactagcattgtgggacattagggcccccggcctcgggagaggtgccgcccagcttcccatgccagcccggagcccacagtgctgcccagcgtacctccctcaccgtctggggctcttctgggagcacggagcatcccctgttcctgtttcactctcagcttctcccctcgaagggactctctggccacctcctccaccgcagtccagctccctcagtctggcacccactgctacactcagcctcatgagccacttcagaccagccaggtgtcttcccgggccctgccagaccctgctcacattccctctgctggtctgtgctggtctcagaaggccaccgcgcccgcattccactcagccagggtccagctgcagcccccgccacccttccttcccttccctgtcctgggtcatgttgttgccaccctgtgtgacttttgaagctgtaaaatgagcttccagggcttgggtggcgtcggggcagggccgccgaggctgggaggaagcccttctgccttttgctggtgtttctggaatttgctttccctcacctctcacttccttctagaaggagcttcctgactggaaccagagaatgcatgtctgtccacttggtggctgctgggtggggccgggaacaagggcccctgaccctgtgtgctggccgggacctgccaccagccccccagcctgcttcttccccttaagctttgtgcccctggatgcgctaacattcactcttgtttgtccctggactggccatgaagtgaggagatggttatttaaagagaattccctatttatttgacaaaaaatccagttaatatattaatgtgaaataaaccctgtttgcacctcg

SEQ ID NO: 75307 - DNA, 991 bp, Homo sapiens
cggacgcgtgggtcgacccacgcgtccctcatctctctaccctacccctcccatcggggctgtgctggggcttggggaggggagggggcgccttgttctccctccaggtctgatcataaacaattaccaggaactagcattgtgggacattagggcccccggcctcgggagaggtgccgcccagcttcccatgccagcccggagcccacagtgctgcccagcgtacctccctcaccgtctggggctcttctgggagcacggagcatcccctgttcctgtttcactctcagcttctcccctcgaagggactctctggccacctcctccaccgcagtccagctccctcagtctggcacccactgctacactcagcctcatgagccacttcagaccagccaggtgtcttcccgggccctgccagaccctgctcacattccctctgctggtctgtgctggtctcagaaggccaccgcgcccgcattccactcagccagggtccagctgcagcccccgccacccttccttcccttccctgtcctgggtcatgttgttgccaccctgtgtgacttttgaagctgtaaaatgagcttccagggcttgggtggcgtcggggcagggccgccgaggctgggaggaagcccttctgccttttgctggtgtttctggaatttgctttccctcacctctcacttccttctagaaggagcttcctgactggaaccagagaatgcatgtctgtccacttggtggctgctgggtggggccgggaacaagggcccctgaccctgtgtgctggccgggacctgccaccagccccccagcctgcttcttccccttaagctttgtgcccctggatgcgctaacattcactcttgtttgtccctggactggccatgaagtgaggagatggttatttaaagagaattccctatttatttgacaaaaaatccagttaatatattaatgtgaaataaaccctgtttgcacctcg

SEQ ID NO: 75308 - DNA, 880 bp, Homo sapiens
gattggctgactctaataagaagacgccactaggggcggggcgaagaggggcgcaagctcattgcgttttgagtctcgggacccctgttggagagactatggcgctcaacaagaatcactcggagggcggcggagtgatcgtcaataacaccgagagcatcctaatgtcctatgatcacgtggaactcacattcaatgacatgaagaacgtgccagaagccttcaaagggaccaagaaaggcactgtctaccttaccccttaccgggtcatctttctgtccaagggcaaggatgccatgcagtccttcatgatgccattttatctcatgaaagactgtgagatcaagcagcccgtatttggtgcaaactacatcaagggaacagtgaaggcggaagcgggaggtggctgggaaggctctgcttcctacaagttgactttcacggcagggggcgccattgagttcggacagcggatgctccaggtggcatctcaaggtatccaggctccgaagattaggggctaaagacacactaaacatgtaggggtttggtatgagtttgcttccttttcgttttgctttttcaagaactcaagaggtaagtgtttgggcaccaggctgaccaggcctaggagttgggaaggaaagctgtcattggcatcagctctgtcctgtacctcagagactgcgtttccctgcctggggcaggtggatgacgttttgacaaagctgtttggactcaaggacactttactatggcctcataaaacaaacactaaaccaaccattcgactgcggttccgcagccattgaaaatgaccgagggatgggccagcagacatcctccgccagctcactcctaccccagccctgagcctccc

SEQ ID NO: 75309 - DNA, 934 bp, Homo sapiens
gattggctgactctaataagaagacgccactaggggcggggcgaagaggggcgcaagctcattgcgttttgagtctcgggacccctgttggagagactatggcgctcaacaagaatcactcggagggcggcggagtgatcgtcaataacaccgagagcatcctaatgtcctatgatcacgtggaactcacattcaatgacatgaagaacgtgccagaagccttcaaagggaccaagaaaggcactgtctaccttaccccttaccgggtcatctttctgtccaagggcaaggatgccatgcagtccttcatgatgccattttatctcatgaaagactgtgagatcaagcagcccgtatttggtgcaaactacatcaagggaacagtgaaggcggaagcgggaggtaggtgatgggaactcagggacacgcatggggcctgcagggaggtgtcctgggaacctctgactgccgccgtgggggcgtccccttcagacccttatcgccctagccatgacctcttcccagctctgggctgccagctggtggggtttgattgccaagaggtggggaaaatgctggcatgaaagacagcagctcagatcagcttttcagagcgtgaagtctgcagaagcctgcggactgagtcaagatgcttagtgcaacttggcgagcgcatacaaattttagactcaggaaggagctgcatcaggttcttgagaggggccttttcatgagagccaggaagaggcagctgcctctgggaagccagagtcaccctgctttggggctggctttttggcaggccccagagacctctgcattgaacttgccttccccttgacacccagccaggcccgcccttgctattgagacactcttggtccccctttgggcagaagccaggctagaggggccggagtctgtccttgggccc

SEQ ID NO: 75310 - DNA, 729 bp, Homo sapiens
gagataggcagaagagggccgggggttgaatcggcacggaggctatggcgctcaacaagaatcactcggagggcggcggagtgatcgtcaataacaccgagaggtgaaaacactgcggaaggatcctggaggaccaaagttcgggtgtcgaggaagtgggcggtgggtggtgggtggtggggaataagcccctgaagagggagcactgatggagtgaggtcatctttctgtccaagggcaaggatgccatgcagtccttcatgatgccattttatctcatgaaagactgtgagatcaagcagcccgtatttggtgcaaactacatcaagggaacagtgaaggcggaagcgggaggtggctgggaaggctctgcttcctacaagttgactttcacggcagggggcgccattgagttcggacagcggatgctccaggtggcatctcaagcctccagaggtgaagtccccagtggagcctatggctactcttacatgcccagcggggcctatgtctatcccccgccagtcgccaatggaatgtacccctgccctcctggctacccctatccaccggccccacctgagttctatccaggaccccccatgatggacggggccatgggatacgtgcagcccccaccaccgccctaccctgggcccatggaacctccggtcagcggccccgatgtcccctccactcctgcaggtgagggcccttgggtgctggcag

SEQ ID NO: 75311 - DNA, 425 bp, Homo sapiens
tggaggagaacttgtcaccgacaccaggtgtgtttgctctcacagccgaagccaaggccgcagaagcagccgccagcgcctattacaacccaggcaatcctcacaacgtctacatgcccacggtgagagggcttggcagtgccggtgcagccccacagccgcagatgctgggagccgcagggggatgaccgcaccatgttttaaaccttctaatgcaagtctctcctttctcccttctttagagccagccgccgccacctccctactacccaccggaagataagaagacccagtaggccctcctgcctccctgcctcccaccctcatctctctaccctacccctcccatcggggctgtgctggggcttggggaggggagggggcgccttgttctccctccaggtctgatcataaacaattaccag

SEQ ID NO: 75312 - DNA, 1101 bp, Homo sapiens
  misc_feature (13)..(13): n is a, c, g, or t
  misc_feature (18)..(18): n is a, c, g, or t
aattcgcggccgntacgnacacggctgcgagaagacgacggggagtgcagagctgctgtcatggcggccgctctgtggggcttctttcccgtcctgctgctgctgctgctatcgggggatgtccagagctcggaggtgcccggggctgctgctgagggatcgggagggagtggggtcggcataggagatcgcttcaagattgaggggcgtgcagttgttccaggggtgaagcctcaggactggatctcggcggcccgagtgctggtagacggagaagagcacgtcggtttccttaagacagatgggagttttgtggttcatgatataccttctggatcttatgtagtggaagttgtatctccagcttacagatttgatcccgttcgagtggatatcacttcgaaaggaaaaatgagagcaagatatgtgaattacatcaaaacatcagaggttgtcagactgccctatcctctccaaatgaaatcttcaggtccaccttcttactttattaaaagggaatcgtggggctggacagactttctaatgaacccaatggttatgatgatggttcttcctttattgatatttgtgcttctgcctaaagtggtcaacacaagtgatcctgacatgagacgggaaatggagcagtcaatgaatatgctgaattccaaccatgagttgcctgatgtttctgagttcatgacaagactcttctcttcaaaatcatctggcaaatctagcagcggcagcagtaaaacaggcaaaagtggggctggcaaaaggaggtagtcaggccgtccagagctggcatttgcacaaacacggcaacactgggtggcatccaagtcttggaaaaccgtgtgaagcaactactataaacttgagtcatcccgacgttgatctcttacaactgtgtatgttaactttttagcacatgttttgtacttggtacacgagaaaacccagctttcatcttttgtctgtatgaggtcaatattgatgtcactgaattaattacagtgtcctatagaaaatgccattaataaattatatgaactactatacattatgtatattaattaaaacatcttaatccagaaa

SEQ ID NO: 75313 - DNA, 1495 bp, Homo sapiens
gacagaaacgggcgcgcagtgatgacaacatcaagccgccagcggcggcggtggcggccgggagactgggagggcttccggggctgccggtctgagtgcagagctgctgtcatggcggccgctctgtggggcttctttcccgtcctgctgctgctgctgctatcgggggatgtccagagctcggaggtgcccggggctgctgctgagggatcgggagggagtggggtcggcataggagatcgcttcaagattgaggggcgtgcagttgttccaggggtgaagcctcaggactggatctcggcggcccgagtgctggtagacggagaagagcacgtcggtttccttaagacagatgggagttttgtggttcatgatataccttctggatcttatgtagtggaagttgtatctccagcttacagatttgatcccgttcgagtggatatcacttcgaaaggaaaaatgagagcaagatatgtgaattacatcaaaacatcagaggttgtcagactgccctatcctctccaaatgaaatcttcaggtccaccttcttactttattaaaagggaatcgtggggctggacagactttctaatgaacccaatggttatgatgatggttcttcctttattgatatttgtgcttctgcctaaagtggtcaacacaagtgatcctgacatgagacgggaaatggagcagtcaatgaatatgctgaattccaaccatgagttgcctgatgtttctgagttcatgacaagactcttctcttcaaaatcatctggcaaatctagcagcggcagcagtaaaacaggcaaaagtggggctggcaaaaggaggtagtcaggccgtccagagctggcatttgcacaaacacggcaacactgggtggcatccaagtcttggaaaaccgtgtgaagcaactactataaacttgagtcatcccgacgttgatctcttacaactgtgtatgttaactttttagcacatgttttgtacttggtacacgagaaaacccagctttcatcttttgtctgtatgaggtcaatattgatgtcactgaattaattacagtgtcctatagaaaatgccattaataaattatatgaactactataaaaaaaaaaaaaaaaaaaaaaaaaaaaaaaaaaaaaaaaaaaaatgttttttaaaaggggaggagggggggaaaaaaaattccggggggggccaaagttagggggaacggttttttggtgaaaaaggggggccaaataggggggagggtatattaaaaacaagagacggggggccgagatttaaacaacgcggtgggaggggacaacaggtggcagctggggaaatctggtgggaaagggaacccaatgtcgggggggagacataggggaaataaccaagagattaaggtcgggggcaatataaaattgagggttcagtggtcacacacgaatgtgcgccggaaattggcgcggaataatggaactttccgagggagtaa

SEQ ID NO: 75314 - DNA, 1172 bp, Homo sapiens
gacagaaacgggcgcgcagtgatgacaacatcaagccgccagcggcggcggtggcggccgggagactgggagggcttccggggctgccggtctgagtgcagagctgctgtcatggcggccgctctgtggggcttctttcccgtcctgctgctgctgctgctatcgggggatgtccagagctcggaggtgcccggggctgctgctgagggatcgggagggagtggggtcggcataggagatcgcttcaagattgaggggcgtgcagttgttccaggggtgaagcctcaggactggatctcggcggcccgagtgctggtagacggagaagagcacgtcggtttccttaagacagatgggagttttgtggttcatgatataccttctggatcttatgtagtggaagttgtatctccagcttacagatttgatcccgttcgagtggatatcacttcgaaaggaaaaatgagagcaagatatgtgaattacatcaaaacatcagaggttgtcagactgccctatcctctccaaatgaaatcttcaggtccaccttcttactttattaaaagggaatcgtggggctggacagactttctaatgaacccaatggttatgatgatggttcttcctttattgatatttgtgcttctgcctaaagtggtcaacacaagtgatcctgacatgagacgggaaatggagcagtcaatgaatatgctgaattccaaccatgagttgcctgatgtttctgagttcatgacaagactcttctcttcaaaatcatctggcaaatctagcagcggcagcagtaaaacaggcaaaagtggggctggcaaaaggaggtagtcaggccgtccagagctggcatttgcacaaacacggcaacactgggtggcatccaagtcttggaaaaccgtgtgaagcaactactataaacttgagtcatcccgacgttgatctcttacaactgtgtatgttaactttttcgcccccgccgcccgccggcccccccccccccccgcgcccccgctcccaccgcccgccgcctcccccaaccgccgcgcccccgccccccggcgccccaccgccccccccccgcgggctaaattatatgaactactatacattatgtatattaattaaggcatcttaatccagaacaacaccagggggaaaaa

SEQ ID NO: 75315 - DNA, 947 bp, Homo sapiens
agctcggtaccgattacgctcctagacggggagatcgcttcaagattgaggggcgtgcagttgttccaggggtgaagcctcaggactggatctcggcggcccgagtgctggtagacggagaagagcacgtcggtttccttaagacagatgggagttttgtggttcatgatataccttctggatcttatgtagtggaagttgtatctccagcttacagatttgatcccgttcgagtggatatcacttcgaaaggaaaaatgagagcaagatatgtgaattacatcaaaacatcagaggttgtcagactgccctatcctctccaaatgaaatcttcaggtccaccttcttactttattaaaagggaatcgtggggctggacagactttctaatgaacccaatggttatgatgatggttcttcctttattgatatttgtgcttctgcctaaagtggtcaacacaagtgatcctgacatgagacgggaaatggagcagtcaatgaatatgctgaattccaaccatgagttgcctgatgtttctgagttcatgacaagactcttctcttcaaaatcatctggcaaatctagcagcggcagcagtaaaacaggcaaaagtggggctggcaaaaggaggtagtcaggccgtccagagctggcatttgcacaaacacggcaacactgggtggcatccaagtcttggaaaaccgtgtgaagcaactactataaacttgagtcatcccgacgttgatctcttacaactgtgtatgttaactttttagcacatgttttgtacttggtacacgagaaaacccagctttcatcttttgtctgtatgaggtcaatattgatgtcactgaattaattacagtgtcctatagaaaatgccattaataaattatatgaactactatacattatgtatattaattaaaacatcttaatccagaaa

SEQ ID NO: 75316 - DNA, 940 bp, Homo sapiens
  misc_feature (13)..(13): n is a, c, g, or t
  misc_feature (18)..(18): n is a, c, g, or t
aattcgcggccgntacgnacacggctgcgagaagacgacggggagtgcagagctgctgtcatggcggccgctctgtggggcttctttcccgtcctgctgctgctgctgctatcgggggatgtccagagctcggaggacagatgggagttttgtggttcatgatataccttctggatcttatgtagtggaagttgtatctccagcttacagatttgatcccgttcgagtggatatcacttcgaaaggaaaaatgagagcaagatatgtgaattacatcaaaacatcagaggttgtcagactgccctatcctctccaaatgaaatcttcaggtccaccttcttactttattaaaagggaatcgtggggctggacagactttctaatgaacccaatggttatgatgatggttcttcctttattgatatttgtgcttctgcctaaagtggtcaacacaagtgatcctgacatgagacgggaaatggagcagtcaatgaatatgctgaattccaaccatgagttgcctgatgtttctgagttcatgacaagactcttctcttcaaaatcatctggcaaatctagcagcggcagcagtaaaacaggcaaaagtggggctggcaaaaggaggtagtcaggccgtccagagctggcatttgcacaaacacggcaacactgggtggcatccaagtcttggaaaaccgtgtgaagcaactactataaacttgagtcatcccgacgttgatctcttacaactgtgtatgttaactttttagcacatgttttgtacttggtacacgagaaaacccagctttcatcttttgtctgtatgaggtcaatattgatgtcactgaattaattacagtgtcctatagaaaatgccattaataaattatatgaactactatacattatgtatattaattaaaacatcttaatccagaaa

SEQ ID NO: 75317 - DNA, 1100 bp, Homo sapiens
  misc_feature (113)..(113): n is a, c, g, or t
  misc_feature (122)..(122): n is a, c, g, or t
  misc_feature (140)..(140): n is a, c, g, or t
  misc_feature (182)..(182): n is a, c, g, or t
tgggggctttcttttccccgtcccttgcctgcttgcctgctggctaattcggggggatggtcccaagagccttcgggaagggtggccccccgggggcttggcttggcttgaangggaatccngggaaggggaaggtgggnggtccgggcattagggaagatccgcctttcaaggaattgaangggccggtgccagtttggtcccaaggggtggaagcccttaagaactgggatctcggccggccccgagttgccttggtaagacgggagaaagagccacgtcgggtttccttaaagacagatgggagttttgtggttcatgatataccttctggatcttatgtagtggaagttgtatctccagcttacagatttgatcccgttcgagtggatatcacttcgaaaggaaaaatgagagcaagatatgtgaattacatcaaaacatcagaggttgtcagactgccctatcctctccaaatgaaatcttcaggtccaccttcttactttattaaaagggaatcgtggggctggacagactttctaatgaacccaatggttatgatgatggttcttcctttattgatatttgtgcttctgcctaaagtggtcaacacaagtgatcctgacatgagacgggaaatggagcagtcaatgaatatgctgaattccaaccatgagttgcctgatgtttctgagttcatgacaagactcttctcttcaaaatcatctggcaaatctagcagcggcagcagtaaaacaggcaaaagtggggctggcaaaaggaggtagtcaggccgtccagagctggcatttgcacaaacacggcaacactgggtggcatccaagtcttggaaaaccgtgtgaagcaactactataaacttgagtcatcccgacgttgatctcttacaactgtgtatgttaactttttagcacatgttttgtacttggtacacgagaaaacccagctttcatcttttgtctgtatgaggtcaatattgatgtcactgaattaattacagtgtcctatagaaaatgccattaataaattatatgaactactatacattatgtatattaattaaaacatcttaatccagaaa

SEQ ID NO: 75318 - DNA, 1032 bp, Homo sapiens
gacagaaacgggcgcgcagtgatgacaacatcaagccgccagcggcggcggtggcggccgggagactgggagggcttccggggctgccggtctgagtgcagagctgctgtcatggcggccgctctgtggggcttctttcccgtcctgctgctgctgctgctatcgggggatgtccagagctcggaggtgcccggggctgctgctgagggatcgggagggagtggggtcggcataggagatcgcttcaagattgaggggcgtgcagttgttccaggggtgaagcctcaggactggatctcggcggcccgagtgctggtagacggagaagagcacgtcggtttccttaaagcaagatatgtgaattacatcaaaacatcagaggttgtcagactgccctatcctctccaaatgaaatcttcaggtccaccttcttactttattaaaagggaatcgtggggctggacagactttctaatgaacccaatggttatgatgatggttcttcctttattgatatttgtgcttctgcctaaagtggtcaacacaagtgatcctgacatgagacgggaaatggagcagtcaatgaatatgctgaattccaaccatgagttgcctgatgtttctgagttcatgacaagactcttctcttcaaaatcatctggcaaatctagcagcggcagcagtaaaacaggcaaaagtggggctggcaaaaggaggtagtcaggccgtccagagctggcatttgcacaaacacggcaacactgggtggcatccaagtcttggaaaaccgtgtgaagcaactactataaacttgagtcatcccgacgttgatctcttacaactgtgtatgttaactttttagcacatgttttgtacttggtacacgagaaaacccagctttcatcttttgtctgtatgaggtcaatattgatgtcactgaattaattacagtgtcctatagaaaatgccattaataaattatatgaactactatacattatgtatattaattaaaacatcttaatccagaaa

SEQ ID NO: 75319 - DNA, 501 bp, Homo sapiens
gacagaaacgggcgcgcagtgatgacaacatcaagccgccagcggcggcggtggcggccgggagactgggagggcttccggggctgccggtctgagtgcagagctgctgtcatggcggccgctctgtggggcttctttcccgtcctgctgctgctgctgctatcgggggatgtccagagctcggaggtgcccggggctgctgctgagggatcgggagggagtggggtcggcataggagatcgcttcaagattgaggggcgtgcagttgttccaggggtgaagcctcaggactggatctcggcggcccgagtgctggtagacggagaagagcacgtcggtttccttaacatggtaccaggtgtaatctccctgaactggctatgtgcaagaagacttccttcagagatttcaggcttcctccaaggaatctgcaatgcatatagacacttatggattttctcctcaatacctgtgagagaaatactgtaattttgttttata

SEQ ID NO: 75320 - DNA, 1152 bp, Homo sapiens
gacagaaacgggcgcgcagtgatgacaacatcaagccgccagcggcggcggtggcggccgggagactgggagggcttccggggctgccggtctgagtgcagagctgctgtcatggcggccgctctgtggggcttctttcccgtcctgctgctgctgctgctatcgggggatgtccagagctcggaggtgcccggggctgctgctgagggatcgggagggagtggggtcggcataggagatcgcttcaagattgaggggcgtgcagttgttccaggggtgaagcctcaggactggatctcggcggcccgagtgctggtagacggagaagagcacgtcggtttccttaagacagatgggagttttgtggttcatgatataccttctggatcttatgtagtggaagttgtatctccagcttacagatttgatcccgttcgagtggatatcacttcgaaaggaaaaatgagagcaagatatgtgaattacatcaaaacatcagaggttgtcagactgccctatcctctccaaatgaaatcttcaggtccaccttcttactttattaaaagggaatcgtggggctggacagactttctaatgaacccaatggttatgatgatggttcttcctttattgatatttgtgcttctgcctaaagtggtcaacacaagtgatcctgacatgagacgggaaatggagcagtcaatgaatatgctgaattccaaccatgagttgcctgatgtttctgagttcatgacaagactcttctcttcaaaatcatctggcaaatctagcagcggcagcagtaaaacaggcaaaagtggggctggcaaaaggaggtagtcaggccgtccagagctggcatttgcacaaacacggcaacactgggtggcatccaagtcttggaaaaccgtgtgaagcaactactataaacttgagtcatcccgacgttgatctcttacaactgtgtatgttaactttttagcacatgttttgtacttggtacacgagaaaacccagctttcatcttttgtctgtatgaggtcaatattgatgtcactgaattaattacagtgtcctatagaaaatgccattaataaattatatgaactactatacattatgtatattaattaaaacatcttaatccagaaa

SEQ ID NO: 75321 - DNA, 1532 bp, Homo sapiens
gacagaaacgggcgcgcagtgatgacaacatcaagccgccagcggcggcggtggcggccgggagactgggagggcttccggggctgccggtctgagtgcagagctgctgtcatggcggccgctctgtggggcttctttcccgtcctgctgctgctgctgctatcgggggatgtccagagctcggaggtgcccggggctgctgctgagggatcgggagggagtggggtcggcataggagatcgcttcaagattgaggggcgtgcagttgttccaggggtgaagcctcaggactggatctcggcggcccgagtgctggtagacggagaagagcacgtcggtttccttaagacagatgggagttttgtggttcatgatataccttctggatcttatgtagtggaagttgtatctccagcttacagatttgatcccgttcgagtggatatcacttcgaaaggaaaaatgagagcaagatatgtgaattacatcaaaacatcagaggttgtcagactgccctatcctctccaaatgaaatcttcaggtccaccttcttactttattaaaagggaatcgtggggctggacagactttctaatgaacccaatggttatgatgatggttcttcctttattgatatttgtgcttctgcctaaagtggtcaacacaagtgatcctgacatgagacgggaaatggagcagtcaatgaatatgctgaattccaaccatgagttgcctgatgtttctgagttcatgacaagactcttctcttcaaaatcatctggcaaatctagcagcggcagcagtaaaacaggcaaaagtggggctggcaaaaggaggtagtcaggccgtccagagctggcatttgcacaaacacggcaacactgggtggcatccaagtcttggaaaaccgtgtgaagcaactactataaacttgagtcatcccgacgttgatctcttacaactgtgtatgttaactttttagcacatgttttgtacttggtacacgagaaaacccagctttcatcttttgtctgtatgaggtcaatattgatgtcactgaattaattacagtgtcctatagaaaatgccattaataaattatatgaactactatacattatgtatattaattaaaacatcttaatccagaaaaaaaaaaaaaaaaaaaaaaaaaaaaaaaaaaaaaaaaaaaaaaatgttttttaaaaggggaggagggggggaaaaaaaattccggggggggccaaagttagggggaacggttttttggtgaaaaaggggggccaaataggggggagggtatattaaaaacaagagacggggggccgagatttaaacaacgcggtgggaggggacaacaggtggcagctggggaaatctggtgggaaagggaacccaatgtcgggggggagacataggggaaataaccaagagattaaggtcgggggcaatataaaattgagggttcagtggtcacacacgaatgtgcgccggaaattggcgcggaataatggaactttccgagggagtaa

SEQ ID NO: 75322 - DNA, 436 bp, Homo sapiens
  misc_feature (14)..(14): n is a, c, g, or t
cccccgggctgcangaattggcacgaggtgccacccacctcctgagctgtttttgtaaaatgactgctgacagcaagttcttgctgctctccaatctcatcagacagtagaatgtagggaaaaacttttgcccgactgatttttaaaaaggaaaaaaaaaatgttttactatgtggccttccaaaataggtagtgtttgcctatgtggaaacaacagcaaactaacaccaagtgccagagtcctggatgtgcaattggtttaagtgttcatgttctagtgaacacagcttgttcaggaacaaacactaaaacgatttgagtagaggctgctggtcaccttttgtgacctgaggaatcccaggcctgtgagaaaagcaaaaattcacattgcagcacatgatgccagtagcactggatcgtctgtgctgtgcctttt

SEQ ID NO: 75323 - DNA, 3528 bp, Homo sapiens
  misc_feature (46)..(46): n is a, c, g, or t
  misc_feature (187)..(187): n is a, c, g, or t
agcgggggggagggggcggaccccgagccgcgaggggcgcggggcngggcgcggggtcccgggagagggcgctgggcgcttcgggcccagatcatctttcttgctgacaagtatcatctaggaatcactctacctcgctggcaattttgagaaaatagccagttattttgtgctgaactttcatctngttaagggtcattccttcagtattcaagacctcgtgaaataaaagtgcagaaaacaaacccaggcgatcacagcagcagccgccgcggcagcagcaccaacagcaggaggagcaggaggagccggaggaggaggaggaggaggaggcaaagttagagttggggctggcgctccggagttgctgggctcagcgcagctcccattcattaaggaaccagctgcggaggaaggtggccgagcgcccgcgctgcccactcgctcgctcgcgcactcagacgcgcgccacaacagcgcgccccaagctgcgcagctctgcaaaagtttctgctcgggatctggctctcttccccttggactttagaacgatttagggttgacagaggaaagcagaggcgcgcaggaggagcagaaaacaccaccttctgcagttggaggcaggcagccccggctgcactctagccgccgcgcccggagccggggccgacccgccactatccgcagcagcctcggccaggaggcgacccgggcgcctgggtgtgtggctgctgttgcgggacgtcttcgcggggcgggaggctcgcgccgcagccagcgccatgcaaaactacaagtacgacaaagcgatcgtcccggagagcaagaacggcggcagcccggcgctcaacaacaacccgaggaggagcggcagcaagcgggtgctgctcatctgcctcgacctcttctgcctcttcatggcgggcctccccttcctcatcatcgagacaagcaccatcaagccttaccaccgagggttttactgcaatgatgagagcatcaagtacccactgaaaactggtgagacaataaatgacgctgtgctctgtgccgtggggatcgtcattgccatcctcgcgatcatcacgggggaattctaccggatctattacctgaagaagtcgcggtcgacgattcagaacccctacgtggcagcactctataagcaagtgggctgcttcctctttggctgtgccatcagccagtctttcacagacattgccaaagtgtccatagggcgcctgcgtcctcacttcttgagtgtctgcaaccctgatttcagccagatcaactgctctgaaggctacattcagaactacagatgcagaggtgatgacagcaaagtccaggaagccaggaagtccttcttctctggccatgcctccttctccatgtacactatgctgtatttggtgctatacctgcaggcccgcttcacttggcgaggagcccgcctgctccggcccctcctgcagttcaccttgatcatgatggccttctacacgggactgtctcgcgtatcagaccacaagcaccatcccagtgatgttctggcaggatttgctcaaggagccctggtggcctgctgcatagttttcttcgtgtctgacctcttcaagactaagacgacgctctccctgcctgcccctgctatccggaaggaaatcctttcacctgtggacattattgacaggaacaatcaccacaacatgatgtaggtgccacccacctcctgagctgtttttgtaaaatgactgctgacagcaagttcttgctgctctccaatctcatcagacagtagaatgtagggaaaaacttttgcccgactgatttttaaaaaggaaaaaaaaaatgttttactatgtggccttccaaaataggtagtgtttgcctatgtggaaacaacagcaaactaacaccaagtgccagagtcctggatgtgcaattggtttaagtgttcatgttctagtgaacacagcttgttcaggaacaaacactaaaacgatttgagtagaggctgctggtcaccttttgtgacctgaggaatcccaggcctgtgagaaaagcaaaaattcacattgcagcacatgatgccagaaatagcactgaatcaagaaaatagccattgcggagctgccctcttgagtctttctgtccatcccattctattctgtactgtgacttcagttcaggaagttttgttttgtgttttaaataaaaggaaagagcaagtttgctcagtcaagtgatcagatcccgaatctagattcccagttctaaggccttatcacctcccctgcccataggccaacaaccatagttcctcacattagtgattagcagactctttgtggacgagtgaatttcacaaacagcacaatttcagaagaaatcgagggcacaggccctcacttttcttcttttgacgcatcatcctgtgatgttgaaatgtcaattgcaggatgctgatgttgtgcacgtcaatcaccgggcacttgcatactcttagaaacagttcgacttcggttactgccttctcccttgaaatccttgctgcgtgcccaccaggatttcctgtgagggcccgggaatgagcaaggcatggtctgccaccagctgacggaaagcagccttctgtacaacagatgggagggtgaagggggcagaatgaaaatcgaaccaaccttttagctgttgcaaatcagaaggagccagagaagcaggcagtctcatgcatgagaggttacccttcaggatgacagagctgagggtctttgtaggagttgctcttgctgtgtaaagcactattgtcttggggttgagccctagggcagttcttggtaggttctgctgggcagaacatatgggttaaatctcggtagagagttttcctcatcctctatccgtaagtgtccttccatgcaaggtcccactctaggtgatagacagggaccccttctactgaacctttgaggaaaggaggaaggaagaaatgcgtttagatcttggatgcagacctttcaaagggttaaatgtaaccatatggatcaaccacatgcacatccttactacagaatccgtcctttcatttcaacttatagcaagctatgatttttatatataaatattatataaataatgtataaaacattaaaagttaactatgtaagatattatttctgaaacaatttagctatatccactatgattataaactgtgtctcgacctgtgttatttacattagctgcttaaaaaagcattgagttaatttttttaaatatcaactaaaatatcatagttctgtggtagacattgttttataatgaaataactgcaactagagaaaactgtataaaaacattaaattgtcagtatttttgtaaggttccattttgtaaagagaataatattcaaagacttttgtagcatacaaagtgaaaacttgtatctgcgaaactatacttgtattaaatgtgctttttaaataaaagctcgtaacacaactaattaaggacttgcaaactgga

SEQ ID NO: 75324 - DNA, 3649 bp, Homo sapiens
tttccttaaaaattatattttcagggtaatacaattcaagtcacaataaagacctgaaagcctcaggtttgtaggtgaggaaaaatgcattttagctgtacagccctaacttttacttgacccaaggccagcaagaaaatgtttctttttatttatatatattttttctttggtgacaatttggtgtttctgaacgctaggggctcccggtttctctggtttgagagtaacttttccttttaggacttttttttttttttttgaagggggtgggggaaaatgtggccttaattatcctacgtcttaggcagcttaaggaaggggctgtgctttcggaatcccatccgagccaagtaaggaggtccctctctctctctccccccacgtcttctctttttaaaggacctcgtgaaataaaagtgcagaaaacaaacccaggcgatcacagcagcagccgccgcggcagcagcaccaacagcaggaggagcaggaggagccggaggaggaggaggaggaggaggcaaagttagagttggggctggcgctccggagttgctgggctcagcgcagctcccattcattaaggaaccagctgcggaggaaggtggccgagcgcccgcgctgcccactcgctcgctcgcgcactcagacgcgcgccacaacagcgcgccccaagctgcgcagctctgcaaaagtttctgctcgggatctggctctcttccccttggactttagaacgatttagggttgacagaggaaagcagaggcgcgcaggaggagcagaaaacaccaccttctgcagttggaggcaggcagccccggctgcactctagccgcctgggtgtgtggctgctgttgcgggacgtcttcgcggggcgggaggctcgcgccgcagccagcgccatgcaaaactacaagtacgacaaagcgatcgtcccggagagcaagaacggcggcagcccggcgctcaacaacaacccgaggaggagcggcagcaagcgggtgctgctcatctgcctcgacctcttctgcctcttcatggcgggcctccccttcctcatcatcgagacaagcaccatcaagccttaccaccgagggttttactgcaatgatgagagcatcaagtacccactgaaaactggtgagacaataaatgacgctgtgctctgtgccgtggggatcgtcattgccatcctcgcgatcatcacgggggaattctaccggatctattacctgaagaagtcgcggtcgacgattcagaacccctacgtggcagcactctataagcaagtgggctgcttcctctttggctgtgccatcagccagtctttcacagacattgccaaagtgtccatagggcgcctgcgtcctcacttcttgagtgtctgcaaccctgatttcagccagatcaactgctctgaaggctacattcagaactacagatgcagaggtgatgacagcaaagtccaggaagccaggaagtccttcttctctggccatgcctccttctccatgtacactatgctgtatttggtgctatacctgcaggcccgcttcacttggcgaggagcccgcctgctccggcccctcctgcagttcaccttgatcatgatggccttctacacgggactgtctcgcgtatcagaccacaagcaccatcccagtgatgttctggcaggatttgctcaaggagccctggtggcctgctgcatagttttcttcgtgtctgacctcttcaagactaagacgacgctctccctgcctgcccctgctatccggaaggaaatcctttcacctgtggacattattgacaggaacaatcaccacaacatgatgtaggtgccacccacctcctgagctgtttttgtaaaatgactgctgacagcaagttcttgctgctctccaatctcatcagacagtagaatgtagggaaaaacttttgcccgactgatttttaaaaaggaaaaaaaaaatgttttactatgtggccttccaaaataggtagtgtttgcctatgtggaaacaacagcaaactaacaccaagtgccagagtcctggatgtgcaattggtttaagtgttcatgttctagtgaacacagcttgttcaggaacaaacactaaaacgatttgagtagaggctgctggtcaccttttgtgacctgaggaatcccaggcctgtgagaaaagcaaaaattcacattgcagcacatgatgccagaaatagcactgaatcaagaaaatagccattgcggagctgccctcttgagtctttctgtccatcccattctattctgtactgtgacttcagttcaggaagttttgttttgtgttttaaataaaaggaaagagcaagtttgctcagtcaagtgatcagatcccgaatctagattcccagttctaaggccttatcacctcccctgcccataggccaacaaccatagttcctcacattagtgattagcagactctttgtggacgagtgaatttcacaaacagcacaatttcagaagaaatcgagggcacaggccctcacttttcttcttttgacgcatcatcctgtgatgttgaaatgtcaattgcaggatgctgatgttgtgcacgtcaatcaccgggcacttgcatactcttagaaacagttcgacttcggttactgccttctcccttgaaatccttgctgcgtgcccaccaggatttcctgtgagggcccgggaatgagcaaggcatggtctgccaccagctgacggaaagcagccttctgtacaacagatgggagggtgaagggggcagaatgaaaatcgaaccaaccttttagctgttgcaaatcagaaggagccagagaagcaggcagtctcatgcatgagaggttacccttcaggatgacagagctgagggtctttgtaggagttgctcttgctgtgtaaagcactattgtcttggggttgagccctagggcagttcttggtaggttctgctgggcagaacatatgggttaaatctcggtagagagttttcctcatcctctatccgtaagtgtccttccatgcaaggtcccactctaggtgatagacagggaccccttctactgaacctttgaggaaaggaggaaggaagaaatgcgtttagatcttggatgcagacctttcaaagggttaaatgtaaccatatggatcaaccacatgcacatccttactacagaatccgtcctttcatttcaacttatagcaagctatgatttttatatataaatattatataaataatgtataaaacattaaaagttaactatgtaagatattatttctgaaacaatttagctatatccactatgattataaactgtgtctcgacctgtgttatttacattagctgcttaaaaaagcattgagttaatttttttaaatatcaactaaaatatcatagttctgtggtagacattgttttataatgaaataactgcaactagagaaaactgtataaaaacattaaattgtcagtatttttgtaaggttccattttgtaaagagaataatattcaaagacttttgtagcatacaaagtgaaaacttgtatctgcgaaactatacttgtattaaatgtgctttttaaataaaagctcgtaacacaactaattaaggacttgcaaactgga

SEQ ID NO: 75325 - DNA, 3662 bp, Homo sapiens
tttccttaaaaattatattttcagggtaatacaattcaagtcacaataaagacctgaaagcctcaggtttgtaggtgaggaaaaatgcattttagctgtacagccctaacttttacttgacccaaggccagcaagaaaatgtttctttttatttatatatattttttctttggtgacaatttggtgtttctgaacgctaggggctcccggtttctctggtttgagagtaacttttccttttaggacttttttttttttttttgaagggggtgggggaaaatgtggccttaattatcctacgtcttaggcagcttaaggaaggggctgtgctttcggaatcccatccgagccaagtaaggaggtccctctctctctctccccccacgtcttctctttttaaaggacctcgtgaaataaaagtgcagaaaacaaacccaggcgatcacagcagcagccgccgcggcagcagcaccaacagcaggaggagcaggaggagccggaggaggaggaggaggaggaggcaaagttagagttggggctggcgctccggagttgctgggctcagcgcagctcccattcattaaggaaccagctgcggaggaaggtggccgagcgcccgcgctgcccactcgctcgctcgcgcactcagacgcgcgccacaacagcgcgccccaagctgcgcagctctgcaaaagtttctgctcgggatctggctctcttccccttggactttagaacgatttagggttgacagaggaaagcagaggcgcgcaggaggagcagaaaacaccaccttctgcagttggaggcaggcagccccggctgcactctagccgccgcgcccggagccggggccgacccgccactatccgcagcagcctcggccaggaggcgacccgggcgcctgggtgtgtggctgctgttgcgggacgtcttcgcggggcgggaggctcgcgccgcagccagcgccatgcaaaactacaagtacgacaaagcgatcgtcccggagagcaagaacggcggcagcccggcgctcaacaacaacccgaggaggagcggcagcaagcgggtgctgctcatctgcctcgacctcttctgcctcttcatggcgggcctccccttcctcatcatcgagacaagcaccatcaagccttaccaccgagggttttactgcaatgatgagagcatcaagtacccactgaaaactggtgagacaataaatgacgctgtgctctgtgccgtggggatcgtcattgccatcctcgcgatcatcacgggggaattctaccggatctattacctgaagaagtcgcggtcgacgattcagaacccctacgtggcagcactctataagcaagtgggctgcttcctctttggctgtgccatcagccagtctttcacagacattgccaaagtgtccatagggcgcctgcgtcctcacttcttgagtgtctgcaaccctgatttcagccagatcaactgctctgaaggctacattcagaactacagatgcagaggtgatgacagcaaagtccaggaagccaggaagtccttcttctctggccatgcctccttctccatgtacactatgctgtatttggtgctatacctgcaggcccgcttcacttggcgaggagcccgcctgctccggcccctcctgcagttcaccttgatcatgatggccttctacacgggactgtctcgcgtatcagaccacaagcaccatcccagtgatgttctggcaggatttgctcaaggagccctggtggcctgctgcatagttttcttcgtgtctgacctcttcaagactaagacgacgctctccctgcctgcccctgctatccggaaggaaatcctttcacctgtggacattattgacaggaacaatcaccacaacatgatgtaggtgccacccacctcctgagctgtttttgtaaaatgactgctgacagcaagttcttgctgctctccaatctcatcagacagtagaatgtagggaaaaacttttgcccgactgatttttaaaaaggaaaaaaaaaatgttttactatgtggccttccaaaataggtagtgtttgcctatgtggaaacaacagcaaactaacaccaagtgccagagtcctggatgtgcaattggtttaagtgttcatgttctagtgaacacagcttgttcaggaacaaacactaaaacgatttgagtagaggctgctggtcaccttttgtgacctgaggaatcccaggcctgtgagaaaagcaaaaattcacattgcagcacatgatgccagaaatagcactgaatcaagaaaatagccattgcggagctgccctcttgagtctttctgtccatcccattctattctgtactgtgacttcagttcaggaagttttgttttgtgttttaaataaaaggaaagagcaagtttgctcagtcaagtgatcagatcccgaatctagattcccagttctaaggccttatcacctcccctgcccataggccaacaaccatagttcctcacattagtgattagcagactctttgtggacgagtgaatttcacaaacagcacaatttcagaagaaatcgagggcacaggccctcacttttcttcttttgacgcatcatcctgtgatgttgaaatgtcaattgcaggatgctgatgttgtgcacgtcaatcaccgggcacttgcatactcttagaaacagttcgacttcggttactgccttctcccttgaaatccttgctgcgtgcccaccaggatttcctgtgagggcccgggaatgagcaaggcatggtctgccaccagctgacggaaagcagccttctgtacaacagatgggagggtgaagggggcagaatgcagtctcatgcatgagaggttacccttcaggatgacagagctgagggtctttgtaggagttgctcttgctgtgtaaagcactattgtcttggggttgagccctagggcagttcttggtaggttctgctgggcagaacatatgggttaaatctcggtagagagttttcctcatcctctatccgtaagtgtccttccatgcaaggtcccactctaggtgatagacagggaccccttctactgaacctttgaggaaaggaggaaggaagaaatgcgtttagatcttggatgcagacctttcaaagggttaaatgtaaccatatggatcaaccacatgcacatccttactacagaatccgtcctttcatttcaacttatagcaagctatgatttttatatataaatattatataaataatgtataaaacattaaaagttaactatgtaagatattatttctgaaacaatttagctatatccactatgattataaactgtgtctcgacctgtgttatttacattagctgcttaaaaaagcattgagttaatttttttaaatatcaactaaaatatcatagttctgtggtagacattgttttataatgaaataactgcaactagagaaaactgtataaaaacattaaattgtcagtatttttgtaaggttccattttgtaaagagaataatattcaaagacttttgtagcatacaaagtgaaaacttgtatctgcgaaactatacttgtattaaatgtgctttttaaataaaagctcgtaacacaactaattaaggacttgcaaactgga

SEQ ID NO: 75326 - DNA, 3662 bp, Homo sapiens
tttccttaaaaattatattttcagggtaatacaattcaagtcacaataaagacctgaaagcctcaggtttgtaggtgaggaaaaatgcattttagctgtacagccctaacttttacttgacccaaggccagcaagaaaatgtttctttttatttatatatattttttctttggtgacaatttggtgtttctgaacgctaggggctcccggtttctctggtttgagagtaacttttccttttaggacttttttttttttttttgaagggggtgggggaaaatgtggccttaattatcctacgtcttaggcagcttaaggaaggggctgtgctttcggaatcccatccgagccaagtaaggaggtccctctctctctctccccccacgtcttctctttttaaaggacctcgtgaaataaaagtgcagaaaacaaacccaggcgatcacagcagcagccgccgcggcagcagcaccaacagcaggaggagcaggaggagccggaggaggaggaggaggaggaggcaaagttagagttggggctggcgctccggagttgctgggctcagcgcagctcccattcattaaggaaccagctgcggaggaaggtggccgagcgcccgcgctgcccactcgctcgctcgcgcactcagacgcgcgccacaacagcgcgccccaagctgcgcagctctgcaaaagtttctgctcgggatctggctctcttccccttggactttagaacgatttagggttgacagaggaaagcagaggcgcgcaggaggagcagaaaacaccaccttctgcagttggaggcaggcagccccggctgcactctagccgccgcgcccggagccggggccgacccgccactatccgcagcagcctcggccaggaggcgacccgggcgcctgggtgtgtggctgctgttgcgggacgtcttcgcggggcgggaggctcgcgccgcagccagcgccatgcaaaactacaagtacgacaaagcgatcgtcccggagagcaagaacggcggcagcccggcgctcaacaacaacccgaggaggagcggcagcaagcgggtgctgctcatctgcctcgacctcttctgcctcttcatggcgggcctccccttcctcatcatcgagacaagcaccatcaagccttaccaccgagggttttactgcaatgatgagagcatcaagtacccactgaaaactggtgagacaataaatgacgctgtgctctgtgccgtggggatcgtcattgccatcctcgcgatcatcacgggggaattctaccggatctattacctgaagaagtcgcggtcgacgattcagaacccctacgtggcagcactctataagcaagtgggctgcttcctctttggctgtgccatcagccagtctttcacagacattgccaaagtgtccatagggcgcctgcgtcctcacttcttgagtgtctgcaaccctgatttcagccagatcaactgctctgaaggctacattcagaactacagatgcagaggtgatgacagcaaagtccaggaagccaggaagtccttcttctctggccatgcctccttctccatgtacactatgctgtatttggtgctatacctgcaggcccgcttcacttggcgaggagcccgcctgctccggcccctcctgcagttcaccttgatcatgatggccttctacacgggactgtctcgcgtatcagaccacaagcaccatcccagtgatgttctggcaggatttgctcaaggagccctggtggcctgctgcatagttttcttcgtgtctgacctcttcaagactaagacgacgctctccctgcctgcccctgctatccggaaggaaatcctttcacctgtggacattattgacaggaacaatcaccacaacatgatgtaggtgccacccacctcctgagctgtttttgtaaaatgactgctgacagcaagttcttgctgctctccaatctcatcagacagtagaatgtagggaaaaacttttgcccgactgatttttaaaaaggaaaaaaaaaatgttttactatgtggccttccaaaataggtagtgtttgcctatgtggaaacaacagcaaactaacaccaagtgccagagtcctggatgtgcaattggtttaagtgttcatgttctagtgaacacagcttgttcaggaacaaacactaaaacgatttgagtagaggctgctggtcaccttttgtgacctgaggaatcccaggcctgtgagaaaagcaaaaattcacattgcagcacatgatgccagaaatagcactgaatcaagaaaatagccattgcggagctgccctcttgagtctttctgtccatcccattctattctgtactgtgacttcagttcaggaagttttgttttgtgttttaaataaaaggaaagagcaagtttgctcagtcaagtgatcagatcccgaatctagattcccagttctaaggccttatcacctcccctgcccataggccaacaaccatagttcctcacattagtgattagcagactctttgtggacgagtgaatttcacaaacagcacaatttcagaagaaatcgagggcacaggccctcacttttcttcttttgacgcatcatcctgtgatgttgaaatgtcaattgcaggatgctgatgttgtgcacgtcaatcaccgggcacttgcatactcttagaaacagttcgacttcggttactgccttctcccttgaaatccttgctgcgtgcccaccaggatttcctgtgagggcccgggaatgagcaaggcatggtctgccaccagctgacggaaagcagccttctgtacaacagatgggagggtgaagggggcagaatgaaaatcgaaccaaccttttagctgttgcaaatcagaaggagccagagaagcaggcagtctcatgcatgagaggttacccttcaggatgacagagctgagggtctttgtaggagttgctcttgctgtgtaaagcactattgtcttggggttgagccctagggcagttcttggtaggttctgctgggctgtccttccatgcaaggtcccactctaggtgatagacagggaccccttctactgaacctttgaggaaaggaggaaggaagaaatgcgtttagatcttggatgcagacctttcaaagggttaaatgtaaccatatggatcaaccacatgcacatccttactacagaatccgtcctttcatttcaacttatagcaagctatgatttttatatataaatattatataaataatgtataaaacattaaaagttaactatgtaagatattatttctgaaacaatttagctatatccactatgattataaactgtgtctcgacctgtgttatttacattagctgcttaaaaaagcattgagttaatttttttaaatatcaactaaaatatcatagttctgtggtagacattgttttataatgaaataactgcaactagagaaaactgtataaaaacattaaattgtcagtatttttgtaaggttccattttgtaaagagaataatattcaaagacttttgtagcatacaaagtgaaaacttgtatctgcgaaactatacttgtattaaatgtgctttttaaataaaagctcgtaacacaactaattaaggacttgcaaactgga

SEQ ID NO: 75327 - DNA, 2588 bp, Homo sapiens
ggcgacccgggcgcctgggtgtgtggctgctgttgcgggcctccccttcctcatcatcgagacaagcaccatcaagccttaccaccgagggttttactgcaatgatgagagcatcaagtacccactggccatcctcgcgatcatcacgggggaattctaccggatctattacctgaagaagtcgcggtcgacgattcagaacccctacgtggcagcactctataagcaagtgggctgcttcctctttggctgtgccatcagccagtctttcacagacattgccaaagtgtccatagggcgcctgcgtcctcacttcttgagtgtctgcaaccctgatttcagccagatcaactgctctgaaggctacattcagaactacagatgcagaggtgatgacagcaaagtccaggaagccaggaagtccttcttctctggccatgcctccttctccatgtacactatgctgtatttggtgctatacctgcaggcccgcttcacttggcgaggagcccgcctgctccggcccctcctgcagttcaccttgatcatgatggccttctacacgggactgtctcgcgtatcagaccacaagcaccatcccagtgatgttctggcaggatttgctcaaggagccctggtggcctgctgcatagttttcttcgtgtctgacctcttcaagactaagacgacgctctccctgcctgcccctgctatccggaaggaaatcctttcacctgtggacattattgacaggaacaatcaccacaacatgatgtaggtgccacccacctcctgagctgtttttgtaaaatgactgctgacagcaagttcttgctgctctccaatctcatcagacagtagaatgtagggaaaaacttttgcccgactgatttttaaaaaggaaaaaaaaaatgttttactatgtggccttccaaaataggtagtgtttgcctatgtggaaacaacagcaaactaacaccaagtgccagagtcctggatgtgcaattggtttaagtgttcatgttctagtgaacacagcttgttcaggaacaaacactaaaacgatttgagtagaggctgctggtcaccttttgtgacctgaggaatcccaggcctgtgagaaaagcaaaaattcacattgcagcacatgatgccagaaatagcactgaatcaagaaaatagccattgcggagctgccctcttgagtctttctgtccatcccattctattctgtactgtgacttcagttcaggaagttttgttttgtgttttaaataaaaggaaagagcaagtttgctcagtcaagtgatcagatcccgaatctagattcccagttctaaggccttatcacctcccctgcccataggccaacaaccatagttcctcacattagtgattagcagactctttgtggacgagtgaatttcacaaacagcacaatttcagaagaaatcgagggcacaggccctcacttttcttcttttgacgcatcatcctgtgatgttgaaatgtcaattgcaggatgctgatgttgtgcacgtcaatcaccgggcacttgcatactcttagaaacagttcgacttcggttactgccttctcccttgaaatccttgctgcgtgcccaccaggatttcctgtgagggcccgggaatgagcaaggcatggtctgccaccagctgacggaaagcagccttctgtacaacagatgggagggtgaagggggcagaatgaaaatcgaaccaaccttttagctgttgcaaatcagaaggagccagagaagcaggcagtctcatgcatgagaggttacccttcaggatgacagagctgagggtctttgtaggagttgctcttgctgtgtaaagcactattgtcttggggttgagccctagggcagttcttggtaggttctgctgggcagaacatatgggttaaatctcggtagagagttttcctcatcctctatccgtaagtgtccttccatgcaaggtcccactctaggtgatagacagggaccccttctactgaacctttgaggaaaggaggaaggaagaaatgcgtttagatcttggatgcagacctttcaaagggttaaatgtaaccatatggatcaaccacatgcacatccttactacagaatccgtcctttcatttcaacttatagcaagctatgatttttatatataaatattatataaataatgtataaaacattaaaagttaactatgtaagatattatttctgaaacaatttagctatatccactatgattataaactgtgtctcgacctgtgttatttacattagctgcttaaaaaagcattgagttaatttttttaaatatcaactaaaatatcatagttctgtggtagacattgttttataatgaaataactgcaactagagaaaactgtataaaaacattaaattgtcagtatttttgtaaggttccattttgtaaagagaataatattcaaagacttttgtagcatacaaagtgaaaacttgtatctgcgaaactatacttgtattaaatgtgctttttaaataaaagctcgtaacacaactaattaaggacttgcaaactgga

SEQ ID NO: 75328 - DNA, 3133 bp, Homo sapiens
tttccttaaaaattatattttcagggtaatacaattcaagtcacaataaagacctgaaagcctcaggtttgtaggtgaggaaaaatgcattttagctgtacagccctaacttttacttgacccaaggccagcaagaaaatgtttctttttatttatatatattttttctttggtgacaatttggtgtttctgaacgctaggggctcccggtttctctggtttgagagtaacttttccttttaggacttttttttttttttttgaagggggtgggggaaaatgtggccttaattatcctacgtcttaggcagcttaaggaaggggctgtgctttcggaatcccatccgagccaagtaaggaggtccctctctctctctccccccacgtcttctctttttaaaggacctcgtgaaataaaagtgcagaaaacaaacccaggcgatcacagcagcagccgccgcggcagcagcaccaacagcaggaggagcaggaggagccggaggaggaggaggaggaggaggcaaagttagagttggggctggcgctccggagttgctgggctcagcgcagctcccattcattaaggaaccagctgcggaggaaggtggccgagcgcccgcgctgcccactcgctcgctcgcgcactcagacgcgcgccacaacagcgcgccccaagctgcgcagctctgcaaaagtttctgctcgggatctggctctcttccccttggactttagaacgatttagggttgacagaggaaagcagaggcgcgcaggaggagcagaaaacaccaccttctgcagttggaggcaggcagccccggctgcactctagccgccgcgcccggagccggggccgacccgccactatccgcagcagcctcggccaggaggcgacccgggcgcctgggtgtgtggctgctgttgcgggacgtcttcgcggggcgggaggctcgcgccgcagccagcgccatgcaaaactacaagtacgacaaagcgatcgtcccggagagcaagaacggcggcagcccggcgctcaacaacaacccgaggaggagcggcagcaagcgggtgctgctcatctgcctcgacctcttctgcctcttcatggcgggcctccccttcctcatcatcgagacaagcaccatcaagccttaccaccgagggttttactgcaatgatgagagcatcaagtacccactgaaaactggtgagacaataaatgacgctgtgctctgtgccgtggggatcgtcattgccatcctcgcgatcatcacgggggaattctaccggatctattacctgaagaagtcgcggtcgacgattcagaacccctacgtggcagcactctataagcaagtgggctgcttcctctttggctgtgccatcagccagtctttcacagacattgccaaagtgtccatagggcgcctgcgtcctcacttcttgagtgtctgcaaccctgatttcagccagatcaactgctctgaaggctacattcagaactacagatgcagaggtgatgacagcaaagtccaggaagccaggaagtccttcttctctggccatgcctccttctccatgtacactatgctgtatttggtgctatacctgcaggcccgcttcacttggcgaggagcccgcctgctccggcccctcctgcagttcaccttgatcatgatggccttctacacgggactgtctcgcgtatcagaccacaagcaccatcccagtgatgttctggcaggatttgctcaaggagccctggtggcctgctgcatagttttcttcgtgtctgacctcttcaagactaagacgacgctctccctgcctgcccctgctatccggaaggaaatcctttcacctgtggacattattgacaggaacaatcaccacaacatgatgtaggtgccacccacctcctgagctgtttttgtaaaatgactgctgacagcaagttcttgctgctctccaatctcatcagacagtagaatgtagggaaaaacttttgcccgactgatttttaaaaaggaaaaaaaaaatgttttactatgtggccttccaaaataggtagtgtttgcctatgtggaaacaacagcaaactaacaccaagtgccagagtcctggatgtgcaattggtttaagtgttcatgttctagtgaacacagcttgttcaggaacaaacactaaaacgatttgagtagaggctgctggtcaccttttgtgacctgaggaatcccaggcctgtgagaaaagcaaaaattcacattgcagcacatgatgccagaaatagcactgaatcaagaaaatagccattgcggagctgccctcttgagtctttctgtccatcccattctattctgtactgtgacttcagttcaggaagttttgttttgtgttttaaataaaaggaaagagcaagtttgctcagtcaagtgatcagatcccgaatctagattcccagttctaaggccttatcacctcccctgcccataggccaacaaccatagttcctcacattagtgattagcagactctttgtggacgagtgaatttcacaaacagcacaatttcagaagaaatcgagggcacaggccctcacttttcttcttttgacgcatcatcctgtgatgttgaaatgtcaattgcaggatgctgatgttgtgcacgtcaatcaccgggcacttgcatactcttagaaacagttcgacttcggttactgccttctcccttgaaatccttgctgcgtgcccaccaggatttcctgtgagggcccgggaatgagcaaggcatggtctgccaccagctgacggaaagcagccttctgtacaacagatgggagggtgaagggggcagaatgaaaatcgaaccaaccttttagctgttgcaaatcagaaggagccagagaagcaggcagtctcatgcatgagaggttacccttcaggatgacagagctgagggtctttgtaggagttgctcttgctgtgtaaagcactattgtcttggggttgagccctagggcagttcttggtaggttctgctgggcagaacatatgggttaaatctcggtagagagttttcctcatcctctatccgtaagtgtctccgggtacataactcgagtcgtatcatgta

SEQ ID NO: 75329 - DNA, 3107 bp, Homo sapiens
tttccttaaaaattatattttcagggtaatacaattcaagtcacaataaagacctgaaagcctcaggtttgtaggtgaggaaaaatgcattttagctgtacagccctaacttttacttgacccaaggccagcaagaaaatgtttctttttatttatatatattttttctttggtgacaatttggtgtttctgaacgctaggggctcccggtttctctggtttgagagtaacttttccttttaggacttttttttttttttttgaagggggtgggggaaaatgtggccttaattatcctacgtcttaggcagcttaaggaaggggctgtgctttcggaatcccatccgagccaagtaaggaggtccctctctctctctccccccacgtcttctctttttaaaggacctcgtgaaataaaagtgcagaaaacaaacccaggcgatcacagcagcagccgccgcggcagcagcaccaacagcaggaggagcaggaggagccggaggaggaggaggaggaggaggcaaagttagagttggggctggcgctccggagttgctgggctcagcgcagctcccattcattaaggaaccagctgcggaggaaggtggccgagcgcccgcgctgcccactcgctcgctcgcgcactcagacgcgcgccacaacagcgcgccccaagctgcgcagctctgcaaaagtttctgctcgggatctggctctcttccccttggactttagaacgatttagggttgacagaggaaagcagaggcgcgcaggaggagcagaaaacaccaccttctgcagttggaggcaggcagccccggctgcactctagccgccgcgcccggagccggggccgacccgccactatccgcagcagcctcggccaggaggcgacccgggcgcctgggtgtgtggctgctgttgcgggacgtcttcgcggggcgggaggctcgcgccgcagccagcgccatgcaaaactacaagtacgacaaagcgatcgtcccggagagcaagaacggcggcagagcccgcctgctccggcccctcctgcagttcaccttgatcatgatggccttctacacgggactgtctcgcgtatcagaccacaagcaccatcccagtgatgttctggcaggatttgctcaaggagccctggtggcctgctgcatagttttcttcgtgtctgacctcttcaagactaagacgacgctctccctgcctgcccctgctatccggaaggaaatcctttcacctgtggacattattgacaggaacaatcaccacaacatgatgtaggtgccacccacctcctgagctgtttttgtaaaatgactgctgacagcaagttcttgctgctctccaatctcatcagacagtagaatgtagggaaaaacttttgcccgactgatttttaaaaaggaaaaaaaaaatgttttactatgtggccttccaaaataggtagtgtttgcctatgtggaaacaacagcaaactaacaccaagtgccagagtcctggatgtgcaattggtttaagtgttcatgttctagtgaacacagcttgttcaggaacaaacactaaaacgatttgagtagaggctgctggtcaccttttgtgacctgaggaatcccaggcctgtgagaaaagcaaaaattcacattgcagcacatgatgccagaaatagcactgaatcaagaaaatagccattgcggagctgccctcttgagtctttctgtccatcccattctattctgtactgtgacttcagttcaggaagttttgttttgtgttttaaataaaaggaaagagcaagtttgctcagtcaagtgatcagatcccgaatctagattcccagttctaaggccttatcacctcccctgcccataggccaacaaccatagttcctcacattagtgattagcagactctttgtggacgagtgaatttcacaaacagcacaatttcagaagaaatcgagggcacaggccctcacttttcttcttttgacgcatcatcctgtgatgttgaaatgtcaattgcaggatgctgatgttgtgcacgtcaatcaccgggcacttgcatactcttagaaacagttcgacttcggttactgccttctcccttgaaatccttgctgcgtgcccaccaggatttcctgtgagggcccgggaatgagcaaggcatggtctgccaccagctgacggaaagcagccttctgtacaacagatgggagggtgaagggggcagaatgaaaatcgaaccaaccttttagctgttgcaaatcagaaggagccagagaagcaggcagtctcatgcatgagaggttacccttcaggatgacagagctgagggtctttgtaggagttgctcttgctgtgtaaagcactattgtcttggggttgagccctagggcagttcttggtaggttctgctgggcagaacatatgggttaaatctcggtagagagttttcctcatcctctatccgtaagtgtccttccatgcaaggtcccactctaggtgatagacagggaccccttctactgaacctttgaggaaaggaggaaggaagaaatgcgtttagatcttggatgcagacctttcaaagggttaaatgtaaccatatggatcaaccacatgcacatccttactacagaatccgtcctttcatttcaacttatagcaagctatgatttttatatataaatattatataaataatgtataaaacattaaaagttaactatgtaagatattatttctgaaacaatttagctatatccactatgattataaactgtgtctcgacctgtgttatttacattagctgcttaaaaaagcattgagttaatttttttaaatatcaactaaaatatcatagttctgtggtagacattgttttataatgaaataactgcaactagagaaaactgtataaaaacattaaattgtcagtatttttgtaaggttccattttgtaaagagaataatattcaaagacttttgtagcatacaaagtgaaaacttgtatctgcgaaactatacttgtattaaatgtgctttttaaataaaagctcgtaacacaactaattaaggacttgcaaactgga

SEQ ID NO: 75330 - DNA, 2763 bp, Homo sapiens
  misc_feature (46)..(46): n is a, c, g, or t
  misc_feature (187)..(187): n is a, c, g, or t
agcgggggggagggggcggaccccgagccgcgaggggcgcggggcngggcgcggggtcccgggagagggcgctgggcgcttcgggcccagatcatctttcttgctgacaagtatcatctaggaatcactctacctcgctggcaattttgagaaaatagccagttattttgtgctgaactttcatctngttaagggtcattccttcagtattcaagtgagtaagaaaagacctattctgcttttgagcgggcctccccttcctcatcatcgagacaagcaccatcaagccttaccaccgagggttttactgcaatgatgagagcatcaagtacccactgaaaactggtgagacaataaatgacgctgtgctctgtgccgtggggatcgtcattgccatcctcgcgatcatcacgggggaattctaccggatctattacctgaagaagtcgcggtcgacgattcagaacccctacgtggcagcactctataagcaagtgggctgcttcctctttggctgtgccatcagccagtctttcacagacattgccaaagtgtccatagggcgcctgcgtcctcacttcttgagtgtctgcaaccctgatttcagccagatcaactgctctgaaggctacattcagaactacagatgcagaggtgatgacagcaaagtccaggaagccagagcccgcctgctccggcccctcctgcagttcaccttgatcatgatggccttctacacgggactgtctcgcgtatcagaccacaagcaccatcccagtgatgttctggcaggatttgctcaaggagccctggtggcctgctgcatagttttcttcgtgtctgacctcttcaagactaagacgacgctctccctgcctgcccctgctatccggaaggaaatcctttcacctgtggacattattgacaggaacaatcaccacaacatgatgtaggtgccacccacctcctgagctgtttttgtaaaatgactgctgacagcaagttcttgctgctctccaatctcatcagacagtagaatgtagggaaaaacttttgcccgactgatttttaaaaaggaaaaaaaaaatgttttactatgtggccttccaaaataggtagtgtttgcctatgtggaaacaacagcaaactaacaccaagtgccagagtcctggatgtgcaattggtttaagtgttcatgttctagtgaacacagcttgttcaggaacaaacactaaaacgatttgagtagaggctgctggtcaccttttgtgacctgaggaatcccaggcctgtgagaaaagcaaaaattcacattgcagcacatgatgccagaaatagcactgaatcaagaaaatagccattgcggagctgccctcttgagtctttctgtccatcccattctattctgtactgtgacttcagttcaggaagttttgttttgtgttttaaataaaaggaaagagcaagtttgctcagtcaagtgatcagatcccgaatctagattcccagttctaaggccttatcacctcccctgcccataggccaacaaccatagttcctcacattagtgattagcagactctttgtggacgagtgaatttcacaaacagcacaatttcagaagaaatcgagggcacaggccctcacttttcttcttttgacgcatcatcctgtgatgttgaaatgtcaattgcaggatgctgatgttgtgcacgtcaatcaccgggcacttgcatactcttagaaacagttcgacttcggttactgccttctcccttgaaatccttgctgcgtgcccaccaggatttcctgtgagggcccgggaatgagcaaggcatggtctgccaccagctgacggaaagcagccttctgtacaacagatgggagggtgaagggggcagaatgaaaatcgaaccaaccttttagctgttgcaaatcagaaggagccagagaagcaggcagtctcatgcatgagaggttacccttcaggatgacagagctgagggtctttgtaggagttgctcttgctgtgtaaagcactattgtcttggggttgagccctagggcagttcttggtaggttctgctgggcagaacatatgggttaaatctcggtagagagttttcctcatcctctatccgtaagtgtccttccatgcaaggtcccactctaggtgatagacagggaccccttctactgaacctttgaggaaaggaggaaggaagaaatgcgtttagatcttggatgcagacctttcaaagggttaaatgtaaccatatggatcaaccacatgcacatccttactacagaatccgtcctttcatttcaacttatagcaagctatgatttttatatataaatattatataaataatgtataaaacattaaaagttaactatgtaagatattatttctgaaacaatttagctatatccactatgattataaactgtgtctcgacctgtgttatttacattagctgcttaaaaaagcattgagttaatttttttaaatatcaactaaaatatcatagttctgtggtagacattgttttataatgaaataactgcaactagagaaaactgtataaaaacattaaattgtcagtatttttgtaaggttccattttgtaaagagaataatattcaaagacttttgtagcatacaaagtgaaaacttgtatctgcgaaactatacttgtattaaatgtgctttttaaataaaagctcgtaacacaactaattaaggacttgcaaactgga

SEQ ID NO: 75331 - DNA, 2771 bp, Homo sapiens
tttccttaaaaattatattttcagggtaatacaattcaagtcacaataaagacctgaaagcctcaggtttgtaggtgaggaaaaatgcattttagctgtacagccctaacttttacttgacccaaggccagcaagaaaatgtttctttttatttatatatattttttctttggtgacaatttggtgtttctgaacgctaggggctcccggtttctctggtttgagagtaacttttccttttaggacttttttttttttttttgaagggggtgggggaaaatgtggccttaattatcctacgtcttaggcagcttaaggaaggggctgtgctttcggaatcccatccgagccaagtaaggaggtccctctctctctctccccccacgtcttctctttttaaaggacctcgtgaaataaaagtgcagaaaacaaacccaggcgatcacagcagcagccgccgcggcagcagcaccaacagcaggaggagcaggaggagccggaggaggaggaggaggaggaggcaaagttagagttggggctggcgctccggagttgctgggctcagcgcagctcccattcattaaggaaccagctgcggaggaaggtggccgagcgcccgcgctgcccactcgctcgctcgcgcactcagacgcgcgccacaacagcgcgccccaagctgcgcagctctgcaaaagtttctgctcgggatctggctctcttccccttgatcatgatggccttctacacgggactgtctcgcgtatcagaccacaagcaccatcccagtgatgttctggcaggatttgctcaaggagccctggtggcctgctgcatagttttcttcgtgtctgacctcttcaagactaagacgacgctctccctgcctgcccctgctatccggaaggaaatcctttcacctgtggacattattgacaggaacaatcaccacaacatgatgtaggtgccacccacctcctgagctgtttttgtaaaatgactgctgacagcaagttcttgctgctctccaatctcatcagacagtagaatgtagggaaaaacttttgcccgactgatttttaaaaaggaaaaaaaaaatgttttactatgtggccttccaaaataggtagtgtttgcctatgtggaaacaacagcaaactaacaccaagtgccagagtcctggatgtgcaattggtttaagtgttcatgttctagtgaacacagcttgttcaggaacaaacactaaaacgatttgagtagaggctgctggtcaccttttgtgacctgaggaatcccaggcctgtgagaaaagcaaaaattcacattgcagcacatgatgccagaaatagcactgaatcaagaaaatagccattgcggagctgccctcttgagtctttctgtccatcccattctattctgtactgtgacttcagttcaggaagttttgttttgtgttttaaataaaaggaaagagcaagtttgctcagtcaagtgatcagatcccgaatctagattcccagttctaaggccttatcacctcccctgcccataggccaacaaccatagttcctcacattagtgattagcagactctttgtggacgagtgaatttcacaaacagcacaatttcagaagaaatcgagggcacaggccctcacttttcttcttttgacgcatcatcctgtgatgttgaaatgtcaattgcaggatgctgatgttgtgcacgtcaatcaccgggcacttgcatactcttagaaacagttcgacttcggttactgccttctcccttgaaatccttgctgcgtgcccaccaggatttcctgtgagggcccgggaatgagcaaggcatggtctgccaccagctgacggaaagcagccttctgtacaacagatgggagggtgaagggggcagaatgaaaatcgaaccaaccttttagctgttgcaaatcagaaggagccagagaagcaggcagtctcatgcatgagaggttacccttcaggatgacagagctgagggtctttgtaggagttgctcttgctgtgtaaagcactattgtcttggggttgagccctagggcagttcttggtaggttctgctgggcagaacatatgggttaaatctcggtagagagttttcctcatcctctatccgtaagtgtccttccatgcaaggtcccactctaggtgatagacagggaccccttctactgaacctttgaggaaaggaggaaggaagaaatgcgtttagatcttggatgcagacctttcaaagggttaaatgtaaccatatggatcaaccacatgcacatccttactacagaatccgtcctttcatttcaacttatagcaagctatgatttttatatataaatattatataaataatgtataaaacattaaaagttaactatgtaagatattatttctgaaacaatttagctatatccactatgattataaactgtgtctcgacctgtgttatttacattagctgcttaaaaaagcattgagttaatttttttaaatatcaactaaaatatcatagttctgtggtagacattgttttataatgaaataactgcaactagagaaaactgtataaaaacattaaattgtcagtatttttgtaaggttccattttgtaaagagaataatattcaaagacttttgtagcatacaaagtgaaaacttgtatctgcgaaactatacttgtattaaatgtgctttttaaataaaagctcgtaacacaactaattaaggacttgcaaactgga

SEQ ID NO: 75332 - DNA, 2958 bp, Homo sapiens
acagtgctgtcattagtagtgagcacattaccatctgcaggacaaagactcatcaattcagaaggctgttgggtgtagaaactttgatagtgttttagtcgctattttgaaatccagccaagtgtttcctattaaattacatgactgatagctgccgcttatggttacttagtaaaaactcctgttgctaaatggctcaaatggatgtctgtgtgtttattttgccatctaatacaaagcataaatttttcttactccgggagctgggcaaacccttgaatctttcatcataagcacattgaggcaggaactatgcctgtgccatcctcacacctttgcaagtggcactcaataaatgtttctcaagtattgttcagactcagtgaggtcacatccccaggaggaaaaaggacgctgggaatgagtgatacgagatttgtcattaaccgttcctccacgtttagttgccaactttctcagcaacgagaacctggtttcttgacccccgtcaaatggttgatatcactaagttttcaggaaaaagtagttaccactgcctgacttcagctcttgctgataggagttcatgttggctgatctttttcggttacaccctgggattcctttgtgaggaaagggaaagtagtgtgaattaatgactatcactaattatgacctgcttcctttgttgaggaacttatctttcattgctattcgtttgccttgagaaataaggaagtatgggttgcagatatgggcaatggactgagagtccttagaaggggattctactgaaccagtgttgtgcaacctgggacatgtcactgccttttcccgggtctcagtttccctatctgtacaataaaccttgatgatatgatctctgttgtccttccctattcaaagagttatgatttggggccccttttcctgaagtctgcgctcctctgaccttccttttccctctgtacccagacccccgatgtcagttactgacttcgatctctgatttgtgcttctaggttttcttcgtgtctgacctcttcaagactaagacgacgctctccctgcctgcccctgctatccggaaggaaatcctttcacctgtggacattattgacaggaacaatcaccacaacatgatgtaggtgccacccacctcctgagctgtttttgtaaaatgactgctgacagcaagttcttgctgctctccaatctcatcagacagtagaatgtagggaaaaacttttgcccgactgatttttaaaaaggaaaaaaaaaatgttttactatgtggccttccaaaataggtagtgtttgcctatgtggaaacaacagcaaactaacaccaagtgccagagtcctggatgtgcaattggtttaagtgttcatgttctagtgaacacagcttgttcaggaacaaacactaaaacgatttgagtagaggctgctggtcaccttttgtgacctgaggaatcccaggcctgtgagaaaagcaaaaattcacattgcagcacatgatgccagaaatagcactgaatcaagaaaatagccattgcggagctgccctcttgagtctttctgtccatcccattctattctgtactgtgacttcagttcaggaagttttgttttgtgttttaaataaaaggaaagagcaagtttgctcagtcaagtgatcagatcccgaatctagattcccagttctaaggccttatcacctcccctgcccataggccaacaaccatagttcctcacattagtgattagcagactctttgtggacgagtgaatttcacaaacagcacaatttcagaagaaatcgagggcacaggccctcacttttcttcttttgacgcatcatcctgtgatgttgaaatgtcaattgcaggatgctgatgttgtgcacgtcaatcaccgggcacttgcatactcttagaaacagttcgacttcggttactgccttctcccttgaaatccttgctgcgtgcccaccaggatttcctgtgagggcccgggaatgagcaaggcatggtctgccaccagctgacggaaagcagccttctgtacaacagatgggagggtgaagggggcagaatgaaaatcgaaccaaccttttagctgttgcaaatcagaaggagccagagaagcaggcagtctcatgcatgagaggttacccttcaggatgacagagctgagggtctttgtaggagttgctcttgctgtgtaaagcactattgtcttggggttgagccctagggcagttcttggtaggttctgctgggcagaacatatgggttaaatctcggtagagagttttcctcatcctctatccgtaagtgtccttccatgcaaggtcccactctaggtgatagacagggaccccttctactgaacctttgaggaaaggaggaaggaagaaatgcgtttagatcttggatgcagacctttcaaagggttaaatgtaaccatatggatcaaccacatgcacatccttactacagaatccgtcctttcatttcaacttatagcaagctatgatttttatatataaatattatataaataatgtataaaacattaaaagttaactatgtaagatattatttctgaaacaatttagctatatccactatgattataaactgtgtctcgacctgtgttatttacattagctgcttaaaaaagcattgagttaatttttttaaatatcaactaaaatatcatagttctgtggtagacattgttttataatgaaataactgcaactagagaaaactgtataaaaacattaaattgtcagtatttttgtaaggttccattttgtaaagagaataatattcaaagacttttgtagcatacaaagtgaaaacttgtatctgcgaaactatacttgtattaaatgtgctttttaaataaaagctcgtaacacaactaattaaggacttgcaaactgga

SEQ ID NO: 75333 - DNA, 2214 bp, Homo sapiens
tattgaggtcgatctagagcatcccccatcttcctgtacaacagatgggagggtgaagggggcagaatgaaaatcgaaccaaccttttagctgttgcaaactcagaaggagccagagaagcaggcagtctcatgcatgagaggttacccttcaggatgacagagctgagggtctttgtaggagttgctcttgctgtgtaaagcactactgtcttggggttgagccatagggcagttctggcaggatttgctcaaggagccctggtggcctgctgcatagttttcttcgtgtctgacctcttcaagactaagacgacgctctccctgcctgcccctgctatccggaaggaaatcctttcacctgtggacattattgacaggaacaatcaccacaacatgatgtaggtgccacccacctcctgagctgtttttgtaaaatgactgctgacagcaagttcttgctgctctccaatctcatcagacagtagaatgtagggaaaaacttttgcccgactgatttttaaaaaggaaaaaaaaaatgttttactatgtggccttccaaaataggtagtgtttgcctatgtggaaacaacagcaaactaacaccaagtgccagagtcctggatgtgcaattggtttaagtgttcatgttctagtgaacacagcttgttcaggaacaaacactaaaacgatttgagtagaggctgctggtcaccttttgtgacctgaggaatcccaggcctgtgagaaaagcaaaaattcacattgcagcacatgatgccagaaatagcactgaatcaagaaaatagccattgcggagctgccctcttgagtctttctgtccatcccattctattctgtactgtgacttcagttcaggaagttttgttttgtgttttaaataaaaggaaagagcaagtttgctcagtcaagtgatcagatcccgaatctagattcccagttctaaggccttatcacctcccctgcccataggccaacaaccatagttcctcacattagtgattagcagactctttgtggacgagtgaatttcacaaacagcacaatttcagaagaaatcgagggcacaggccctcacttttcttcttttgacgcatcatcctgtgatgttgaaatgtcaattgcaggatgctgatgttgtgcacgtcaatcaccgggcacttgcatactcttagaaacagttcgacttcggttactgccttctcccttgaaatccttgctgcgtgcccaccaggatttcctgtgagggcccgggaatgagcaaggcatggtctgccaccagctgacggaaagcagccttctgtacaacagatgggagggtgaagggggcagaatgaaaatcgaaccaaccttttagctgttgcaaatcagaaggagccagagaagcaggcagtctcatgcatgagaggttacccttcaggatgacagagctgagggtctttgtaggagttgctcttgctgtgtaaagcactattgtcttggggttgagccctagggcagttcttggtaggttctgctgggcagaacatatgggttaaatctcggtagagagttttcctcatcctctatccgtaagtgtccttccatgcaaggtcccactctaggtgatagacagggaccccttctactgaacctttgaggaaaggaggaaggaagaaatgcgtttagatcttggatgcagacctttcaaagggttaaatgtaaccatatggatcaaccacatgcacatccttactacagaatccgtcctttcatttcaacttatagcaagctatgatttttatatataaatattatataaataatgtataaaacattaaaagttaactatgtaagatattatttctgaaacaatttagctatatccactatgattataaactgtgtctcgacctgtgttatttacattagctgcttaaaaaagcattgagttaatttttttaaatatcaactaaaatatcatagttctgtggtagacattgttttataatgaaataactgcaactagagaaaactgtataaaaacattaaattgtcagtatttttgtaaggttccattttgtaaagagaataatattcaaagacttttgtagcatacaaagtgaaaacttgtatctgcgaaactatacttgtattaaatgtgctttttaaataaaagctcgtaacacaactaattaaggacttgcaaactgga

SEQ ID NO: 75334 - DNA, 1945 bp, Homo sapiens
agcgtttcttctcctgtttctccagcttcctagtaatctcagcagccgctctccctgcctgcccctgctatccggaaggaaatcctttcacctgtggacattattgacaggaacaatcaccacaacatgatgtaggtgccacccacctcctgagctgtttttgtaaaatgactgctgacagcaagttcttgctgctctccaatctcatcagacagtagaatgtagggaaaaacttttgcccgactgatttttaaaaaggaaaaaaaaaatgttttactatgtggccttccaaaataggtagtgtttgcctatgtggaaacaacagcaaactaacaccaagtgccagagtcctggatgtgcaattggtttaagtgttcatgttctagtgaacacagcttgttcaggaacaaacactaaaacgatttgagtagaggctgctggtcaccttttgtgacctgaggaatcccaggcctgtgagaaaagcaaaaattcacattgcagcacatgatgccagaaatagcactgaatcaagaaaatagccattgcggagctgccctcttgagtctttctgtccatcccattctattctgtactgtgacttcagttcaggaagttttgttttgtgttttaaataaaaggaaagagcaagtttgctcagtcaagtgatcagatcccgaatctagattcccagttctaaggccttatcacctcccctgcccataggccaacaaccatagttcctcacattagtgattagcagactctttgtggacgagtgaatttcacaaacagcacaatttcagaagaaatcgagggcacaggccctcacttttcttcttttgacgcatcatcctgtgatgttgaaatgtcaattgcaggatgctgatgttgtgcacgtcaatcaccgggcacttgcatactcttagaaacagttcgacttcggttactgccttctcccttgaaatccttgctgcgtgcccaccaggatttcctgtgagggcccgggaatgagcaaggcatggtctgccaccagctgacggaaagcagccttctgtacaacagatgggagggtgaagggggcagaatgaaaatcgaaccaaccttttagctgttgcaaatcagaaggagccagagaagcaggcagtctcatgcatgagaggttacccttcaggatgacagagctgagggtctttgtaggagttgctcttgctgtgtaaagcactattgtcttggggttgagccctagggcagttcttggtaggttctgctgggcagaacatatgggttaaatctcggtagagagttttcctcatcctctatccgtaagtgtccttccatgcaaggtcccactctaggtgatagacagggaccccttctactgaacctttgaggaaaggaggaaggaagaaatgcgtttagatcttggatgcagacctttcaaagggttaaatgtaaccatatggatcaaccacatgcacatccttactacagaatccgtcctttcatttcaacttatagcaagctatgatttttatatataaatattatataaataatgtataaaacattaaaagttaactatgtaagatattatttctgaaacaatttagctatatccactatgattataaactgtgtctcgacctgtgttatttacattagctgcttaaaaaagcattgagttaatttttttaaatatcaactaaaatatcatagttctgtggtagacattgttttataatgaaataactgcaactagagaaaactgtataaaaacattaaattgtcagtatttttgtaaggttccattttgtaaagagaataatattcaaagacttttgtagcatacaaagtgaaaacttgtatctgcgaaactatacttgtattaaatgtgctttttaaataaaagctcgtaacacaactaattaaggacttgcaaactgga

SEQ ID NO: 75335 - DNA, 1713 bp, Homo sapiens
agctcggtacccctgtatcccggggagaaaaaaaaaatgttttactatgtggccttccaaaataggtagtgtttgcctatgtggaaacaacagcaaactaacaccaagtgccagagtcctggatgtgcaattggtttaagtgttcatgttctagtgaacacagcttgttcaggaacaaacactaaaacgatttgagtagaggctgctggtcaccttttgtgacctgaggaatcccaggcctgtgagaaaagcaaaaattcacattgcagcacatgatgccagaaatagcactgaatcaagaaaatagccattgcggagctgccctcttgagtctttctgtccatcccattctattctgtactgtgacttcagttcaggaagttttgttttgtgttttaaataaaaggaaagagcaagtttgctcagtcaagtgatcagatcccgaatctagattcccagttctaaggccttatcacctcccctgcccataggccaacaaccatagttcctcacattagtgattagcagactctttgtggacgagtgaatttcacaaacagcacaatttcagaagaaatcgagggcacaggccctcacttttcttcttttgacgcatcatcctgtgatgttgaaatgtcaattgcaggatgctgatgttgtgcacgtcaatcaccgggcacttgcatactcttagaaacagttcgacttcggttactgccttctcccttgaaatccttgctgcgtgcccaccaggatttcctgtgagggcccgggaatgagcaaggcatggtctgccaccagctgacggaaagcagccttctgtacaacagatgggagggtgaagggggcagaatgaaaatcgaaccaaccttttagctgttgcaaatcagaaggagccagagaagcaggcagtctcatgcatgagaggttacccttcaggatgacagagctgagggtctttgtaggagttgctcttgctgtgtaaagcactattgtcttggggttgagccctagggcagttcttggtaggttctgctgggcagaacatatgggttaaatctcggtagagagttttcctcatcctctatccgtaagtgtccttccatgcaaggtcccactctaggtgatagacagggaccccttctactgaacctttgaggaaaggaggaaggaagaaatgcgtttagatcttggatgcagacctttcaaagggttaaatgtaaccatatggatcaaccacatgcacatccttactacagaatccgtcctttcatttcaacttatagcaagctatgatttttatatataaatattatataaataatgtataaaacattaaaagttaactatgtaagatattatttctgaaacaatttagctatatccactatgattataaactgtgtctcgacctgtgttatttacattagctgcttaaaaaagcattgagttaatttttttaaatatcaactaaaatatcatagttctgtggtagacattgttttataatgaaataactgcaactagagaaaactgtataaaaacattaaattgtcagtatttttgtaaggttccattttgtaaagagaataatattcaaagacttttgtagcatacaaagtgaaaacttgtatctgcgaaactatacttgtattaaatgtgctttttaaataaaagctcgtaacacaactaattaaggacttgcaaactgga

SEQ ID NO: 75336 - DNA, 1704 bp, Homo sapiens
gcagaagatctacctcatcgtgcagaatcaccttactatgtggccttccaaaataggtagtgtttgcctatgtggaaacaacagcaaactaacaccaagtgccagagtcctggatgtgcaattggtttaagtgttcatgttctagtgaacacagcttgttcaggaacaaacactaaaacgatttgagtagaggctgctggtcaccttttgtgacctgaggaatcccaggcctgtgagaaaagcaaaaattcacattgcagcacatgatgccagaaatagcactgaatcaagaaaatagccattgcggagctgccctcttgagtctttctgtccatcccattctattctgtactgtgacttcagttcaggaagttttgttttgtgttttaaataaaaggaaagagcaagtttgctcagtcaagtgatcagatcccgaatctagattcccagttctaaggccttatcacctcccctgcccataggccaacaaccatagttcctcacattagtgattagcagactctttgtggacgagtgaatttcacaaacagcacaatttcagaagaaatcgagggcacaggccctcacttttcttcttttgacgcatcatcctgtgatgttgaaatgtcaattgcaggatgctgatgttgtgcacgtcaatcaccgggcacttgcatactcttagaaacagttcgacttcggttactgccttctcccttgaaatccttgctgcgtgcccaccaggatttcctgtgagggcccgggaatgagcaaggcatggtctgccaccagctgacggaaagcagccttctgtacaacagatgggagggtgaagggggcagaatgaaaatcgaaccaaccttttagctgttgcaaatcagaaggagccagagaagcaggcagtctcatgcatgagaggttacccttcaggatgacagagctgagggtctttgtaggagttgctcttgctgtgtaaagcactattgtcttggggttgagccctagggcagttcttggtaggttctgctgggcagaacatatgggttaaatctcggtagagagttttcctcatcctctatccgtaagtgtccttccatgcaaggtcccactctaggtgatagacagggaccccttctactgaacctttgaggaaaggaggaaggaagaaatgcgtttagatcttggatgcagacctttcaaagggttaaatgtaaccatatggatcaaccacatgcacatccttactacagaatccgtcctttcatttcaacttatagcaagctatgatttttatatataaatattatataaataatgtataaaacattaaaagttaactatgtaagatattatttctgaaacaatttagctatatccactatgattataaactgtgtctcgacctgtgttatttacattagctgcttaaaaaagcattgagttaatttttttaaatatcaactaaaatatcatagttctgtggtagacattgttttataatgaaataactgcaactagagaaaactgtataaaaacattaaattgtcagtatttttgtaaggttccattttgtaaagagaataatattcaaagacttttgtagcatacaaagtgaaaacttgtatctgcgaaactatacttgtattaaatgtgctttttaaataaaagctcgtaacacaactaattaaggacttgcaaactgga

SEQ ID NO: 75337 - DNA, 1650 bp, Homo sapiens
cgagtgtcgaccggagacacttacgaacagcaaactaacaccaagtgccagagtcctggatgtgcaattggtttaagtgttcatgttctagtgaacacagcttgttcaggaacaaacactaaaacgatttgagtagaggctgctggtcaccttttgtgacctgaggaatcccaggcctgtgagaaaagcaaaaattcacattgcagcacatgatgccagaaatagcactgaatcaagaaaatagccattgcggagctgccctcttgagtctttctgtccatcccattctattctgtactgtgacttcagttcaggaagttttgttttgtgttttaaataaaaggaaagagcaagtttgctcagtcaagtgatcagatcccgaatctagattcccagttctaaggccttatcacctcccctgcccataggccaacaaccatagttcctcacattagtgattagcagactctttgtggacgagtgaatttcacaaacagcacaatttcagaagaaatcgagggcacaggccctcacttttcttcttttgacgcatcatcctgtgatgttgaaatgtcaattgcaggatgctgatgttgtgcacgtcaatcaccgggcacttgcatactcttagaaacagttcgacttcggttactgccttctcccttgaaatccttgctgcgtgcccaccaggatttcctgtgagggcccgggaatgagcaaggcatggtctgccaccagctgacggaaagcagccttctgtacaacagatgggagggtgaagggggcagaatgaaaatcgaaccaaccttttagctgttgcaaatcagaaggagccagagaagcaggcagtctcatgcatgagaggttacccttcaggatgacagagctgagggtctttgtaggagttgctcttgctgtgtaaagcactattgtcttggggttgagccctagggcagttcttggtaggttctgctgggcagaacatatgggttaaatctcggtagagagttttcctcatcctctatccgtaagtgtccttccatgcaaggtcccactctaggtgatagacagggaccccttctactgaacctttgaggaaaggaggaaggaagaaatgcgtttagatcttggatgcagacctttcaaagggttaaatgtaaccatatggatcaaccacatgcacatccttactacagaatccgtcctttcatttcaacttatagcaagctatgatttttatatataaatattatataaataatgtataaaacattaaaagttaactatgtaagatattatttctgaaacaatttagctatatccactatgattataaactgtgtctcgacctgtgttatttacattagctgcttaaaaaagcattgagttaatttttttaaatatcaactaaaatatcatagttctgtggtagacattgttttataatgaaataactgcaactagagaaaactgtataaaaacattaaattgtcagtatttttgtaaggttccattttgtaaagagaataatattcaaagacttttgtagcatacaaagtgaaaacttgtatctgcgaaactatacttgtattaaatgtgctttttaaataaaagctcgtaacacaactaattaaggacttgcaaactgga

SEQ ID NO: 75338 - DNA, 1655 bp, Homo sapiens
gactcgaggtagtacccggagacacttacgaacagcaaactaacaccaagtgccagagtcctggatgtgcaattggtttaagtgttcatgttctagtgaacacagcttgttcaggaacaaacactaaaacgatttgagtagaggctgctggtcaccttttgtgacctgaggaatcccaggcctgtgagaaaagcaaaaattcacattgcagcacatgatgccagaaatagcactgaatcaagaaaatagccattgcggagctgccctcttgagtctttctgtccatcccattctattctgtactgtgacttcagttcaggaagttttgttttgtgttttaaataaaaggaaagagcaagtttgctcagtcaagtgatcagatcccgaatctagattcccagttctaaggccttatcacctcccctgcccataggccaacaaccatagttcctcacattagtgattagcagactctttgtggacgagtgaatttcacaaacagcacaatttcagaagaaatcgagggcacaggccctcacttttcttcttttgacgcatcatcctgtgatgttgaaatgtcaattgcaggatgctgatgttgtgcacgtcaatcaccgggcacttgcatactcttagaaacagttcgacttcggttactgccttctcccttgaaatccttgctgcgtgcccaccaggatttcctgtgagggcccgggaatgagcaaggcatggtctgccaccagctgacggaaagcagccttctgtacaacagatgggagggtgaagggggcagaatgaaaatcgaaccaaccttttagctgttgcaaatcagaaggagccagagaagcaggcagtctcatgcatgagaggttacccttcaggatgacagagctgagggtctttgtaggagttgctcttgctgtgtaaagcactattgtcttggggttgagccctagggcagttcttggtaggttctgctgggcagaacatatgggttaaatctcggtagagagttttcctcatcctctatccgtaagtgtccttccatgcaaggtcccactctaggtgatagacagggaccccttctactgaacctttgaggaaaggaggaaggaagaaatgcgtttagatcttggatgcagacctttcaaagggttaaatgtaaccatatggatcaaccacatgcacatccttactacagaatccgtcctttcatttcaacttatagcaagctatgatttttatatataaatattatataaataatgtataaaacattaaaagttaactatgtaagatattatttctgaaacaatttagctatatccactatgattataaactgtgtctcgacctgtgttatttacattagctgcttaaaaaagcattgagttaatttttttaaatatcaactaaaatatcatagttctgtggtagacattgttttataatgaaataactgcaactagagaaaactgtataaaaacattaaattgtcagtatttttgtaaggttccattttgtaaagagaataatattcaaagacttttgtagcatacaaagtgaaaacttgtatctgcgaaactatacttgtattaaatgtgctttttaaataaaagctcgtaacacaactaattaaggacttgcaaactgga

SEQ ID NO: 75339 - DNA, 1654 bp, Homo sapiens
tatacgactcgagttagtaccaacttacgaacagcaaactaacaccaagtgccagagtcctggatgtgcaattggtttaagtgttcatgttctagtgaacacagcttgttcaggaacaaacactaaaacgatttgagtagaggctgctggtcaccttttgtgacctgaggaatcccaggcctgtgagaaaagcaaaaattcacattgcagcacatgatgccagaaatagcactgaatcaagaaaatagccattgcggagctgccctcttgagtctttctgtccatcccattctattctgtactgtgacttcagttcaggaagttttgttttgtgttttaaataaaaggaaagagcaagtttgctcagtcaagtgatcagatcccgaatctagattcccagttctaaggccttatcacctcccctgcccataggccaacaaccatagttcctcacattagtgattagcagactctttgtggacgagtgaatttcacaaacagcacaatttcagaagaaatcgagggcacaggccctcacttttcttcttttgacgcatcatcctgtgatgttgaaatgtcaattgcaggatgctgatgttgtgcacgtcaatcaccgggcacttgcatactcttagaaacagttcgacttcggttactgccttctcccttgaaatccttgctgcgtgcccaccaggatttcctgtgagggcccgggaatgagcaaggcatggtctgccaccagctgacggaaagcagccttctgtacaacagatgggagggtgaagggggcagaatgaaaatcgaaccaaccttttagctgttgcaaatcagaaggagccagagaagcaggcagtctcatgcatgagaggttacccttcaggatgacagagctgagggtctttgtaggagttgctcttgctgtgtaaagcactattgtcttggggttgagccctagggcagttcttggtaggttctgctgggcagaacatatgggttaaatctcggtagagagttttcctcatcctctatccgtaagtgtccttccatgcaaggtcccactctaggtgatagacagggaccccttctactgaacctttgaggaaaggaggaaggaagaaatgcgtttagatcttggatgcagacctttcaaagggttaaatgtaaccatatggatcaaccacatgcacatccttactacagaatccgtcctttcatttcaacttatagcaagctatgatttttatatataaatattatataaataatgtataaaacattaaaagttaactatgtaagatattatttctgaaacaatttagctatatccactatgattataaactgtgtctcgacctgtgttatttacattagctgcttaaaaaagcattgagttaatttttttaaatatcaactaaaatatcatagttctgtggtagacattgttttataatgaaataactgcaactagagaaaactgtataaaaacattaaattgtcagtatttttgtaaggttccattttgtaaagagaataatattcaaagacttttgtagcatacaaagtgaaaacttgtatctgcgaaactatacttgtattaaatgtgctttttaaataaaagctcgtaacacaactaattaaggacttgcaaactgga

SEQ ID NO: 75340 - DNA, 1444 bp, Homo sapiens
tctggctcctctgatttgcaacagctaaaaggttggttcgattttcattctgccctcttgagtctttctgtccatcccattctattctgtactgtgacttcagttcaggaagttttgttttgtgttttaaataaaaggaaagagcaagtttgctcagtcaagtgatcagatcccgaatctagattcccagttctaaggccttatcacctcccctgcccataggccaacaaccatagttcctcacattagtgattagcagactctttgtggacgagtgaatttcacaaacagcacaatttcagaagaaatcgagggcacaggccctcacttttcttcttttgacgcatcatcctgtgatgttgaaatgtcaattgcaggatgctgatgttgtgcacgtcaatcaccgggcacttgcatactcttagaaacagttcgacttcggttactgccttctcccttgaaatccttgctgcgtgcccaccaggatttcctgtgagggcccgggaatgagcaaggcatggtctgccaccagctgacggaaagcagccttctgtacaacagatgggagggtgaagggggcagaatgaaaatcgaaccaaccttttagctgttgcaaatcagaaggagccagagaagcaggcagtctcatgcatgagaggttacccttcaggatgacagagctgagggtctttgtaggagttgctcttgctgtgtaaagcactattgtcttggggttgagccctagggcagttcttggtaggttctgctgggcagaacatatgggttaaatctcggtagagagttttcctcatcctctatccgtaagtgtccttccatgcaaggtcccactctaggtgatagacagggaccccttctactgaacctttgaggaaaggaggaaggaagaaatgcgtttagatcttggatgcagacctttcaaagggttaaatgtaaccatatggatcaaccacatgcacatccttactacagaatccgtcctttcatttcaacttatagcaagctatgatttttatatataaatattatataaataatgtataaaacattaaaagttaactatgtaagatattatttctgaaacaatttagctatatccactatgattataaactgtgtctcgacctgtgttatttacattagctgcttaaaaaagcattgagttaatttttttaaatatcaactaaaatatcatagttctgtggtagacattgttttataatgaaataactgcaactagagaaaactgtataaaaacattaaattgtcagtatttttgtaaggttccattttgtaaagagaataatattcaaagacttttgtagcatacaaagtgaaaacttgtatctgcgaaactatacttgtattaaatgtgctttttaaataaaagctcgtaacacaactaattaaggacttgcaaactgga

SEQ ID NO: 75341 - DNA, 1332 bp, Homo sapiens
  misc_feature (1228)..(1228): n is a, c, g, or t
  misc_feature (1255)..(1255): n is a, c, g, or t
  misc_feature (1273)..(1273): n is a, c, g, or t
tttccttaaaaattatattttcagggtaatacaattcaagtcacaataaagacctgaaagcctcaggtttgtaggtgaggaaaaatgcattttagctgtacagccctaacttttacttgacccaaggccagcaagaaaatgtttctttttatttatatatattttttctttggtgacaatttggtgtttctgaacgctaggggctcccggtttctctggtttgagagtaacttttccttttaggacttttttttttttttttgaagggggtgggggaaaatgtggccttaattatcctacgtcttaggcagcttaaggaaggggctgtgctttcggaatcccatccgagccaagtaaggaggtccctctctctctctccccccacgtcttctctttttaaaggacctcgtgaaataaaagtgcagaaaacaaacccaggcgatcacagcagcagccgccgcggcagcagcaccaacagcaggaggagcaggaggagccggaggaggaggaggaggaggaggcaaagttagagttggggctggcgctccggagttgctgggctcagcgcagctcccattcattaaggaaccagctgcggaggaaggtggccgagcgcccgcgctgcccactcgctcgctcgcgcactcagacgcgcgccacaacagcgcgccccaagctgcgcagctctgcaaaagtttctgctcgggatctggctctcttccccttggactttagaacgatttagggttgacagaggaaagcagaggcgcgcaggaggagcagaaaacaccaccttctgcagttggaggcaggcagccccggctgcactctagccgccgcgcccggagccggggccgacccgccactatccgcagcagcctcggccaggaggcgacccgggcgcctgggtgtgtggctgctgttgcgggacgtcttcgcggggcgggaggctcgcgccgcagccagcgccatgcaaaactacaagtacgacaaagcgatcgtcccggagagcaagaacggcggcagcccggcgctcaacaacaacccgaggaggagcggcagcaagcgggtgctgctcatctgcctcgacctcttctgcctcttcatggcgggcctccccttcctcatcatcgagacaagcaccatggccaatgtcagcacaaggctgaggcccttactagagtcaggtcattgttggtgatctttacccaaatctcaaaatctcganatttgctcaaaccctgtgacatcaaanctaccctttaccttgtcngttgattccttcattttagtaatttccttttctatagttaaagttctttgtctctcccc

SEQ ID NO: 75342 - DNA, 360 bp, Homo sapiens
ggtaggtacattcattcattcattcttttgtttattcatgaattcataggtgcctgctatgttccaggcatgggtccaaagcactaccaaggatgcaaaaatgaacagggcctagtgcctgctctcaaggttacagtctagggagggaagacagacagacaagtgtgtatcagggatgtgaatacggccctttcatggccctctcttgctcttgcaggaagtccttcttctctggccatgcctccttctccatgtacactatgctgtatttggtggtaagtacccaccctttgatttgagcagtgctcagttccagcttcgatcccttctgatatgatagccctcaaaatagtttagggg

SEQ ID NO: 75343 - DNA, 3716 bp, Homo sapiens
tttccttaaaaattatattttcagggtaatacaattcaagtcacaataaagacctgaaagcctcaggtttgtaggtgaggaaaaatgcattttagctgtacagccctaacttttacttgacccaaggccagcaagaaaatgtttctttttatttatatatattttttctttggtgacaatttggtgtttctgaacgctaggggctcccggtttctctggtttgagagtaacttttccttttaggacttttttttttttttttgaagggggtgggggaaaatgtggccttaattatcctacgtcttaggcagcttaaggaaggggctgtgctttcggaatcccatccgagccaagtaaggaggtccctctctctctctccccccacgtcttctctttttaaaggacctcgtgaaataaaagtgcagaaaacaaacccaggcgatcacagcagcagccgccgcggcagcagcaccaacagcaggaggagcaggaggagccggaggaggaggaggaggaggaggcaaagttagagttggggctggcgctccggagttgctgggctcagcgcagctcccattcattaaggaaccagctgcggaggaaggtggccgagcgcccgcgctgcccactcgctcgctcgcgcactcagacgcgcgccacaacagcgcgccccaagctgcgcagctctgcaaaagtttctgctcgggatctggctctcttccccttggactttagaacgatttagggttgacagaggaaagcagaggcgcgcaggaggagcagaaaacaccaccttctgcagttggaggcaggcagccccggctgcactctagccgccgcgcccggagccggggccgacccgccactatccgcagcagcctcggccaggaggcgacccgggcgcctgggtgtgtggctgctgttgcgggacgtcttcgcggggcgggaggctcgcgccgcagccagcgccatgcaaaactacaagtacgacaaagcgatcgtcccggagagcaagaacggcggcagcccggcgctcaacaacaacccgaggaggagcggcagcaagcgggtgctgctcatctgcctcgacctcttctgcctcttcatggcgggcctccccttcctcatcatcgagacaagcaccatcaagccttaccaccgagggttttactgcaatgatgagagcatcaagtacccactgaaaactggtgagacaataaatgacgctgtgctctgtgccgtggggatcgtcattgccatcctcgcgatcatcacgggggaattctaccggatctattacctgaagaagtcgcggtcgacgattcagaacccctacgtggcagcactctataagcaagtgggctgcttcctctttggctgtgccatcagccagtctttcacagacattgccaaagtgtccatagggcgcctgcgtcctcacttcttgagtgtctgcaaccctgatttcagccagatcaactgctctgaaggctacattcagaactacagatgcagaggtgatgacagcaaagtccaggaagccaggaagtccttcttctctggccatgcctccttctccatgtacactatgctgtatttggtgctatacctgcaggcccgcttcacttggcgaggagcccgcctgctccggcccctcctgcagttcaccttgatcatgatggccttctacacgggactgtctcgcgtatcagaccacaagcaccatcccagtgatgttctggcaggatttgctcaaggagccctggtggcctgctgcatagttttcttcgtgtctgacctcttcaagactaagacgacgctctccctgcctgcccctgctatccggaaggaaatcctttcacctgtggacattattgacaggaacaatcaccacaacatgatgtaggtgccacccacctcctgagctgtttttgtaaaatgactgctgacagcaagttcttgctgctctccaatctcatcagacagtagaatgtagggaaaaacttttgcccgactgatttttaaaaaggaaaaaaaaaatgttttactatgtggccttccaaaataggtagtgtttgcctatgtggaaacaacagcaaactaacaccaagtgccagagtcctggatgtgcaattggtttaagtgttcatgttctagtgaacacagcttgttcaggaacaaacactaaaacgatttgagtagaggctgctggtcaccttttgtgacctgaggaatcccaggcctgtgagaaaagcaaaaattcacattgcagcacatgatgccagaaatagcactgaatcaagaaaatagccattgcggagctgccctcttgagtctttctgtccatcccattctattctgtactgtgacttcagttcaggaagttttgttttgtgttttaaataaaaggaaagagcaagtttgctcagtcaagtgatcagatcccgaatctagattcccagttctaaggccttatcacctcccctgcccataggccaacaaccatagttcctcacattagtgattagcagactctttgtggacgagtgaatttcacaaacagcacaatttcagaagaaatcgagggcacaggccctcacttttcttcttttgacgcatcatcctgtgatgttgaaatgtcaattgcaggatgctgatgttgtgcacgtcaatcaccgggcacttgcatactcttagaaacagttcgacttcggttactgccttctcccttgaaatccttgctgcgtgcccaccaggatttcctgtgagggcccgggaatgagcaaggcatggtctgccaccagctgacggaaagcagccttctgtacaacagatgggagggtgaagggggcagaatgaaaatcgaaccaaccttttagctgttgcaaatcagaaggagccagagaagcaggcagtctcatgcatgagaggttacccttcaggatgacagagctgagggtctttgtaggagttgctcttgctgtgtaaagcactattgtcttggggttgagccctagggcagttcttggtaggttctgctgggcagaacatatgggttaaatctcggtagagagttttcctcatcctctatccgtaagtgtccttccatgcaaggtcccactctaggtgatagacagggaccccttctactgaacctttgaggaaaggaggaaggaagaaatgcgtttagatcttggatgcagacctttcaaagggttaaatgtaaccatatggatcaaccacatgcacatccttactacagaatccgtcctttcatttcaacttatagcaagctatgatttttatatataaatattatataaataatgtataaaacattaaaagttaactatgtaagatattatttctgaaacaatttagctatatccactatgattataaactgtgtctcgacctgtgttatttacattagctgcttaaaaaagcattgagttaatttttttaaatatcaactaaaatatcatagttctgtggtagacattgttttataatgaaataactgcaactagagaaaactgtataaaaacattaaattgtcagtatttttgtaaggttccattttgtaaagagaataatattcaaagacttttgtagcatacaaagtgaaaacttgtatctgcgaaactatacttgtattaaatgtgctttttaaataaaagctcgtaacacaactaattaaggacttgcaaactgga

SEQ ID NO: 75344 - DNA, 3662 bp, Homo sapiens
tttccttaaaaattatattttcagggtaatacaattcaagtcacaataaagacctgaaagcctcaggtttgtaggtgaggaaaaatgcattttagctgtacagccctaacttttacttgacccaaggccagcaagaaaatgtttctttttatttatatatattttttctttggtgacaatttggtgtttctgaacgctaggggctcccggtttctctggtttgagagtaacttttccttttaggacttttttttttttttttgaagggggtgggggaaaatgtggccttaattatcctacgtcttaggcagcttaaggaaggggctgtgctttcggaatcccatccgagccaagtaaggaggtccctctctctctctccccccacgtcttctctttttaaaggacctcgtgaaataaaagtgcagaaaacaaacccaggcgatcacagcagcagccgccgcggcagcagcaccaacagcaggaggagcaggaggagccggaggaggaggaggaggaggaggcaaagttagagttggggctggcgctccggagttgctgggctcagcgcagctcccattcattaaggaaccagctgcggaggaaggtggccgagcgcccgcgctgcccactcgctcgctcgcgcactcagacgcgcgccacaacagcgcgccccaagctgcgcagctctgcaaaagtttctgctcgggatctggctctcttccccttggactttagaacgatttagggttgacagaggaaagcagaggcgcgcaggaggagcagaaaacaccaccttctgcagttggaggcaggcagccccggctgcactctagccgccgcgcccggagccggggccgacccgccactatccgcagcagcctcggccaggaggcgacccgggcgcctgggtgtgtggctgctgttgcgggacgtcttcgcggggcgggaggctcgcgccgcagccagcgccatgcaaaactacaagtacgacaaagcgatcgtcccggagagcaagaacggcggcagcccggcgctcaacaacaacccgaggaggagcggcagcaagcgggtgctgctcatctgcctcgacctcttctgcctcttcatggcgggcctccccttcctcatcatcgagacaagcaccatcaagccttaccaccgagggttttactgcaatgatgagagcatcaagtacccactgaaaactggtgagacaataaatgacgctgtgctctgtgccgtggggatcgtcattgccatcctcgcgatcatcacgggggaattctaccggatctattacctgaagaagtcgcggtcgacgattcagaacccctacgtggcagcactctataagcaagtgggctgcttcctctttggctgtgccatcagccagtctttcacagacattgccaaagtgtccatagggcgcctgcgtcctcacttcttgagtgtctgcaaccctgatttcagccagatcaactgctctgaaggctacattcagaactacagatgcagaggtgatgacagcaaagtccaggaagccaggaagtccttcttctctggccatgcctccttctccatgtacactatgctgtatttggtgctatacctgcaggcccgcttcacttggcgaggagcccgcctgctccggcccctcctgcagttcaccttgatcatgatggccttctacacgggactgtctcgcgtatcagaccacaagcaccatcccagtgatgttctggcaggatttgctcaaggagccctggtggcctgctgcatagttttcttcgtgtctgacctcttcaagactaagacgacgctctccctgcctgcccctgctatccggaaggaaatcctttcacctgtggacattattgacaggaacaatcaccacaacatgatgtaggtgccacccacctcctgagctgtttttgtaaaatgactgctgacagcaagttcttgctgctctccaatctcatcagacagtagaatgtagggaaaaacttttgcccgactgatttttaaaaaggaaaaaaaaaatgttttactatgtggccttccaaaataggtagtgtttgcctatgtggaaacaacagcaaactaacaccaagtgccagagtcctggatgtgcaattggtttaagtgttcatgttctagtgaacacagcttgttcaggaacaaacactaaaacgatttgagtagaggctgctggtcaccttttgtgacctgaggaatcccaggcctgtgagaaaagcaaaaattcacattgcagcacatgatgccagaaatagcactgaatcaagaaaatagccattgcggagctgccctcttgagtctttctgtccatcccattctattctgtactgtgacttcagttcaggaagttttgttttgtgttttaaatccagttctaaggccttatcacctcccctgcccataggccaacaaccatagttcctcacattagtgattagcagactctttgtggacgagtgaatttcacaaacagcacaatttcagaagaaatcgagggcacaggccctcacttttcttcttttgacgcatcatcctgtgatgttgaaatgtcaattgcaggatgctgatgttgtgcacgtcaatcaccgggcacttgcatactcttagaaacagttcgacttcggttactgccttctcccttgaaatccttgctgcgtgcccaccaggatttcctgtgagggcccgggaatgagcaaggcatggtctgccaccagctgacggaaagcagccttctgtacaacagatgggagggtgaagggggcagaatgaaaatcgaaccaaccttttagctgttgcaaatcagaaggagccagagaagcaggcagtctcatgcatgagaggttacccttcaggatgacagagctgagggtctttgtaggagttgctcttgctgtgtaaagcactattgtcttggggttgagccctagggcagttcttggtaggttctgctgggcagaacatatgggttaaatctcggtagagagttttcctcatcctctatccgtaagtgtccttccatgcaaggtcccactctaggtgatagacagggaccccttctactgaacctttgaggaaaggaggaaggaagaaatgcgtttagatcttggatgcagacctttcaaagggttaaatgtaaccatatggatcaaccacatgcacatccttactacagaatccgtcctttcatttcaacttatagcaagctatgatttttatatataaatattatataaataatgtataaaacattaaaagttaactatgtaagatattatttctgaaacaatttagctatatccactatgattataaactgtgtctcgacctgtgttatttacattagctgcttaaaaaagcattgagttaatttttttaaatatcaactaaaatatcatagttctgtggtagacattgttttataatgaaataactgcaactagagaaaactgtataaaaacattaaattgtcagtatttttgtaaggttccattttgtaaagagaataatattcaaagacttttgtagcatacaaagtgaaaacttgtatctgcgaaactatacttgtattaaatgtgctttttaaataaaagctcgtaacacaactaattaaggacttgcaaactgga

SEQ ID NO: 75345 - DNA, 3662 bp, Homo sapiens
tttccttaaaaattatattttcagggtaatacaattcaagtcacaataaagacctgaaagcctcaggtttgtaggtgaggaaaaatgcattttagctgtacagccctaacttttacttgacccaaggccagcaagaaaatgtttctttttatttatatatattttttctttggtgacaatttggtgtttctgaacgctaggggctcccggtttctctggtttgagagtaacttttccttttaggacttttttttttttttttgaagggggtgggggaaaatgtggccttaattatcctacgtcttaggcagcttaaggaaggggctgtgctttcggaatcccatccgagccaagtaaggaggtccctctctctctctccccccacgtcttctctttttaaaggacctcgtgaaataaaagtgcagaaaacaaacccaggcgatcacagcagcagccgccgcggcagcagcaccaacagcaggaggagcaggaggagccggaggaggaggaggaggaggaggcaaagttagagttggggctggcgctccggagttgctgggctcagcgcagctcccattcattaaggaaccagctgcggaggaaggtggccgagcgcccgcgctgcccactcgctcgctcgcgcactcagacgcgcgccacaacagcgcgccccaagctgcgcagctctgcaaaagtttctgctcgggatctggctctcttccccttggactttagaacgatttagggttgacagaggaaagcagaggcgcgcaggaggagcagaaaacaccaccttctgcagttggaggcaggcagccccggctgcactctagccgccgcgcccggagccggggccgacccgccactatccgcagcagcctcggccaggaggcgacccgggcgcctgggtgtgtggctgctgttgcgggacgtcttcgcggggcgggaggctcgcgccgcagccagcgccatgcaaaactacaagtacgacaaagcgatcgtcccggagagcaagaacggcggcagcccggcgctcaacaacaacccgaggaggagcggcagcaagcgggtgctgctcatctgcctcgacctcttctgcctcttcatggcgggcctccccttcctcatcatcgagacaagcaccatcaagccttaccaccgagggttttactgcaatgatgagagcatcaagtacccactggccatcctcgcgatcatcacgggggaattctaccggatctattacctgaagaagtcgcggtcgacgattcagaacccctacgtggcagcactctataagcaagtgggctgcttcctctttggctgtgccatcagccagtctttcacagacattgccaaagtgtccatagggcgcctgcgtcctcacttcttgagtgtctgcaaccctgatttcagccagatcaactgctctgaaggctacattcagaactacagatgcagaggtgatgacagcaaagtccaggaagccaggaagtccttcttctctggccatgcctccttctccatgtacactatgctgtatttggtgctatacctgcaggcccgcttcacttggcgaggagcccgcctgctccggcccctcctgcagttcaccttgatcatgatggccttctacacgggactgtctcgcgtatcagaccacaagcaccatcccagtgatgttctggcaggatttgctcaaggagccctggtggcctgctgcatagttttcttcgtgtctgacctcttcaagactaagacgacgctctccctgcctgcccctgctatccggaaggaaatcctttcacctgtggacattattgacaggaacaatcaccacaacatgatgtaggtgccacccacctcctgagctgtttttgtaaaatgactgctgacagcaagttcttgctgctctccaatctcatcagacagtagaatgtagggaaaaacttttgcccgactgatttttaaaaaggaaaaaaaaaatgttttactatgtggccttccaaaataggtagtgtttgcctatgtggaaacaacagcaaactaacaccaagtgccagagtcctggatgtgcaattggtttaagtgttcatgttctagtgaacacagcttgttcaggaacaaacactaaaacgatttgagtagaggctgctggtcaccttttgtgacctgaggaatcccaggcctgtgagaaaagcaaaaattcacattgcagcacatgatgccagaaatagcactgaatcaagaaaatagccattgcggagctgccctcttgagtctttctgtccatcccattctattctgtactgtgacttcagttcaggaagttttgttttgtgttttaaataaaaggaaagagcaagtttgctcagtcaagtgatcagatcccgaatctagattcccagttctaaggccttatcacctcccctgcccataggccaacaaccatagttcctcacattagtgattagcagactctttgtggacgagtgaatttcacaaacagcacaatttcagaagaaatcgagggcacaggccctcacttttcttcttttgacgcatcatcctgtgatgttgaaatgtcaattgcaggatgctgatgttgtgcacgtcaatcaccgggcacttgcatactcttagaaacagttcgacttcggttactgccttctcccttgaaatccttgctgcgtgcccaccaggatttcctgtgagggcccgggaatgagcaaggcatggtctgccaccagctgacggaaagcagccttctgtacaacagatgggagggtgaagggggcagaatgaaaatcgaaccaaccttttagctgttgcaaatcagaaggagccagagaagcaggcagtctcatgcatgagaggttacccttcaggatgacagagctgagggtctttgtaggagttgctcttgctgtgtaaagcactattgtcttggggttgagccctagggcagttcttggtaggttctgctgggcagaacatatgggttaaatctcggtagagagttttcctcatcctctatccgtaagtgtccttccatgcaaggtcccactctaggtgatagacagggaccccttctactgaacctttgaggaaaggaggaaggaagaaatgcgtttagatcttggatgcagacctttcaaagggttaaatgtaaccatatggatcaaccacatgcacatccttactacagaatccgtcctttcatttcaacttatagcaagctatgatttttatatataaatattatataaataatgtataaaacattaaaagttaactatgtaagatattatttctgaaacaatttagctatatccactatgattataaactgtgtctcgacctgtgttatttacattagctgcttaaaaaagcattgagttaatttttttaaatatcaactaaaatatcatagttctgtggtagacattgttttataatgaaataactgcaactagagaaaactgtataaaaacattaaattgtcagtatttttgtaaggttccattttgtaaagagaataatattcaaagacttttgtagcatacaaagtgaaaacttgtatctgcgaaactatacttgtattaaatgtgctttttaaataaaagctcgtaacacaactaattaaggacttgcaaactgga

SEQ ID NO: 75346 - DNA, 3626 bp, Homo sapiens
tttccttaaaaattatattttcagggtaatacaattcaagtcacaataaagacctgaaagcctcaggtttgtaggtgaggaaaaatgcattttagctgtacagccctaacttttacttgacccaaggccagcaagaaaatgtttctttttatttatatatattttttctttggtgacaatttggtgtttctgaacgctaggggctcccggtttctctggtttgagagtaacttttccttttaggacttttttttttttttttgaagggggtgggggaaaatgtggccttaattatcctacgtcttaggcagcttaaggaaggggctgtgctttcggaatcccatccgagccaagtaaggaggtccctctctctctctccccccacgtcttctctttttaaaggacctcgtgaaataaaagtgcagaaaacaaacccaggcgatcacagcagcagccgccgcggcagcagcaccaacagcaggaggagcaggaggagccggaggaggaggaggaggaggaggcaaagttagagttggggctggcgctccggagttgctgggctcagcgcagctcccattcattaaggaaccagctgcggaggaaggtggccgagcgcccgcgctgcccactcgctcgctcgcgcactcagacgcgcgccacaacagcgcgccccaagctgcgcagctctgcaaaagtttctgctcgggatctggctctcttccccttggactttagaacgatttagggttgacagaggaaagcagaggcgcgcaggaggagcagaaaacaccaccttctgcagttggaggcaggcagccccggctgcactctagccgccgcgcccggagccggggccgacccgccactatccgcagcagcctcggccaggaggcgacccgggcgcctgggtgtgtggctgctgttgcgggacgtcttcgcggggcgggaggctcgcgccgcagccagcgccatgcaaaactacaagtacgacaaagcgatcgtcccggagagcaagaacggcggcagcccggcgctcaacaacaacccgaggaggagcggcagcaagcgggtgctgctcatctgcctcgacctcttctgcctcttcatggcgggcctccccttcctcatcatcgagacaagcaccatcaagccttaccaccgagggttttactgcaatgatgagagcatcaagtacccactgaaaactggtgagacaataaatgacgctgtgctctgtgccgtggggatcgtcattgccatcctcgcgatcatcacgggggaattctaccggatctattacctgaagaagtcgcggtcgacgattcagaacccctacgtggcagcactctataagcaagtgggctgcttcctctttggctgtgccatcagccagtctttcacagacattgccaaagtgtccatagggcgcctgcgtcctcacttcttgagtgtctgcaaccctgatttcagccagatcaactgctctgaaggctacattcagaactacagatgcagaggtgatgacagcaaagtccaggaagccagagcccgcctgctccggcccctcctgcagttcaccttgatcatgatggccttctacacgggactgtctcgcgtatcagaccacaagcaccatcccagtgatgttctggcaggatttgctcaaggagccctggtggcctgctgcatagttttcttcgtgtctgacctcttcaagactaagacgacgctctccctgcctgcccctgctatccggaaggaaatcctttcacctgtggacattattgacaggaacaatcaccacaacatgatgtaggtgccacccacctcctgagctgtttttgtaaaatgactgctgacagcaagttcttgctgctctccaatctcatcagacagtagaatgtagggaaaaacttttgcccgactgatttttaaaaaggaaaaaaaaaatgttttactatgtggccttccaaaataggtagtgtttgcctatgtggaaacaacagcaaactaacaccaagtgccagagtcctggatgtgcaattggtttaagtgttcatgttctagtgaacacagcttgttcaggaacaaacactaaaacgatttgagtagaggctgctggtcaccttttgtgacctgaggaatcccaggcctgtgagaaaagcaaaaattcacattgcagcacatgatgccagaaatagcactgaatcaagaaaatagccattgcggagctgccctcttgagtctttctgtccatcccattctattctgtactgtgacttcagttcaggaagttttgttttgtgttttaaataaaaggaaagagcaagtttgctcagtcaagtgatcagatcccgaatctagattcccagttctaaggccttatcacctcccctgcccataggccaacaaccatagttcctcacattagtgattagcagactctttgtggacgagtgaatttcacaaacagcacaatttcagaagaaatcgagggcacaggccctcacttttcttcttttgacgcatcatcctgtgatgttgaaatgtcaattgcaggatgctgatgttgtgcacgtcaatcaccgggcacttgcatactcttagaaacagttcgacttcggttactgccttctcccttgaaatccttgctgcgtgcccaccaggatttcctgtgagggcccgggaatgagcaaggcatggtctgccaccagctgacggaaagcagccttctgtacaacagatgggagggtgaagggggcagaatgaaaatcgaaccaaccttttagctgttgcaaatcagaaggagccagagaagcaggcagtctcatgcatgagaggttacccttcaggatgacagagctgagggtctttgtaggagttgctcttgctgtgtaaagcactattgtcttggggttgagccctagggcagttcttggtaggttctgctgggcagaacatatgggttaaatctcggtagagagttttcctcatcctctatccgtaagtgtccttccatgcaaggtcccactctaggtgatagacagggaccccttctactgaacctttgaggaaaggaggaaggaagaaatgcgtttagatcttggatgcagacctttcaaagggttaaatgtaaccatatggatcaaccacatgcacatccttactacagaatccgtcctttcatttcaacttatagcaagctatgatttttatatataaatattatataaataatgtataaaacattaaaagttaactatgtaagatattatttctgaaacaatttagctatatccactatgattataaactgtgtctcgacctgtgttatttacattagctgcttaaaaaagcattgagttaatttttttaaatatcaactaaaatatcatagttctgtggtagacattgttttataatgaaataactgcaactagagaaaactgtataaaaacattaaattgtcagtatttttgtaaggttccattttgtaaagagaataatattcaaagacttttgtagcatacaaagtgaaaacttgtatctgcgaaactatacttgtattaaatgtgctttttaaataaaagctcgtaacacaactaattaaggacttgcaaactgga

SEQ ID NO: 75347 - DNA, 2231 bp, Homo sapiens
agaccagaggaacagcctcaagttcagtcggacctttctaaggaggttttgttggaattccacaagaccctagttctgaaggtaggacaaagaaggagaagagaactgcactgacagactatacctgcaggcccgcttcacttggcgaggagcccgcctgctccggcccctcctgcagttcaccttgatcatgatggccttctacacgggactgtctcgcgtatcagaccacaagcaccatcccagtgatgttctggcaggatttgctcaaggagccctggtggcctgctgcatagttttcttcgtgtctgacctcttcaagactaagacgacgctctccctgcctgcccctgctatccggaaggaaatcctttcacctgtggacattattgacaggaacaatcaccacaacatgatgtaggtgccacccacctcctgagctgtttttgtaaaatgactgctgacagcaagttcttgctgctctccaatctcatcagacagtagaatgtagggaaaaacttttgcccgactgatttttaaaaaggaaaaaaaaaatgttttactatgtggccttccaaaataggtagtgtttgcctatgtggaaacaacagcaaactaacaccaagtgccagagtcctggatgtgcaattggtttaagtgttcatgttctagtgaacacagcttgttcaggaacaaacactaaaacgatttgagtagaggctgctggtcaccttttgtgacctgaggaatcccaggcctgtgagaaaagcaaaaattcacattgcagcacatgatgccagaaatagcactgaatcaagaaaatagccattgcggagctgccctcttgagtctttctgtccatcccattctattctgtactgtgacttcagttcaggaagttttgttttgtgttttaaataaaaggaaagagcaagtttgctcagtcaagtgatcagatcccgaatctagattcccagttctaaggccttatcacctcccctgcccataggccaacaaccatagttcctcacattagtgattagcagactctttgtggacgagtgaatttcacaaacagcacaatttcagaagaaatcgagggcacaggccctcacttttcttcttttgacgcatcatcctgtgatgttgaaatgtcaattgcaggatgctgatgttgtgcacgtcaatcaccgggcacttgcatactcttagaaacagttcgacttcggttactgccttctcccttgaaatccttgctgcgtgcccaccaggatttcctgtgagggcccgggaatgagcaaggcatggtctgccaccagctgacggaaagcagccttctgtacaacagatgggagggtgaagggggcagaatgaaaatcgaaccaaccttttagctgttgcaaatcagaaggagccagagaagcaggcagtctcatgcatgagaggttacccttcaggatgacagagctgagggtctttgtaggagttgctcttgctgtgtaaagcactattgtcttggggttgagccctagggcagttcttggtaggttctgctgggcagaacatatgggttaaatctcggtagagagttttcctcatcctctatccgtaagtgtccttccatgcaaggtcccactctaggtgatagacagggaccccttctactgaacctttgaggaaaggaggaaggaagaaatgcgtttagatcttggatgcagacctttcaaagggttaaatgtaaccatatggatcaaccacatgcacatccttactacagaatccgtcctttcatttcaacttatagcaagctatgatttttatatataaatattatataaataatgtataaaacattaaaagttaactatgtaagatattatttctgaaacaatttagctatatccactatgattataaactgtgtctcgacctgtgttatttacattagctgcttaaaaaagcattgagttaatttttttaaatatcaactaaaatatcatagttctgtggtagacattgttttataatgaaataactgcaactagagaaaactgtataaaaacattaaattgtcagtatttttgtaaggttccattttgtaaagagaataatattcaaagacttttgtagcatacaaagtgaaaacttgtatctgcgaaactatacttgtattaaatgtgctttttaaataaaagctcgtaacacaactaattaaggacttgcaaactgga

SEQ ID NO: 75348 - DNA, 2872 bp, Homo sapiens
tttccttaaaaattatattttcagggtaatacaattcaagtcacaataaagacctgaaagcctcaggtttgtaggtgaggaaaaatgcattttagctgtacagccctaacttttacttgacccaaggccagcaagaaaatgtttctttttatttatatatattttttctttggtgacaatttggtgtttctgaacgctaggggctcccggtttctctggtttgagagtaacttttccttttaggacttttttttttttttttgaagggggtgggggaaaatgtggccttaattatcctacgtcttaggcagcttaaggaaggggctgtgctttcggaatcccatccgagccaagtaaggaggtccctctctctctctccccccacgtcttctctttttaaaggacctcgtgaaataaaagtgcagaaaacaaacccaggcgatcacagcagcagccgccgcggcagcagcaccaacagcaggaggagcaggaggagccggaggaggaggaggaggaggaggcaaagttagagttggggctggcgctccggagttgctgggctcagcgcagctcccattcattaaggaaccagctgcggaggaaggtggccgagcgcccgcgctgcccactcgctcgctcgcgcactcagacgcgcgccacaacagcgcgccccaagctgcgcagctctgcaaaagtttctgctcgggatctggctctcttccccttggactttagaacgatttagggttgacagaggaaagcagaggcgcgcaggaggagcagaaaacaccaccttctgcagttggaggcaggcagccccggctgcactctagccgccgcgcccggagccggggccgacccgccactatccgcagcagcctcggccaggaggcgacccgggcgcctgggtgtgtggctgctgttgcgggacgtcttcgcggggcgggaggctcgcgccgcagccagcgccatgcaaaactacaagtacgacaaagcgatcgtcccggagagcaagaacggcggcagcccggcgctcaacaacaacccgaggaggagcggcagcaagcgggtgctgctcatctgcctcgacctcttctgcctcttcatggcgggcctccccttcctcatcatcgagacaagcaccatcaagccttaccaccgagggttttactgcaatgatgagagcatcaagtacccactgaaaactggtgagacaataaatgacgctgtgctctgtgccgtggggatcgtcattgccatcctcgcgatcatcacgggggaattctaccggatctattacctgaagaagtcgcggtcgacgattcagaacccctacgtggcagcactctataagcaagtgggctgcttcctctttggctgtgccatcagccagtctttcacagacattgccaaaaattcacattgcagcacatgatgccagaaatagcactgaatcaagaaaatagccattgcggagctgccctcttgagtctttctgtccatcccattctattctgtactgtgacttcagttcaggaagttttgttttgtgttttaaataaaaggaaagagcaagtttgctcagtcaagtgatcagatcccgaatctagattcccagttctaaggccttatcacctcccctgcccataggccaacaaccatagttcctcacattagtgattagcagactctttgtggacgagtgaatttcacaaacagcacaatttcagaagaaatcgagggcacaggccctcacttttcttcttttgacgcatcatcctgtgatgttgaaatgtcaattgcaggatgctgatgttgtgcacgtcaatcaccgggcacttgcatactcttagaaacagttcgacttcggttactgccttctcccttgaaatccttgctgcgtgcccaccaggatttcctgtgagggcccgggaatgagcaaggcatggtctgccaccagctgacggaaagcagccttctgtacaacagatgggagggtgaagggggcagaatgaaaatcgaaccaaccttttagctgttgcaaatcagaaggagccagagaagcaggcagtctcatgcatgagaggttacccttcaggatgacagagctgagggtctttgtaggagttgctcttgctgtgtaaagcactattgtcttggggttgagccctagggcagttcttggtaggttctgctgggcagaacatatgggttaaatctcggtagagagttttcctcatcctctatccgtaagtgtccttccatgcaaggtcccactctaggtgatagacagggaccccttctactgaacctttgaggaaaggaggaaggaagaaatgcgtttagatcttggatgcagacctttcaaagggttaaatgtaaccatatggatcaaccacatgcacatccttactacagaatccgtcctttcatttcaacttatagcaagctatgatttttatatataaatattatataaataatgtataaaacattaaaagttaactatgtaagatattatttctgaaacaatttagctatatccactatgattataaactgtgtctcgacctgtgttatttacattagctgcttaaaaaagcattgagttaatttttttaaatatcaactaaaatatcatagttctgtggtagacattgttttataatgaaataactgcaactagagaaaactgtataaaaacattaaattgtcagtatttttgtaaggttccattttgtaaagagaataatattcaaagacttttgtagcatacaaagtgaaaacttgtatctgcgaaactatacttgtattaaatgtgctttttaaataaaagctcgtaacacaactaattaaggacttgcaaactgga

SEQ ID NO: 75349 - DNA, 147 bp, Homo sapiens
aagtttaacaaggcagggaggcacgtagaatatttgtgaacaatagtacagttagccatattaattgtaatgactttatctggacaagcatagcttgttttactgtactttgccttgctgtccttcacagatactgcattttttttt

SEQ ID NO: 75350 - DNA, 577 bp, Homo sapiens
gcagttttcaaccctttgttcagactcagacgggtttcaactcaagcgggtaatctaccccagcagcaggggtgcaaagtccaaaacagctttgtggtgcctggggagtgactaggcagcctgctcacaggggctggagtcatctaaagctagtgatgagctggaatagctttgaaccggttcatccgaactgattgttaaactttcagaacttttgagagtcagttgagaaacatagctattactaaaaaattaaataagattagataaattatagctaaaagcaaaggcaacatatagtcaaagctcatcactttctacttattttactacattttaccattatctgtgcccatgaggtaatgtatgcctgttatgtctgtatggtagaaatactgtatacaggtatactactacacacaccttcccaagtgacagtatttttgtagtttgagatcagctatagtggtggtatttataccatggaaagcaacaaagccatggaaagcaacaaagccatgcaaatcagactcctcctaacccctaagacagttgttaaacatttgccagcatacca

SEQ ID NO: 75351 - DNA, 363 bp, Homo sapiens
actgggaaagaatattgtacaataacgtctacaaaattattacttttcagcctggaatcacgtttgtgatcttctttggaacttatcaatgcaaagcttcataataacggaatgttttcctattgttgcttggattgccttaatctcttaccataactttttcatcccccaacatttaaagtttttgtatactaaaaagtaatagctatttatttaatttaaaatattttaccagctttgaagttacagtgtgtggatatctaagatatcaatctaagctctaatctatacaggcagaagtgctggtgcttgtgaaagcaggacctggaaatagactgggttcaagtcctaagtcaaccccca

SEQ ID NO: 75352 - DNA, 2677 bp, Homo sapiens
gcaattctcctgcctcagcctcctgagtagctgggatcacaggcgtacaccaccacacccagctaagtttttgtacttttagtagagacggggtttcaccatgttggccaggctggtcacggactcctgacctcagatgatctgcccgcctgagcctccgaaagtgctgggattacaggcgtgagccactgcgcccggcatggagctgctattgatgggtgagctccacagcttttgcagaagcagaggatatgacttgagagcagtgctgtcacctctcagcatgtccccaagcccaactggggcctcctggagatgcctcagtcggcactggccccaagggaatcgtggggaacagttgcacaatttgcaagtttctgagtgcagcttttcccatccttgggatcagcagataagttgtaaacacagggaggtactgcttattggatatacttttcataagtaggacagaattcttttgggactctagagttgggaactaccacttactagcggcgtggctgaggcagtcttcctcctctgtggctcaggcccttcatctgtgaaatggggtcacagcatctgcctctcagggtcactgtgaggtgtcgatgtgagcaaggcctgaggcttggcaagaagtcaatgtctgcaactcagcagggagcaatggcaggggcagtcaggggtcggctcggataggggtgggtgggctcctgaggttggaagggtaggaattacagagctcttgttactattgttgttactgtttttaaagatacgatatttcagataattcaggagcacgtaaggatgaaacttaggataacctaaaatcacacaacctagagagaagcgcatttttgtcttcccccattttctaggcaaaaatgaaagtactttgtcctcttgaaaaacaattctctaatgaatatcctatgttacatagaggcctgtgtaatgcatttgtgtggccacatggtgtcaatttcatgaatatacaataatattattaattccctgctgaggacattaactggtttccaaggctgcttgttgtttttgctactacaaataatgcattgatgataaatacttttacatacatggttgtatgtttatctgaactattttcaccaatatattcacctagtgtgtatggaagtgtccatttttgtcatacccctggtaaccctgtgatattatttttaaacattttgctaatggatctctgttcttgtttgaatgtatttaatttccagcagaatgagccccattccttattttgattggccatttatcatgtacatatggtgaaatgcctattcgtgacttagccaatgttgtttctttttcttactgattactacagtacatttttatatgaaagcagcctttgtccccttctcttgtttttcagccctgtgttagaaacaactaagctcacatattcacaaaccaacttttccagttcatctagggcagtggtgctcaacaggggcaattttgccccccagggaacatttggcaatgtctggagacatttttgtcacaggtggggaggagggcagtactgtgggcactcgtggagggaggccagggatggtgcccaacagcccccacgacacagaattacctggctggaagtgggagccgggtggagggagggaagccctgctctggggtcatatctccccgttagattgaacagaggagctcctggtagctgagtgctgacttcattatttttccccgcccttgctttctaccctgctgaagtgctgctgattaaattaccctgaaatccccacaggacacattacttcctcacaggtctctactagcccagcgctgcctcaaggaatggcattattcctttgccactgtgtcctcaccgcactcttggactccgccgaatgcagacaccctcctgtctgcagaaggatctggaggggtagaacgcttcccctctacgacggattgactccccagcacctcaccagcagttctttgaatggagtggctttggaggtgggagttgaggaagaaatgtgagcctgtcattacaggttctgtttagaaaactagtcattctactaaaaaggtatcacataagtaagtaggagcaataaaaacaaagaagatagtgggactccgagaagctttccccgcctctggcctgttagtctatcgttcgttgggcaaggctcttccagtgtgtgaccttttgcgtgttatcacagcatgagtgcagttttgtgtacaggcatccctatattcagcatgtatctgcaacatgccttacctcgtctgctgtcacagagcaaagtggagcaagtggtcgccgttggtctgcacctgagctgggagccgagtggtgacgtgcatatgggccgactgcgtctccacagaacctactcagtgatcttcctgtgtacgactcagtccctgatgttggagttgaactgtaggactgtctgtaaaatgaaagtgcagactttaatgtagtaaagagaatgacttgccagttacaaccaatgagcaaagcagttaattattcaaatattttaccaagagtccaggtttattttttctcaggactacacattctgtgagaccagagggaccaagacatatcactaccagaaatgtgttttcatcagcactgccagaggtt

SEQ ID NO: 75353 - DNA, 1626 bp, Homo sapiens
actaaattcgcggccgcgtcgaaataatgcattgatgataaatacttttacatacatggttgtatgtttatctgaactattttcaccaatatattcacctagtgtgtatggaagtgtccatttttgtcatacccctggtaaccctgtgatattatttttaaacattttgctaatggatctctgttcttgtttgaatgtatttaatttccagcagaatgagccccattccttattttgattggccatttatcatgtacatatggtgaaatgcctattcgtgacttagccaatgttgtttctttttcttactgattactacagtacatttttatatgaaagcagcctttgtccccttctcttgtttttcagccctgtgttagaaacaactaagctcacatattcacaaaccaacttttccagttcatctagggcagtggtgctcaacaggggcaattttgccccccagggaacatttggcaatgtctggagacatttttgtcacaggtggggaggagggcagtactgtgggcactcgtggagggaggccagggatggtgcccaacagcccccacgacacagaattacctggctggaagtgggagccgggtggagggagggaagccctgctctggggtcatatctccccgttagattgaacagaggagctcctggtagctgagtgctgacttcattatttttccccgcccttgctttctaccctgctgaagtgctgctgattaaattaccctgaaatccccacaggacacattacttcctcacaggtctctactagcccagcgctgcctcaaggaatggcattattcctttgccactgtgtcctcaccgcactcttggactccgccgaatgcagacaccctcctgtctgcagaaggatctggaggggtagaacgcttcccctctacgacggattgactccccagcacctcaccagcagttctttgaatggagtggctttggaggtgggagttgaggaagaaatgtgagcctgtcattacaggttctgtttagaaaactagtcattctactaaaaaggtatcacataagtaagtaggagcaataaaaacaaagaagatagtgggactccgagaagctttccccgcctctggcctgttagtctatcgttcgttgggcaaggctcttccagtgtgtgaccttttgcgtgttatcacagcatgagtgcagttttgtgtacaggcatccctatattcagcatgtatctgcaacatgccttacctcgtctgctgtcacagagcaaagtggagcaagtggtcgccgttggtctgcacctgagctgggagccgagtggtgacgtgcatatgggccgactgcgtctccacagaacctactcagtgatcttcctgtgtacgactcagtccctgatgttggagttgaactgtaggactgtctgtaaaatgaaagtgcagactttaatgtagtaaagagaatgacttgccagttacaaccaatgagcaaagcagttaattattcaaatattttaccaagagtccaggtttattttttctcaggactacacattctgtgagaccagagggaccaagacatatcactaccagaaatgtgttttcatcagcactgccagaggtt

SEQ ID NO: 75354 - DNA, 812 bp, Homo sapiens
ggccatcagggcagacctgctatggacctgaaagattccgccccaggtcagccctccactccccacctccccacaatttgagaatgagagggaacaggagtcaggagccggagtgttggccccagtagactccaatcaatgttggacatgattctgattggctaaacactgtgtagatgtttttaaacaaagtccatttaaggttactgcactaatcaaggagtactggattataaaaacatctataaatctgagtttgagtattttttaaaacaaaattgttaaaccagatgtgttgcttttttttcttgtcatctctaagtatagtcctcagttaaatatactaataagcaaaatgcaccaaaacttttggctaatagttgtgctttaacttaatatttgttatttcatagagactgctatgaaaagctttttattctgaatcactgtacagttattctttgatcctgtcagtcaaatctcatttttagggtcttgactaggttttatgaaagcccagtaaggcagtttgcccataaggcagtcatcagtcctgtttcctgatgccacatgacagaaggggtccatgtagaatttcgtttcttcctggaagtcccaaggaaacctgcaagtattatgataactaggaaggaaacctgcaagtattatgatgaactgggaaggaaacctgtaagtattatgatgaaccacaaagtagccctcatcagacactgaatcagccagtgccttgctcttggacttcccagcccccagaactgtgagaaataaatttctgttgtttataagctaaa

SEQ ID NO: 75355 - DNA, 1529 bp, Homo sapiens
  misc_feature (325)..(326): n is a, c, g, or t
  misc_feature (329)..(329): n is a, c, g, or t
  misc_feature (352)..(352): n is a, c, g, or t
tcgtgcgcgtagcatgtggcacttgggcgtctttgatactggttatgtgttacgtgtggatctgcctgggtggattaacccttgctgtggatagaagcagctttaagacctgtgacagaggccgttctttctgcaagcgacagagaatcgtacggcagggctctctccataccgagaccttgttggattctctacatgctttggacctgattaccctcgacgggtccatctgatccatgaggtcaccaaggtgttgctggtgctagagcttcaggggcttcaaaagaacatgactcggttcaggattgatgagctggagcctcgnngancccgataccgtgtaccagatgtnttggtggctgatccaccaatagcccggctttctgtctctggtcgtgatgagaacagtgtggagttaaccatggctgagggaccctacaagatcatcttgacagcacggccattccgccttgacctactagaggaccgaagtcttttgcttagtgtcaatgcccgaggactcttggagtttgagcatcagagggcccctagggtctcgcaaggatcaaaagacccagctgagggcgatggggcccagcctgaggaaacacccagggatggcgacaagccagaggagactcaggggaaggcagagaaagatgagccaggagcctgggaggagacattcaaaactcactctgacagcaagccgtatggccccatgtctgtgggtttggacttctctctgccaggcatggagcatgtctatgggatccctgagcatgcagacaacctgaggctgaaggtcactgagggtggggagccatatcgcctctacaatttggatgtgttccagtatgagctgtacaacccaatggccttgtatgggtctgtgcctgtgctcctggcacacaaccctcatcgcgacttgggcatcttctggctcaatgctgcagagacctgggttgatatatcttccaacactgccgggaagaccctgtttgggaagatgatggactacctgcagggctctggggagaccccacagacagatgttcgctggatgtcagagactggcatcattgacgtcttcctgctgctggggccctcatctctgatgttttccggcaatatgctagtctcacaggaaccaggcgttgcccccactcttctccctcggtaccaccagagccgttggaactaccgggacgagctgatgtgctggaagtggaacagggcttgatgatcacaaacttgccctgtgatgtcatctggctagacattgaacatgctgatggcaaagcggtatttcacctgggaccccagtcgcttcctcagcccggagcatgcttgagacgcttggttactagagggcggaagctggtggcatcgtagaacccacatcaggggctccggtaccgagttcacgaggagctgggacctggggcggttttaaaccggatggtctgaacataggcgggagccagcacgggtcaccggtctatccgaagaggcgtgggaagtcgaaa

SEQ ID NO: 75356 - DNA, 291 bp, Homo sapiens
attcggcatgaggaaacacccagggatggcgacaccagaggagactcaggggaaggcagagaaagatgagccaggagcctgggaggagacattcaaaactcactctgacagcaagccgtatggccccatgtctgtgggtttggacttctctctgccaggcatggagcatgtctatgggatcccttatttaggagccctgaactcccccagagtctatccattcatgcctcttgtatgttgatgccacttcttggaagaagatgagggcaatgagttagggctccttttccc

SEQ ID NO: 75357 - DNA, 1591 bp, Homo sapiens
  misc_feature (325)..(326): n is a, c, g, or t
  misc_feature (329)..(329): n is a, c, g, or t
  misc_feature (352)..(352): n is a, c, g, or t
tcgtgcgcgtagcatgtggcacttgggcgtctttgatactggttatgtgttacgtgtggatctgcctgggtggattaacccttgctgtggatagaagcagctttaagacctgtgacagaggccgttctttctgcaagcgacagagaatcgtacggcagggctctctccataccgagaccttgttggattctctacatgctttggacctgattaccctcgacgggtccatctgatccatgaggtcaccaaggtgttgctggtgctagagcttcaggggcttcaaaagaacatgactcggttcaggattgatgagctggagcctcgnngancccgataccgtgtaccagatgtnttggtggctgatccaccaatagcccggctttctgtctctggtcgtgatgagaacagtgtggagttaaccatggctgagggaccctacaagatcatcttgacagcacggccattccgccttgacctactagaggaccgaagtcttttgcttagtgtcaatgcccgaggactcttggagtttgagcatcagagggcccctagggtctctttctcggataaggttaatctcacgcttggtagcatatgggataagatcaagaaccttttctgcaaggatcaaaagacccagctgagggcgatggggcccagcctgaggaaacacccagggatggcgacaagccagaggagactcaggggaaggcagagaaagatgagccaggagcctgggaggagacattcaaaactcactctgacagcaagccgtatggccccatgtctgtgggtttggacttctctctgccaggcatggagcatgtctatgggatccctgagcatgcagacaacctgaggctgaaggtcactgagggtggggagccatatcgcctctacaatttggatgtgttccagtatgagctgtacaacccaatggccttgtatgggtctgtgcctgtgctcctggcacacaaccctcatcgcgacttgggcatcttctggctcaatgctgcagagacctgggttgatatatcttccaacactgccgggaagaccctgtttgggaagatgatggactacctgcagggctctggggagaccccacagacagatgttcgctggatgtcagagactggcatcattgacgtcttcctgctgctggggccctcatctctgatgttttccggcaatatgctagtctcacaggaaccaggcgttgcccccactcttctccctcggtaccaccagagccgttggaactaccgggacgagctgatgtgctggaagtggaacagggcttgatgatcacaaacttgccctgtgatgtcatctggctagacattgaacatgctgatggcaaagcggtatttcacctgggaccccagtcgcttcctcagcccggagcatgcttgagacgcttggttactagagggcggaagctggtggcatcgtagaacccacatcaggggctccggtaccgagttcacgaggagctgggacctggggcggttttaaaccggatggtctgaacataggcgggagccagcacgggtcaccggtctatccgaagaggcgtgggaagtcgaaa

SEQ ID NO: 75358 - DNA, 368 bp, Homo sapiens
tgtgttcgtgtctaatctctgctaccagactgaaagccccttgaaggcaaagcctacatcttctttgatctctcacagaattgaataaggacatagaccatagactcagggtagcacatctcattcaacctcagccatgtagacctttgactcaagacctcaccattcaggggaggaaaaattagagttctgtgggtgtttggtatatctctagtttgccagagaaatacatagaattaacactacaggaatagggaaaactatgggaatgctgtggcaataggcaaaagggggttctattatgcagcctccagaattcctgaatctatctggagaaagaaaaatgctcacccttgcttcctgctttc

SEQ ID NO: 75359 - DNA, 313 bp, Homo sapiens
gcccagtagcctgagtctaatcttgttatgtctgggaatagagttactagattttctgctaatggctgtattttacatgataataaatccagtcttttctacaaagtctacttaatttatgcaaaacagatataatttggaatgtgtatgaatgaagctattctttcaagggagcagagaggctgctgtagagcctgttaaatacaattttatgggccctcatgtcaggttaacacaagcaaatgttggttctgtggtcatcaaaggtaatgcttattggatagtttcaggtaaaacaaaaaacagcttttga

SEQ ID NO: 75360 - DNA, 247 bp, Homo sapiens
tacaatgcagcagttgcacagatacggtccctaaagtgagaaatgaatgttcgaaagaaggtgctctcgtttggcatggagtgaatgccttgtttccacctcaaatcctaagatggaacacatttttcctggtgacttcaggcagatggcacacctcccacttccgttgtgtgtcatgaaggaggagacacttctatagccagggctgtgcctgaataatgatgtacatgggggggagttcacattc

SEQ ID NO: 75361 - DNA, 613 bp, Homo sapiens
tagatctgaactatatttttatactctgcatgtgtgtgtataacagtatcggaaaagaaaaacattccattttgttatacagattgcgctgtatctttggaaggtcatatgtgctctagtgaaccaagggctgggattaaccctggagaggcagcaccccccacctgtacaccctgccacttgtgtgaagattcctggaatgcccaggttctctccctctagatattttcaaggcctgtcataatgcaaaagagttttcataatctcgtctcttttgaacaccaaaagacatacttcatggaaaataaaatgtgattatataaaagtaatcctgagatttgccacttcctgttgctagggaaggtactgaattgacgtgatgatggaaattgagtgcttacttgcgcatggcagagcagtgatggcacatcccagagggcagtgtaaggattaagagagagcatgtgttttcttttagaagggagcagagtgctttagggatcagggttgtggttaaggtgtcattgtgagatttcagtgagtgtctttttagtaaaattgaactactttcagccagagccaagtgaaagtctccagccctactttaatcctt

SEQ ID NO: 75362 - DNA, 923 bp, Homo sapiens
ggttcgcgccggaagtggaagaccaggcagcccagctgaaggcagtaagctcggctcacagtcgcaggagagttctggggtacacgggcaaaggggcttgagaaggcccggaggcgaagccgaagagaagcaactgtgccccggagaagagaagctcgcccattccagactgggaaccagctttcagtgaagatggcagggccagaactgttgctcgactccaacatccgcctctgggtggtcctacccatcgttatcatcactttcttcgtaggcatgatccgccactacgtgtccatcctgctgcagagcgacaagaagctcacccaggaacaagtatctgacagaaaatatctttcaggcctggtgcaatggctcacacctataatcccagcactttggggggctgagatgggaggatcccttgagcccaggaatttgagaccaaccttggcagcatgtcaagtcctaattcgaagcagagtcctcagggaaaatggaaaatacattcccaaacagtctttcttgacacgaaaatattatttcaacaacccagaggatggatttttcaaaaaaactaaacggaaggtagtgccaccttctcctatgactgatcctactatgttgacagacatgatgaaagggaatgtaacaaatgtcctccctatgattcttattggtggatggatcaacatgacattctcaggctttgtcacaaccaaggtcccatttccactgaccctccgttttaagcctatgttacagcaaggaatcgagctactcacattagatgcatcctggtaagaactttcttttgtttaataaaaacacaaaccacactttgggaagccaaggcgggaggatcacttgagcccatgagtttgagaccagcctgggcaacagagtaagaccctgtctcaaga

SEQ ID NO: 75363 - DNA, 654 bp, Homo sapiens
atcccagcactttgggaggccaaggcgggcagatcatgagatcaggagatcgagaccatcctggctaacatggtgaaaccctgtctcaactaaaaatacaaaaaattagctgggcgtggtggcgggtgcctgtagtcccagctactcaggaggctgaggcaggagaagggcatgaacctgggaggcggagcttgcagtgagccgagatcgcaccactctcagtttgagtccctgcttcctcagtaagctagaggcagatattattcagggaaactagagcagagtggcattttgactgtcttttcttcagaaattgccacagatttccttgtggaagtcgttttccaaaagctatgtggcacagagttcccacctcctctgagaaagagtcacacttattctaaaaataaaacagctcagagtgattgtgaactttttcttctctgcagccaaggtcccatttccactgaccctccgttttaagcctatgttacagcaaggaatcgagctactcacattagatgcatcctggtaagaactttcttttgtttaataaaaacacaaaccacactttgggaagccaaggcgggaggatcacttgagcccatgagtttgagaccagcctgggcaacagagtaagaccctgtctcaaga

SEQ ID NO: 75364 - DNA, 1089 bp, Homo sapiens
  misc_feature (977)..(977): n is a, c, g, or t
  misc_feature (1020)..(1020): n is a, c, g, or t
  misc_feature (1028)..(1028): n is a, c, g, or t
  misc_feature (1051)..(1051): n is a, c, g, or t
  misc_feature (1058)..(1058): n is a, c, g, or t
  misc_feature (1077)..(1077): n is a, c, g, or t
ggttcgcgccggaagtggaagaccaggcagcccagctgaaggcagtaagctcggctcacagtcgcaggagagttctggggtacacgggcaaaggggcttgagaaggcccggaggcgaagccgaagagaagcaactgtgccccggagaagagaagctcgcccattccagactgggaaccagctttcagtgaagatggcagggccagaactgttgctcgactccaacatccgcctctgggtggtcctacccatcgttatcatcactttcttcgtaggcatgatccgccactacgtgtccatcctgctgcagagcgacaagaagctcacccaggaacaagtatctgacagtcaagtcctaattcgaagcagagtcctcagggaaaatggaaaatacattcccaaacagtctttcttgacacgaaaatattatttcaacaacccagaggatggatttttcaaaaaaactaaacggaaggtagtgccaccttctcctatgactgatcctactatgttgacagacatgatgaaagggaatgtaacaaatgtcctccctatgattcttattggtggatggatcaacatgacattctcaggctttgtcacaaccaaggtcccatttccactgaccctccgttttaagcctatgttacagcaaggaatcgagctactcacattagatgcatcctgggtgagttctgcatcctggtacttcctcaatgtatttgggcttcggagcatttactctctgattctgggccaagataatgccgctgaccaatcacgaatgatgcaggagcagatgacgggagcagccatggccatgcccgcagacacaaacaaagctttcaagacagagtgggaagctttggagctgacggatcaccagtgggcactagatgatgtcgaagaagagctcatggccaaagacctccacttcgaaggcatgttcaaaaaggaattacagacctctattttttnaagaccgagcagggattagctgtgtcaggaacttggagttgcncttaaccntgtaactttgtttggagctggcncctcttnaaataaaaaggaggatgcncgagcaaaaaaa

SEQ ID NO: 75365 - DNA, 421 bp, Homo sapiens
aatgaaggcagagaggacagacctgaaaggctaagagggacagatcagcgtccatggaaagcaggagcagaagccagtcttcttccaaacactggcacaaaccactgcctactggatacatttcaccagacaattcaccccagtgtccaagagtttatcttgcttctagaatatattgaaaagagccaccctctgaacaaatggcaaacactatatagtataaataggatgcactgaaaatagtaggcttatttcttaagctgtcatcacgaacattaaccagtaattatatttctccactttttgtagaagacataaatggcaaattctgaatttataatttctaatacttcatttttctgctcttgtaaagttcattttgaactttcaacataaaaatattaaagatttttaattgtgc

SEQ ID NO: 75366 - DNA, 414 bp, Homo sapiens
agaagaataaggatgtgtcttgggttttttgcttaaggtagctggaggccttatttactgagatggagattcctcagagagaatagaggtaagaggtataattttggatgttaagtttgagatacctatcagagagctgagtggaggtatcacgaaggtaatctgacactcaagggagaggtcagagcttaagactcatcagcatacagtctttaaagtcaaaggaacagctctgaaggttttttttgaagctggaaaaataaactagccacgtcttctcttcagaagtagacatgcatggagtggatagaactacatattcatgcagcacaccaacatggcacatgtatacatatgtaacaaacctgcatgttgtgcacatgtatcctaaaacttaaagtataataataatta

SEQ ID NO: 75367 - DNA, 446 bp, Homo sapiens
ctttaaacttcaatccttggctgttgtaggtatacttcaggacttgttgtcaaaataccaataatcaagagaaggtgtcacaatcttagtagtagtaattatcttgatcatcataaagagatagaaatgttatgcagtgaggtcagaaaacaacatgcttgatactcatgtcctccctgagatatctcttggcattttcttacccaattttattgtttaatgctcatgtacagtagactgagggaagcatgaagacctggagttcaaacccccttgggagtgaataacttcttggtcaacttacgaataagaccctaagccagtgaagatccttgttaaaattgacgggaatctagaactggtttttaaaaaagaaaaaaaaagagagagagagaagcaaattatgtcttcaagaccagctacagtggtgatgttgaagttttttc

SEQ ID NO: 75368 - DNA, 374 bp, Homo sapiens
agagtgcaccattgcactctagtctgggtgacgagtggaactccgtctcaaaaacaaagaaaaacagaaaagaaaatccctaactcctaactcgtttgctataataagttatatattgatgtttattcactgcttaaatgaagcaaattaaaataatctttaatttttaaatcccttaatgttatattaattgattaactatcattctgttacccaacagtatacttgaccaatgtttttaacataaaggactactttacagaaaacaaacttacgaatattaagcagcagctgtttgaagtattcatttacttgataggttttattaatatgtgtgcttgtttaaatggtttaaacatgtataactcattgaa

SEQ ID NO: 75369 - DNA, 424 bp, Homo sapiens
gagcccctctctccaataggccctgaggggccactggcacctggctttttggcttggaggcagggccgccggctcaggtgtgttcatttcttcctccatccctttgtttgcgtctgtcatagtcaggctctgtgctggcacatgggtgcagggaccagtgatctagtccctgtcctcaagctgctcagtctactgtgggagacagctcaagggacaggtacccgaccctgtggtcagctctgtgttggaggccacagtgatgatcctacagggtcatggggctaaaaatgctcctctcgtgggcccactgagccaggccccttgctcaaacccagagtctgggctatggctccttgtgcacaaacatcaactgaaagcagcgtccgccgcctgcagccccaggtcaccctgctgggctgcttca

SEQ ID NO: 75370 - DNA, 632 bp, Homo sapiens
aatagcttctgaagcctcccttcatccctgccactcctctttccacagatgcctttggcaggagctggtccgggcctggaaggcagtgcacgcccacagcgccctctgctgaacggtatcagaacagcaggcttggagggcgaaggcaattcctgcaaaggatccctggtttcctacccatgggaaaccccagattctgaagccaggaatgaagggtagatggagcctgggtcagcacccgagaggacccatatgtgcaacctggaggatcttggagcttgggagtagcgtagggggtggttagttcagttcgggatggctgaggaagccgttttaaacaactttcaccgagatcttactgagggatcttactgagggctcaggaacttggcatggccaccatcctgggtatccagggcccctccttcccccaggctaggagaggaacccctcccagcagatgccttcccagactacccttgtctcacttatcatagaggacgtgacgtgtgccgccttccttctcccaggccctggatctggggttgctggacttggtgcgtgggtggtctggatgcttctaggatgaattcataattgggagattctaggtgatgctcagatggaaatga

SEQ ID NO: 75371 - DNA, 151 bp, Homo sapiens
gtgtcatataagcaaagaaccaaggaaatgaatgtcattacaaaaaataaccatttcactgagttaaactgactcttccctttgaactcagaaacacctcatcacagtggtgatgagtcacccctagttttatgatttccttgttaccaag

SEQ ID NO: 75372 - DNA, 460 bp, Homo sapiens
agctctgtgtgatttttaatgcccatgtatattaagatattttgctgctggacgtgcccggaatcccagctactggggaggctgatgtgggaggattgcttgagcccaggagttagagtccagcctgggcaacatagtaagactctgtctctaaaaaactaactaaataaataaaacaatgttttttttttaaagtttatattttgcattcaccctacctaaaataagcagcacagagcaactttaaaacgtggtaagtacttaggcaagccaaatgtttcgatcttctattttagctctgaattttcttattagcaaagctgattatgtggtaaagtaagtggggctataattctatttgttccttacccagaaactttctttaccagccaaacttattgatagaggaagatttgttatacagttgatttaaggcctgtttctgcataaaggcaaagaa

SEQ ID NO: 75373 - DNA, 1480 bp, Homo sapiens
cgagctcggtacccccctcacggattacctcaataagtgccattttggactgtcaaatttagatgctttgtttcagaaagataagccagcatttagttttaaatcactttcctggtttgtaacttgatgctgtttagttaaattgctagttttcctaacactacaatattaattcttctcgtggaagtgtactgatttattatttttattccaagtcagcagatttggaagcattgtggtaaagtctaaggttttcatatccatagtgctgtttggtgagtaccggcagtacagttgaggggagcagggaacagcattgccccgtattgaaggtggagatggttacattcttcactgctttttgcattttgagttgtgtgcctataaaatttggccaaaccattttattattttgttcaaacttgactaagctgagtgatctaaaattatacagaacctaaatcaaagaagagaatgtaaagtcctttagttacttctaagaatttgaagtcaagcacgaatctaagacatagattatttttatatagctaatgaagagtatgttacgaaattgttgggtttttgaggtatctgagggtggcaaattttgtgaatcatgcatgcttcacagaaacaaccaggtttttccagaattagtctggatcagtgcctaacaaagctgttattaattctccacacatgagtctggctaactgggccagctctcatgttttactcctgtctggctacaaatagcactgtgcatagtagccctgtttccccatggtgttggactgtggtaaagtatgttgtgacatactggaattctaataatcctgttgtaagtatgtacagaatctatgtaacttattgttgacatacagaggtttgggaagtagtctaatggacattccttacaatagaatggctgggaagggaaagaaaaaaaaaaaaaaactacctaactccaatcttaatgttgtagttttatagcaaacaaaaattgtcagctttttgtattgaaaggtcagtggtggtaagacaaggtgtcttgtaaattaagattttaagaagtgcattaaaatgttttagaattactctgggaattctgtatatcacactaaaatttttatatcattatgttaataaaagttattgactttgtaattctgcattttgaaatgtgtgaaaagggtctttaaattaccccgaataggttgtatcttattttgctttttttctgactataaaagcagttatgcttatagcataaaatctagaaagcacattaaagtataaagaaaattaaaatttcttataattctacctctgagtaaacagcagcattcgtatgtaacataaaccctctcagggatttattttttctttttaaaaattttttacaaaattaggatcaagtgcttttttaaataatttgcttttgtacttaataaattatagactttaaaatctattacat
